(19) United States
(12) Patent Application Publication
(10) Pub. No.: US 2007/0026454 A1
(43) Pub. Date: Feb. 1, 2007

(54) Human secreted proteins

(76) Inventors: Craig A. Rosen, Laytonsville, MD (US); Steven M. Ruben, Brookeville, MD (US)

Correspondence Address: HUMAN GENOME SCIENCES INC;INTELLECTUAL PROPERTY DEPT., 14200 SHADY GROVE ROAD, ROCKVILLE, MD, 20850, US

(21) Appl. No.: 10/472,965

(22) PCT Filed: Mar. 26, 2002
(86) PCT No.: PCT/US02/09257

§ 371 Date: Jun. 30, 2004

Related U.S. Application Data
(63) Continuation-in-part of application No. 10/105,299, filed on Mar. 26, 2002.
Application No. 10/105,299 is a continuation-in-part of application No. 09/950,082, filed on Sep. 12, 2001.
Application No. 09/950,082 is a continuation-in-part of application No. 60/278,650, filed on Mar. 27, 2001.
Application No. 09/950,082 is a continuation-in-part of application No. 09/833,245, filed on Apr. 12, 2001.
Application No. 09/950,082 is a continuation-in-part of application No. PCT/US01/11988, filed on Apr. 12, 2001.
Application No. 09/950,082 is a continuation-in-part of application No. PCT/US00/06043, filed on Mar. 9, 2000.
Application No. 09/950,082 is a continuation-in-part of application No. PCT/US00/06012, filed on Mar. 9, 2000.
Application No. 09/950,082 is a continuation-in-part of application No. PCT/US00/06058, filed on Mar. 9, 2000.
Application No. 09/950,082 is a continuation-in-part of application No. PCT/US00/06044, filed on Mar. 9, 2000.
Application No. 09/950,082 is a continuation-in-part of application No. PCT/US00/06059, filed on Mar. 9, 2000.
Application No. 09/950,082 is a continuation-in-part of application No. PCT/US00/06042, filed on Mar. 9, 2000.
Application No. 09/950,082 is a continuation-in-part of application No. PCT/US00/06014, filed on Mar. 9, 2000.
Application No. 09/950,082 is a continuation-in-part of application No. PCT/US00/06013, filed on Mar. 9, 2000.
Application No. 09/950,082 is a continuation of application No. PCT/US00/06049, filed on Mar. 9, 2000.
Application No. 09/950,082 is a continuation of application No. PCT/US00/06057, filed on Mar. 9, 2000.
Application No. 09/950,082 is a continuation-in-part of application No. PCT/US00/06824, filed on Mar. 16, 2000.
Application No. PCT/US00/06824 is a continuation-in-part of application No. 60/168,664, filed on Dec. 3, 1999.
Application No. 09/950,082 is a continuation-in-part of application No. PCT/US00/06765, filed on Mar. 16, 2000.
Application No. 09/950,082 is a continuation-in-part of application No. PCT/US00/06792, filed on Mar. 16, 2000.
Application No. 09/950,082 is a continuation-in-part of application No. PCT/US00/06830, filed on Mar. 16, 2000.
Application No. 09/950,082 is a continuation-in-part of application No. PCT/US00/06782, filed on Mar. 16, 2000.
Application No. 09/950,082 is a continuation-in-part of application No. PCT/US00/06822, filed on Mar. 16, 2000.
Application No. 09/950,082 is a continuation-in-part of application No. PCT/US00/06791, filed on Mar. 16, 2000.
Application No. 09/950,082 is a continuation-in-part of application No. PCT/US00/06828, filed on Mar. 16, 2000.
Application No. 09/950,082 is a continuation-in-part of application No. PCT/US00/06823, filed on Mar. 16, 2000.
Application No. 09/950,082 is a continuation-in-part of application No. PCT/US00/06781, filed on Mar. 16, 2000.
Application No. 09/950,082 is a continuation-in-part of application No. PCT/US00/07505, filed on Mar. 22, 2000.
Application No. 09/950,082 is a continuation-in-part of application No. PCT/US00/07440, filed on Mar. 22, 2000.
Application No. 09/950,082 is a continuation-in-part of application No. PCT/US00/07506, filed on Mar. 22, 2000.
Application No. 09/950,082 is a continuation-in-part of application No. PCT/US00/07507, filed on Mar. 22, 2000.
Application No. 09/950,082 is a continuation-in-part of application No. PCT/US00/07535, filed on Mar. 22, 2000.
Application No. 09/950,082 is a continuation-in-part of application No. PCT/US00/07525, filed on Mar. 22, 2000.
Application No. 09/950,082 is a continuation-in-part of application No. PCT/US00/07534, filed on Mar. 22, 2000.
Application No. 09/950,082 is a continuation-in-part of application No. PCT/US00/07483, filed on Mar. 22, 2000.
Application No. 09/950,082 is a continuation-in-part of application No. PCT/US00/07526, filed on Mar. 22, 2000.
Application No. 09/950,082 is a continuation-in-part of application No. PCT/US00/07527, filed on Mar. 22, 2000.
Application No. 09/950,082 is a continuation-in-part of application No. PCT/US00/07661, filed on Mar. 23, 2000.
Application No. 09/950,082 is a continuation-in-part of application No. PCT/US00/07579, filed on Mar. 23, 2000.
Application No. 09/950,082 is a continuation-in-part of application No. PCT/US00/07723, filed on Mar. 23, 2000.
(60) Provisional application No. 60/167,061, filed on Nov. 23, 1999.
(60) Provisional application No. 60/124,146, filed on Mar. 12, 1999.
(60) Provisional application No. 60/166,989, filed on Nov. 23, 1999.
(60) Provisional application No. 60/124,093, filed on Mar. 12, 1999.
(60) Provisional application No. 60/168,654, filed on Dec. 3, 1999.
(60) Provisional application No. 60/124,145, filed on Mar. 12, 1999.
(60) Provisional application No. 60/168,661, filed on Dec. 3, 1999.
(60) Provisional application No. 60/124,099, filed on Mar. 12, 1999.
(60) Provisional application No. 60/168,622, filed on Dec. 3, 1999.
(60) Provisional application No. 60/124,096, filed on Mar. 12, 1999.
(60) Provisional application No. 60/168,663, filed on Dec. 3, 1999.
(60) Provisional application No. 60/124,143, filed on Mar. 12, 1999.
(60) Provisional application No. 60/168,665, filed on Dec. 3, 1999.
(60) Provisional application No. 60/138,598, filed on Jun. 11, 1999.
(60) Provisional application No. 60/124,095, filed on Mar. 12, 1999.
(60) Provisional application No. 60/168,662, filed on Dec. 3, 1999.
(60) Provisional application No. 60/138,626, filed on Jun. 11, 1999.
(60) Provisional application No. 60/125,360, filed on Mar. 19, 1999.
(60) Provisional application No. 60/168,667, filed on Dec. 3, 1999.
(60) Provisional application No. 60/138,574, filed on Jun. 11, 1999.
(60) Provisional application No. 60/124,144, filed on Mar. 12, 1999.
(60) Provisional application No. 60/168,666, filed on Dec. 3, 1999.
(60) Provisional application No. 60/138,597, filed on Jun. 11, 1999.
(60) Provisional application No. 60/124,142, filed on Mar. 12, 1999.
(60) Provisional application No. 60/125,359, filed on Mar. 19, 1999.
(60) Provisional application No. 60/169,906, filed on Dec. 10, 1999.
(60) Provisional application No. 60/126,051, filed on Mar. 23, 1999.
(60) Provisional application No. 60/169,980, filed on Dec. 10, 1999.
(60) Provisional application No. 60/125,362, filed on Mar. 19, 1999.
(60) Provisional application No. 60/169,910, filed on Dec. 10, 1999.
(60) Provisional application No. 60/125,361, filed on Mar. 19, 1999.
(60) Provisional application No. 60/169,936, filed on Dec. 10, 1999.
(60) Provisional application No. 60/125,812, filed on Mar. 23, 1999.
(60) Provisional application No. 60/169,916, filed on Dec. 10, 1999.
(60) Provisional application No. 60/126,054, filed on Mar. 23, 1999.
(60) Provisional application No. 60/169,946, filed on Dec. 10, 1999.
(60) Provisional application No. 60/125,815, filed on Mar. 23, 1999.
(60) Provisional application No. 60/169,616, filed on Dec. 8, 1999.
(60) Provisional application No. 60/125,358, filed on Mar. 19, 1999.
(60) Provisional application No. 60/169,623, filed on Dec. 8, 1999.
(60) Provisional application No. 60/125,364, filed on Mar. 19, 1999.
(60) Provisional application No. 60/169,617, filed on Dec. 8, 1999.
(60) Provisional application No. 60/125,363, filed on Mar. 19, 1999.
(60) Provisional application No. 60/172,410, filed on Dec. 17, 1999.
(60) Provisional application No. 60/126,502, filed on Mar. 26, 1999.
(60) Provisional application No. 60/172,409, filed on Dec. 17, 1999.
(60) Provisional application No. 60/126,503, filed on Mar. 26, 1999.
(60) Provisional application No. 60/172,412, filed on Dec. 17, 1999.
(60) Provisional application No. 60/126,505, filed on Mar. 26, 1999.
(60) Provisional application No. 60/172,408, filed on Dec. 17, 1999.
(60) Provisional application No. 60/126,594, filed on Mar. 26, 1999.
(60) Provisional application No. 60/172,413, filed on Dec. 17, 1999.
(60) Provisional application No. 60/126,511, filed on Mar. 26, 1999.
(60) Provisional application No. 60/171,549, filed on Dec. 22, 1999.
(60) Provisional application No. 60/126,595, filed on Mar. 26, 1999.
(60) Provisional application No. 60/171,504, filed on Dec. 22, 1999.
(60) Provisional application No. 60/126,598, filed on Mar. 26, 1999.
(60) Provisional application No. 60/171,552, filed on Dec. 22, 1999.
(60) Provisional application No. 60/126,596, filed on Mar. 26, 1999.
(60) Provisional application No. 60/171,550, filed on Dec. 22, 1999.
(60) Provisional application No. 60/126,600, filed on Mar. 26, 1999.
(60) Provisional application No. 60/171,551, filed on Dec. 22, 1999.
(60) Provisional application No. 60/126,501, filed on Mar. 26, 1999.
(60) Provisional application No. 60/174,847, filed on Jan. 7, 2000.
(60) Provisional application No. 60/126,504, filed on Mar. 26, 1999.
(60) Provisional application No. 60/174,853, filed on Jan. 7, 2000.
(60) Provisional application No. 60/126,509, filed on Mar. 26, 1999.

(51) Int. Cl. C12Q 1/68; G01N 33/53; A61K 38/17

(52) U.S. Cl. 435/7.1; 514/12; 435/6

(57) ABSTRACT

The present invention relates to human secreted polypeptides, and isolated nucleic acid molecules encoding said polypeptides, useful for diagnosing and treating hematopoietic and hematologic diseases, disorders, and/or conditions related thereto. Antibodies that bind these polypeptides are also encompassed by the present invention. Also encompassed by the invention are vectors, host cells, and recombinant and synthetic methods for producing said polynucleotides, polypeptides, and/or antibodies. The invention further encompasses screening methods for identifying agonists and antagonists of polynucleotides and polypeptides of the invention. The present invention further encompasses methods and compositions for inhibiting or enhancing the production and function of the polypeptides of the present invention.

### FIELD OF THE INVENTION

[0001] The present invention relates to human secreted proteins/polypeptides, and isolated nucleic acid molecules encoding said proteins/polypeptides, useful for detecting, preventing, diagnosing, prognosticating, treating, and/or ameliorating hematopoietic and hematologic diseases and disorders. Antibodies that bind these polypeptides are also encompassed by the present invention. Also encompassed by the invention are vectors, host cells, and recombinant and synthetic methods for producing said polynucleotides, polypeptides, and/or antibodies. The invention further encompasses screening methods for identifying agonists and antagonists of polynucleotides and polypeptides of the invention. The present invention further encompasses methods and compositions for inhibiting or enhancing the production and function of the polypeptides of the present invention.

### BACKGROUND OF THE INVENTION

[0002] Blood is composed of a fluid component, plasma, in which are suspended red blood cells, white blood cells, and platelets. This suspension, circulating through the cardiovascular system, forms the basis of the immune system, provides all of the body's tissues with oxygen and nutrients, and removes carbon dioxide and other metabolic byproducts for excretion.

[0003] Immune cells, red blood cells, and platelets, are derived from common precursor stem cells and develop through a process known as hematopoiesis. During fetal life hematopoiesis occurs in the liver and spleen, but in the adult, hematopoiesis occurs primarily in the bone marrow and thymus. The stem cells from which all blood cells are derived proliferate and differentiate into the various blood cell lineages, (e.g., lymphoid cells (B or T cells), myeloid cells (basophils, eosinophils, neutrophils, macrophages, mast cells), thrombocytes (platelets), or erythrocytes (red blood cells)) in response to cytokines and other signals received from cells (e.g., stromal cells) in the bone marrow microenvironment. Many of the cytokines that promote the growth and differentiation of hematopoietic stem cells are known as “colony stimulating factors”. For example, interleukin-3 (IL-3, and also known as multi-colony stimulating factor) and granulocyte macrophage colony stimulating factor (GM-CSF), which are released by activated macrophages and T cells, stimulate the production of macrophages and granulocytes (myelopoiesis). Stem cell factor (SCF, c-kit ligand) is a growth factor for primitive lymphoid and myeloid hematopoietic bone marrow progenitor cells expressing the early cell surface marker CD34. Other hematopoietic cytokines/growth factors include, but are not limited to macrophage colony stimulating factor (M-CSF), granulocyte colony stimulating factor (G-CSF), and erythropoietin (EPO). Interleukins-1, 6, and 7 have also been shown to function as hematopoietic growth factors/cytokines. Deficiencies in the quantities of mature red or white blood cells, either as a result of insufficient production or excessive destruction, may result in anemias and/or immunodeficiencies.

[0004] In addition to the cellular component of the blood, there are a remarkable variety of soluble blood-borne proteins that serve important physiological functions. Descriptions of some of the functional classes of blood proteins, along with representative members of these classes, are given below.

Coagulation Factors

[0005] The formation of insoluble protein aggregates at the site of vascular injury or inflammation, termed coagulation, is the result of multiple interacting coagulation factors (Dahlback, B., Lancet 355:1627-32). This cascade of interdependent proteins (including Factors V, VIII, IX, X XI, and XII) results in the production of the protease, thrombin. Thrombin converts blood-soluble fibrinogen into fibrin, which polymerizes into insoluble clots that are stabilized by the activity of Factor XIII. This process is balanced by the activity of coagulation inhibitors such as antithrombin III, heparin cofactor II, Protein C and Protein S. Imbalance between pro-clotting factors and coagulation inhibitors leads to potentially serious medical conditions, including improper wound healing and the bleeding disorders hemophilia A and B, as well as excessive clotting disorders such as thrombosis (e.g. cerebral, coronary, and placental), pulmonary embolus, stroke, and coronary artery disease. For a more extensive review see Triplett, D., Clin Chem 46:1260-9.

Immunoproteins

[0006] Blood plasma contains a number of proteins that contribute to the immune response. Immunoglobulin antibodies are glycoproteins with similar structural domains, which bind to specific antigenic invaders and trigger other components of the immune system. The complement cascade, a network of about 20 interacting proteins, is activated by antigen-antibody complexes and results in the lysis of infected cells, as well as other important immune functions. Immunoproteins are important tools for the diagnosis and treatment of infection, cancer, and other disorders. For more detailed discussion of immunoproteins see Meri, J. and Jarva, H., Vox Sang 74 suppl. 2:291-302 and Chapter 23 of Molecular Biology of the Cell, 3^{rd} Edition, edited by Alberts, B. et al.

Hormones

[0007] The blood serves as a major vehicle for hormones and other secreted signaling molecules that act at a site distant to their release. A number of peptide hormones function as regulators of homeostatic processes. For example, parathyroid hormone and calcitonin oppositely regulate serum levels of calcium. Blood-borne peptide hormones that regulate carbohydrate metabolism include insulin, glucagon, and adrenocorticotropin hormone. Vasopressin, angiotensin, and bradykinin are hormones that modulate vasodilation and blood pressure. Follicle-stimulating hormone and leutinizing hormone play important roles in both male and female reproductive functions. Dysfunction of these hormones can lead to a wide spectrum of disorders, including osteoporosis, diabetes, psychiatric disorders, hypoglycemia, obesity, infertility, as well as hypo- and hypertension.

Cytokines

[0008] Cytokines are a class of circulating proteins that act primarily as intercellular signaling molecules regulating hematopoiesis, angiogenesis, and immune system functions. One subgroup of cytokines, the hematopoietins, regulates hematopoietic stem cell differentiation to maintain the proper number and proportions of each blood cell type. For example, the production of erythrocytes is stimulated by the release of erythropoietin from the kidneys in response to decreased blood oxygen levels. Similarly, thrombopoietin stimulates the proliferation and differentiation of megakaryocytes, leading to increased platelet production. Another cytokine subgroup, the chemokines, is secreted by cells of the immune system, and act to coordinate the immune response to an invading antigen. This is a large and diverse class of proteins, and includes RANTES, eotaxin, lymphotactin, MIP-1, and the interleukins. Many of these polypeptides have uses in the diagnosis and treatment of immunological disorders and infection (Holldack. J. et al., Med Ped Oncol Suppl 2:2-9; Chapter 23, Immunology, edited by Elgert, K.).

Carrier Proteins

[0009] A number of soluble proteins found in blood function as carriers of other molecules such as nutrients and waste products. Carrier proteins can also bind exogenously delivered drugs and influence pharmacokinetic properties such as serum half-life and tissue adsorption. Serum albumin, comprising about half of the protein found in blood plasma, regulates osmotic pressure of blood, as well as binds many bioactive molecules. Transferrin is a blood carrier protein that regulates iron levels, while ceruloplasmin regulates copper levels. Thus there exists a clear need for novel polynucleotides and polypeptides (as well as antibodies, agonists, and antagonists) useful in diagnostic and therapeutic methods for detecting, preventing, diagnosing, prognosticating, treating, and/or ameliorating hematopoietic and hematologic diseases and disorders; such as, for example, leukemias, lymphomas, hemophilias, anemias, immunodeficiency disorders (including AIDS), amongst many other conditions. See, e.g., “Blood Related Disorders” and “Immune Activity” sections, infra.

### SUMMARY OF THE INVENTION

[0010] The present invention encompasses human secreted proteins/polypeptides, and isolated nucleic acid molecules encoding said proteins/polypeptides, useful for detecting, preventing, diagnosing, prognosticating, treating, and/or ameliorating hematopoeitic and hematololgic disorders and diseases. Antibodies that bind these polypeptides are also encompassed by the present invention; as are vectors, host cells, and recombinant and synthetic methods for producing said polynucleotides, polypeptides, and/or antibodies. The invention further encompasses screening methods for identifying agonists and antagonists of polynucleotides and polypeptides of the invention. The present invention also encompasses methods and compositions for inhibiting or enhancing the production and function of the polypeptides of the present invention.

### DETAILED DESCRIPTION

Polynucleotides and Polypeptides of the Invention

Description of Table 1A

[0011] Table 1A summarizes information concerning certain polypnucleotides and polypeptides of the invention. The first column provides the gene number in the application for each clone identifier. The second column provides a unique clone identifier, “Clone ID:”, for a cDNA clone related to each contig sequence disclosed in Table 1A. Third column, the cDNA Clones identified in the second column were deposited as indicated in the third column (i.e. by ATCC Deposit No:Z and deposit date). Some of the deposits contain multiple different clones corresponding to the same gene. In the fourth column, “Vector” refers to the type of vector contained in the corresponding cDNA Clone identified in the second column. In the fifth column, the nucleotide sequence identified as “NT SEQ ID NO:X” was assembled from partially homologous (“overlapping”) sequences obtained from the corresponding cDNA clone identified in the second column and, in some cases, from additional related cDNA clones. The overlapping sequences were assembled into a single contiguous sequence of high redundancy (usually three to five overlapping sequences at each nucleotide position), resulting in a final sequence identified as SEQ ID NO:X. In the sixth column, “Total NT Seq.” refers to the total number of nucleotides in the contig sequence identified as SEQ ID NO:X.” The deposited clone may contain all or most of these sequences, reflected by the nucleotide position indicated as “5′ NT of Clone Seq.” (seventh column) and the “3′ NT of Clone Seq.” (eighth column) of SEQ ID NO:X. In the ninth column, the nucleotide position of SEQ ID NO:X of the putative start codon (methionine) is identified as “5′ NT of Start Codon.” Similarly, in column ten, the nucleotide position of SEQ ID NO:X of the predicted signal sequence is identified as “5′ NT of First AA of Signal Pep.” In the eleventh column, the translated amino acid sequence, beginning with the methionine, is identified as “AA SEQ ID NO:Y,” although other reading frames can also be routinely translated using known molecular biology techniques. The polypeptides produced by these alternative open reading frames are specifically contemplated by the present invention.

[0012] In the twelfth and thirteenth columns of Table 1A, the first and last amino acid position of SEQ ID NO:Y of the predicted signal peptide is identified as “First AA of Sig Pep” and “Last AA of Sig Pep.” In the fourteenth column, the predicted first amino acid position of SEQ ID NO:Y of the secreted portion is identified as “Predicted First AA of Secreted Portion”. The amino acid position of SEQ ID NO:Y of the last amino acid encoded by the open reading frame is identified in the fifteenth column as “Last AA of ORF”.

[0013] SEQ ID NO:X (where X may be any of the polynucleotide sequences disclosed in the sequence listing) and the translated SEQ ID NO:Y (where Y may be any of the polypeptide sequences disclosed in the sequence listing) are sufficiently accurate and otherwise suitable for a variety of uses well known in the art and described further below. For instance, SEQ ID NO:X is useful for designing nucleic acid hybridization probes that will detect nucleic acid sequences contained in SEQ ID NO:X or the cDNA contained in the deposited clone. These probes will also hybridize to nucleic acid molecules in biological samples, thereby enabling a variety of forensic and diagnostic methods of the invention. Similarly, polypeptides identified from SEQ ID NO:Y may be used, for example, to generate antibodies which bind specifically to proteins containing the polypeptides and the secreted proteins encoded by the cDNA clones identified in Table 1A and/or elsewhere herein.

[0014] Nevertheless, DNA sequences generated by sequencing reactions can contain sequencing errors. The errors exist as misidentified nucleotides, or as insertions or deletions of nucleotides in the generated DNA sequence. The erroneously inserted or deleted nucleotides cause frame shifts in the reading frames of the predicted amino acid sequence. In these cases, the predicted amino acid sequence diverges from the actual amino acid sequence, even though the generated DNA sequence may be greater than 99.9% identical to the actual DNA sequence (for example, one base insertion or deletion in an open reading frame of over 1000 bases).

[0015] Accordingly, for those applications requiring precision in the nucleotide sequence or the amino acid sequence, the present invention provides not only the generated nucleotide sequence identified as SEQ ID NO:X, and the predicted translated amino acid sequence identified as SEQ ID NO:Y, but also a sample of plasmid DNA containing a human cDNA of the invention deposited with the ATCC, as set forth in Table 1A. The nucleotide sequence of each deposited plasmid can readily be determined by sequencing the deposited plasmid in accordance with known methods.

[0016] The predicted amino acid sequence can then be verified from such deposits. Moreover, the amino acid sequence of the protein encoded by a particular plasmid can also be directly determined by peptide sequencing or by expressing the protein in a suitable host cell containing the deposited human cDNA, collecting the protein, and determining its sequence.

[0017] Also provided in Table 1A is the name of the vector which contains the cDNA plasmid. Each vector is routinely used in the art. The following additional information is provided for convenience.

[0018] Vectors Lambda Zap (U.S. Pat. Nos. 5,128,256 and 5,286,636), Uni-Zap XR (U.S. Pat. Nos. 5,128,256 and 5,286,636), Zap Express (U.S. Pat. Nos. 5,128,256 and 5,286,636), pBluescript (pBS) (Short, J. M. et al., Nucleic Acids Res. 16:7583-7600 (1988); Alting-Mees, M. A. and Short, J. M., Nucleic Acids Res. 17:9494 (1989)) and pBK (Alting-Mees, M. A. et al., Strategies 5:58-61 (1992)) are commercially available from Stratagene Cloning Systems, Inc., 11011 N. Torrey Pines Road, La Jolla, Calif., 92037. pBS contains an ampicillin resistance gene and pBK contains a neomycin resistance gene. Phagemid pBS may be excised from the Lambda Zap and Uni-Zap XR vectors, and phagemid pBK may be excised from the Zap Express vector. Both phagemids may be transformed into E. coli strain XL-1 Blue, also available from StratageneVectors pSport1, pCMVSport 1.0, pCMVSport 2.0 and pCMVSport 3.0, were obtained from Life Technologies, Inc., P.O. Box 6009, Gaithersburg, Md. 20897. All Sport vectors contain an ampicillin resistance gene and may be transformed into E. coli strain DH10B, also available from Life Technologies. See, for instance, Gruber, C. E., et al., Focus 15:59 (1993). Vector lafmid BA (Bento Soares, Columbia University, New York, N.Y.) contains an ampicillin resistance gene and can be transformed into E. coli strain XL-1 Blue. Vector pCR®2.1, which is available from Invitrogen, 1600 Faraday Avenue, Carlsbad, Calif. 92008, contains an ampicillin resistance gene and may be transformed into E. coli strain DH10B, available from Life Technologies. See, for instance, Clark, J. M., Nuc. Acids Res. 16:9677-9686 (1988) and Mead, D. et al., Bio/Technology 9: (1991).

[0019] The present invention also relates to the genes corresponding to SEQ ID NO:X, SEQ ID NO:Y, and/or a deposited cDNA (cDNA Clone ID). The corresponding gene can be isolated in accordance with known methods using the sequence information disclosed herein. Such methods include, but are not limited to, preparing probes or primers from the disclosed sequence and identifying or amplifying the corresponding gene from appropriate sources of genomic material.

[0020] Also provided in the present invention are allelic variants, orthologs, and/or species homologs. Procedures known in the art can be used to obtain full-length genes, allelic variants, splice variants, full-length coding portions, orthologs, and/or species homologs of genes corresponding to SEQ ID NO:X and SEQ ID NO:Y using information from the sequences disclosed herein or the clones deposited with the ATCC. For example, allelic variants and/or species homologs may be isolated and identified by making suitable probes or primers from the sequences provided herein and screening a suitable nucleic acid source for allelic variants and/or the desired homologue.

[0021] The present invention provides a polynucleotide comprising, or alternatively consisting of, the nucleic acid sequence of SEQ ID NO:X and/or a cDNA contained in ATCC Deposit No. Z. The present invention also provides a polypeptide comprising, or alternatively, consisting of, the polypeptide sequence of SEQ ID NO:Y, a polypeptide encoded by SEQ ID NO:X, and/or a polypeptide encoded by a cDNA contained in ATCC deposit No. Z. Polynucleotides encoding a polypeptide comprising, or alternatively consisting of the polypeptide sequence of SEQ ID NO:Y, a polypeptide encoded by SEQ ID NO:X and/or a polypeptide encoded by the cDNA contained in ATCC Deposit No. Z, are also encompassed by the invention. The present invention further encompasses a polynucleotide comprising, or alternatively consisting of the complement of the nucleic acid sequence of SEQ ID NO:X, and/or the complement of the coding strand of the cDNA contained in ATCC Deposit No. Z.

[0022] Description of Table 1B (Comprised of Tables 1B.1 and 1B.2)

[0023] Table 1B.1 and Table 1B.2 summarize some of the polynucleotides encompassed by the invention (including cDNA clones related to the sequences (Clone ID:), contig sequences (contig identifier (Contig ID:) and contig nucleotide sequence identifiers (SEQ ID NO:X)) and further summarizes certain characteristics of these polynucleotides and the polypeptides encoded thereby. The first column of Tables 1B.1 and 1B.2 provide the gene numbers in the application for each clone identifier. The second column of Tables 1B.1 and 1B.2 provide unique clone identifiers, “Clone ID:”, for cDNA clones related to each contig sequence disclosed in Table 1A and/or Table 1B. The third column of Tables 1B.1 and 1B.2 provide unique contig identifiers, “Contig ID:” for each of the contig sequences disclosed in these tables. The fourth column of Tables 1B.1 and 1B.2 provide the sequence identifiers, “SEQ ID NO:X”, for each of the contig sequences disclosed in Table 1A and/or 1B.

[0024] Table 1B.1

[0025] The fifth column of Table 1B.1, “ORF (From-To)”, provides the location (i.e., nucleotide position numbers) within the polynucleotide sequence of SEQ ID NO:X that delineates the preferred open reading frame (ORF) that encodes the amino acid sequence shown in the sequence listing and referenced in Table 1B.1 as SEQ ID NO:Y (column 6). Column 7 of Table 1B.1 lists residues comprising predicted epitopes contained in the polypeptides encoded by each of the preferred ORFs (SEQ ID NO:Y). Identification of potential immunogenic regions was performed according to the method of Jameson and Wolf (CABIOS, 4; 181-186 (1988)); specifically, the Genetics Computer Group (GCG) implementation of this algorithm, embodied in the program PEPTIDESTRUCTURE (Wisconsin Package v10.0, Genetics Computer Group (GCG), Madison, Wis.). This method returns a measure of the probability that a given residue is found on the surface of the protein. Regions where the antigenic index score is greater than 0.9 over at least 6 amino acids are indicated in Table 1B.1 as “Predicted Epitopes”. In particular embodiments, polypeptides of the invention comprise, or alternatively consist of, one, two, three, four, five or more of the predicted epitopes described in Table 1B.1. It will be appreciated that depending on the analytical criteria used to predict antigenic determinants, the exact address of the determinant may vary slightly. Column 8 of Table 1B.1 (“Cytologic Band”) provides the chromosomal location of polynucleotides corresponding to SEQ ID NO:X. Chromosomal location was determined by finding exact matches to EST and cDNA sequences contained in the NCBI (National Center for Biotechnology Information) UniGene database. Given a presumptive chromosomal location, disease locus association was determined by comparison with the Morbid Map, derived from Online Mendelian Inheritance in Man (Online Mendelian Inheritance in Man, OMIM™. McKusick-Nathans Institute for Genetic Medicine, Johns Hopkins University (Baltimore, Md.) and National Center for Biotechnology Information, National Library of Medicine (Bethesda, Md.) 2000. World Wide Web URL: http://www.ncbi.nlm.nih.gov/omim/). If the putative chromosomal location of the Query overlaps with the chromosomal location of a Morbid Map entry, an OMIM identification number is disclosed in Table 1B.1, column 9 labeled “OMIM Disease Reference(s)”. A key to the OMIM reference identification numbers is provided in Table 5.

[0026] Table 1B.2

[0027] Column 5 of Table 1B.2, “Tissue Distribution” shows the expression profile of tissue, cells, and/or cell line libraries which express the polynucleotides of the invention. The first code number shown in Table 1B.2 column 5 (preceding the colon), represents the tissue/cell source identifier code corresponding to the key provided in Table 4. Expression of these polynucleotides was not observed in the other tissues and/or cell libraries tested. The second number in column 5 (following the colon), represents the number of times a sequence corresponding to the reference polynucleotide sequence (e.g., SEQ ID NO:X) was identified in the corresponding tissue/cell source. Those tissue/cell source identifier codes in which the first two letters are “AR” designate information generated using DNA array technology. Utilizing this technology, cDNAs were amplified by PCR and then transferred, in duplicate, onto the array. Gene expression was assayed through hybridization of first strand cDNA probes to the DNA array. cDNA probes were generated from total RNA extracted from a variety of different tissues and cell lines. Probe synthesis was performed in the presence of ³³P dCTP, using oligo(dT) to prime reverse transcription. After hybridization, high stringency washing conditions were employed to remove non-specific hybrids from the array. The remaining signal, emanating from each gene target, was measured using a Phosphorimager. Gene expression was reported as Phosphor Stimulating Luminescence (PSL) which reflects the level of phosphor signal generated from the probe hybridized to each of the gene targets represented on the array. A local background signal subtraction was performed before the total signal generated from each array was used to normalize gene expression between the different hybridizations. The value presented after “[array code]:” represents the mean of the duplicate values, following background subtraction and probe normalization. One of skill in the art could routinely use this information to identify normal and/or diseased tissue(s) which show a predominant expression pattern of the corresponding polynucleotide of the invention or to identify polynucleotides which show predominant and/or specific tissue and/or cell expression.

[0028] Description of Table 1C

[0029] Table 1C summarizes additional polynucleotides encompassed by the invention (including cDNA clones related to the sequences (Clone ID:), contig sequences (contig identifier (Contig ID:) contig nucleotide sequence identifiers (SEQ ID NO:X)), and genomic sequences (SEQ ID NO:B). The first column provides a unique clone identifier, “Clone ID:”, for a cDNA clone related to each contig sequence. The second column provides the sequence identifier, “SEQ ID NO:X”, for each contig sequence. The third column provides a unique contig identifier, “Contig ID:” for each contig sequence. The fourth column, provides a BAC identifier “BAC ID NO:A” for the BAC clone referenced in the corresponding row of the table. The fifth column provides the nucleotide sequence identifier, “SEQ ID NO:B” for a fragment of the BAC clone identified in column four of the corresponding row of the table. The sixth column, “Exon From-To”, provides the location (i.e., nucleotide position numbers) within the polynucleotide sequence of SEQ ID NO:B which delineate certain polynucleotides of the invention that are also exemplary members of polynucleotide sequences that encode polypeptides of the invention (e.g., polypeptides containing amino acid sequences encoded by the polynucleotide sequences delineated in column six, and fragments and variants thereof).

[0030] Description of Table 1D

[0031] Table 1D: In preferred embodiments, the present invention encompasses a method of detecting, preventing, diagnosing, prognosticating, treating, and/or ameliorating hematopoietic and hematologic diseases and disorders; comprising administering to a patient in which such treatment, prevention, or amelioration is desired a protein, nucleic acid, or antibody of the invention (or fragment or variant thereof) represented by Table 1A, Table 1B, and Table 1C, in an amount effective to detect, prevent, diagnose, prognosticate, treat, and/or ameliorate the disease or disorder.

[0032] As indicated in Table 1D, the polynucleotides, polypeptides, agonists, or antagonists of the present invention (including antibodies) can be used in assays to test for one or more biological activities. If these polynucleotides and polypeptides do exhibit activity in a particular assay, it is likely that these molecules may be involved in the diseases associated with the biological activity. Thus, the polynucleotides or polypeptides, or agonists or antagonists thereof (including antibodies) could be used to treat the associated disease.

[0033] Table 1D provides information related to biological activities for polynucleotides and polypeptides of the invention (including antibodies, agonists, and/or antagonists thereof). Table 1D also provides information related to assays which may be used to test polynucleotides and polypeptides of the invention (including antibodies, agonists, and/or antagonists thereof) for the corresponding biological activities. The first column (“Gene No.”) provides the gene number in the application for each clone identifier. The second column (“cDNA Clone ID:”) provides the unique clone identifier for each clone as previously described and indicated in Tables 1A, 1B, and 1C. The third column (“AA SEQ ID NO:Y”) indicates the Sequence Listing SEQ ID Number for polypeptide sequences encoded by the corresponding cDNA clones (also as indicated in Tables 1A, 1B, and 2). The fourth column (“Biological Activity”) indicates a biological activity corresponding to the indicated polypeptides (or polynucleotides encoding said polypeptides). The fifth column (“Exemplary Activity Assay”) further describes the corresponding biological activity and provides information pertaining to the various types of assays which may be performed to test, demonstrate, or quantify the corresponding biological activity. Table 1D describes the use of FMAT technology, inter alia, for testing or demonstrating various biological activities. Fluorometric microvolume assay technology (FMAT) is a fluorescence-based system which provides a means to perform nonradioactive cell- and bead-based assays to detect activation of cell signal transduction pathways. This technology was designed specifically for ligand binding and immunological assays. Using this technology, fluorescent cells or beads at the bottom of the well are detected as localized areas of concentrated fluorescence using a data processing system. Unbound flurophore comprising the background signal is ignored, allowing for a wide variety of homogeneous assays. FMAT technology may be used for peptide ligand binding assays, immunofluorescence, apoptosis, cytotoxicity, and bead-based immunocapture assays. See, Miraglia S et. al., “Homogeneous cell and bead based assays for highthroughput screening using flourometric microvolume assay technology,” Journal of Biomolecular Screening; 4:193-204 (1999). In particular, FMAT technology may be used to test, confirm and/or identify the ability of polypeptides (including polypeptide fragments and variants) to activate signal transduction pathways. For example, FMAT technology may be used to test, confirm, and/or identify the ability of polypeptides to upregulate production of immunomodulatory proteins (such as, for example, interleulins, GM-CSF, Rantes, and Tumor Necrosis factors, as well as other cellular regulators (e.g. insulin)).

[0034] Table 1D also describes the use of kinase assays for testing, demonstrating, or quantifying biological activity. In this regard, the phosphorylation and de-phosphorylation of specific amino acid residues (e.g. Tyrosine, Serine, Threonine) on cell-signal transduction proteins provides a fast, reversible means for activation and de-activation of cellular signal transduction pathways. Moreover, cell signal transduction via phosphorylation/de-phosphorylation is crucial to the regulation of a wide variety of cellular processes (e.g. proliferation, differentiation, migration, apoptosis, etc.). Accordingly, kinase assays provide a powerful tool useful for testing, confirming, and/or identifying polypeptides (including polypeptide fragments and variants) that mediate cell signal transduction events via protein phosphorylation. See e.g., Forrer, P., Tamaskovic R., and Jaussi, R. “Enzyme-Linked Immunosorbent Assay for Measurement of JNK, ERK, and p38 Kinase Activities” Biol. Chem. 379(8-9): 1101-1110 (1998).

[0035] Description of Table 2

[0036] Table 2 summarizes homology and features of some of the polypeptides of the invention. The first column provides a unique clone identifier, “Clone ID:”, corresponding to a cDNA clone disclosed in Table 1A or Table 1B. The second column provides the unique contig identifier, “Contig ID:” corresponding to contigs in Table 1B and allowing for correlation with the information in Table 1B. The third column provides the sequence identifier, “SEQ ID NO:X”, for the contig polynucleotide sequence. The fourth column provides the analysis method by which the homology/identity disclosed in the Table was determined. Comparisons were made between polypeptides encoded by the polynucleotides of the invention and either a non-redundant protein database (herein referred to as “NR”), or a database of protein families (herein referred to as “PFAM”) as further described below. The fifth column provides a description of the PFAM/NR hit having a significant match to a polypeptide of the invention. Column six provides the accession number of the PFAM/NR hit disclosed in the fifth column. Column seven, “Score/Percent Identity”, provides a quality score or the percent identity, of the hit disclosed in columns five and six. Columns 8 and 9, “NT From” and “NT To” respectively, delineate the polynucleotides in “SEQ ID NO:X” that encode a polypeptide having a significant match to the PFAM/NR database as disclosed in the fifth and sixth columns. In specific embodiments polypeptides of the invention comprise, or alternatively consist of, an amino acid sequence encoded by a polynucleotide in SEQ ID NO:X as delineated in columns 8 and 9, or fragments or variants thereof.

[0037] Description of Table 3

[0038] Table 3 provides polynucleotide sequences that may be disclaimed according to certain embodiments of the invention. The first column provides a unique clone identifier, “Clone ID”, for a cDNA clone related to contig sequences disclosed in Table 1B. The second column provides the sequence identifier, “SEQ ID NO:X”, for contig sequences disclosed in Table 1A and/or Table 1B. The third column provides the unique contig identifier, “Contig ID:”, for contigs disclosed in Table 1B. The fourth column provides a unique integer ‘a’ where ‘a’ is any integer between 1 and the final nucleotide minus 15 of SEQ ID NO:X, and the fifth column provides a unique integer ‘b’ where ‘b’ is any integer between 15 and the final nucleotide of SEQ ID NO:X, where both a and b correspond to the positions of nucleotide residues shown in SEQ ID NO:X, and where b is greater than or equal to a +14. For each of the polynucleotides shown as SEQ ID NO:X, the uniquely defined integers can be substituted into the general formula of a-b, and used to describe polynucleotides which may be preferably excluded from the invention. In certain embodiments, preferably excluded from the invention are at least one, two, three, four, five, ten, or more of the polynucleotide sequence(s) having the accession number(s) disclosed in the sixth column of this Table (including for example, published sequence in connection with a particular BAC clone). In further embodiments, preferably excluded from the invention are the specific polynucleotide sequence(s) contained in the clones corresponding to at least one, two, three, four, five, ten, or more of the available material having the accession numbers identified in the sixth column of this Table (including for example, the actual sequence contained in an identified BAC clone).

[0039] Description of Table 4

[0040] Table 4 provides a key to the tissue/cell source identifier code disclosed in Table 1B.2, column 5. Column 1 of Table 4 provides the tissue/cell source identifier code disclosed in Table 1B.2, Column 5. Columns 2-5 provide a description of the tissue or cell source. Note that “Description” and “Tissue” sources (i.e. columns 2 and 3) having the prefix “a_” indicates organs, tissues, or cells derived from “adult” sources. Codes corresponding to diseased tissues are indicated in column 6 with the word “disease.” The use of the word “disease” in column 6 is non-limiting. The tissue or cell source may be specific (e.g. a neoplasm), or may be disease-associated (e.g., a tissue sample from a normal portion of a diseased organ). Furthermore, tissues and/or cells lacking the “diseas” designation may still be derived from sources directly or indirectly involved in a disease state or disorder, and therefore may have a further utility in that disease state or disorder. In numerous cases where the tissue/cell source is a library, column 7 identifies the vector used to generate the library.

[0041] Description of Table 5

[0042] Table 5 provides a key to the OMIM reference identification numbers disclosed in Table 1B.1, column 9. OMIM reference identification numbers (Column 1) were derived from Online Mendelian Inheritance in Man (Online Mendelian Inheritance in Man, OMIM. McKusick-Nathans Institute for Genetic Medicine, Johns Hopkins University (Baltimore, Md.) and National Center for Biotechnology Information, National Library of Medicine, (Bethesda, Md.) 2000. World Wide Web URL: http://www.ncbi.nlm.nih.gov/omim/). Column 2 provides diseases associated with the cytologic band disclosed in Table 1B.1, column 8, as determined using the Morbid Map database.

[0043] Description of Table 6

[0044] Table 6 summarizes some of the ATCC Deposits, Deposit dates, and ATCC designation numbers of deposits made with the ATCC in connection with the present application. These deposits were made in addition to those described in the Table 1A.

[0045] Description of Table 7

[0046] Table 7 shows the cDNA libraries sequenced, and ATCC designation numbers and vector information relating to these cDNA libraries. The first column shows the first four letters indicating the Library from which each library clone was derived. The second column indicates the catalogued tissue description for the corresponding libraries. The third column indicates the vector containing the corresponding clones. The fourth column shows the ATCC deposit designation for each libray clone as indicated by the deposit information in Table 6.

Definitions

[0047] The following definitions are provided to facilitate understanding of certain terms used throughout this specification.

[0048] In the present invention, “isolated” refers to material removed from its original environment (e.g., the natural environment if it is naturally occurring), and thus is altered “by the hand of man” from its natural state. For example, an isolated polynucleotide could be part of a vector or a composition of matter, or could be contained within a cell, and still be “isolated” because that vector, composition of matter, or particular cell is not the original environment of the polynucleotide. The term “isolated” does not refer to genomic or cDNA libraries, whole cell total or mRNA preparations, genomic DNA preparations (including those separated by electrophoresis and transferred onto blots), sheared whole cell genomic DNA preparations or other compositions where the art demonstrates no distinguishing features of the polynucleotide/sequences of the present invention.

[0049] In the present invention, a “secreted” protein refers to those proteins capable of being directed to the ER, secretory vesicles, or the extracellular space as a result of a signal sequence, as well as those proteins released into the extracellular space without necessarily containing a signal sequence. If the secreted protein is released into the extracellular space, the secreted protein can undergo extracellular processing to produce a “mature” protein. Release into the extracellular space can occur by many mechanisms, including exocytosis and proteolytic cleavage.

[0050] As used herein, a “polynucleotide” refers to a molecule having a nucleic acid sequence encoding SEQ ID NO:Y or a fragment or variant thereof (e.g., the polypeptide delinated in columns fourteen and fifteen of Table 1A); a nucleic acid sequence contained in SEQ ID NO:X (as described in column 5 of Table 1A and/or column 3 of Table 1B) or the complement thereof; a cDNA sequence contained in Clone ID: (as described in column 2 of Table 1A and/or Table 1B and contained within a library deposited with the ATCC); a nucleotide sequence encoding the polypeptide encoded by a nucleotide sequence in SEQ ID NO:B as defined in column 6 (EXON From-To) of Table 1C or a fragment or variant thereof; or a nucleotide coding sequence in SEQ ID NO:B as defined in column 6 of Table 1C or the complement thereof. For example, the polynucleotide can contain the nucleotide sequence of the full length cDNA sequence, including the 5′ and 3′ untranslated sequences, the coding region, as well as fragments, epitopes, domains, and variants of the nucleic acid sequence. Moreover, as used herein, a “polypeptide” refers to a molecule having an amino acid sequence encoded by a polynucleotide of the invention as broadly defined (obviously excluding poly-Phenylalanine or poly-Lysine peptide sequences which result from translation of a polyA tail of a sequence corresponding to a cDNA).

[0051] In the present invention, “SEQ ID NO:X” was often generated by overlapping sequences contained in multiple clones (contig analysis). A representative clone containing all or most of the sequence for SEQ ID NO:X is deposited at Human Genome Sciences, Inc. (HGS) in a catalogued and archived library. As shown, for example, in column 2 of Table 1B, each clone is identified by a cDNA Clone ID (identifier generally referred to herein as Clone ID:). Each Clone ID is unique to an individual clone and the Clone ID is all the information needed to retrieve a given clone from the HGS library. Table 7 provides a list of the deposited cDNA libraries. One can use the Clone ID: to determine the library source by reference to Tables 6 and 7. Table 7 lists the deposited cDNA libraries by name and links each library to an ATCC Deposit. Library names contain four characters, for example, “HTWE.” The name of a cDNA clone (Clone ID) isolated from that library begins with the same four characters, for example “HTWEP07”. As mentioned below, Table 1A and/or Table 1B correlates the Clone ID names with SEQ ID NO:X. Thus, starting with an SEQ ID NO:X, one can use Tables 1A, 1B, 6, 7, and 9 to determine the corresponding Clone ID, which library it came from and which ATCC deposit the library is contained in. Furthermore, it is possible to retrieve a given cDNA clone from the source library by techniques known in the art and described elsewhere herein. The ATCC is located at 10801 University Boulevard, Manassas, Va. 20110-2209, USA. The ATCC deposits were made pursuant to the terms of the Budapest Treaty on the international recognition of the deposit of microorganisms for the purposes of patent procedure.

[0052] In specific embodiments, the polynucleotides of the invention are at least 15, at least 30, at least 50, at least 100, at least 125, at least 500, or at least 1000 continuous nucleotides but are less than or equal to 300 kb, 200 kb, 100 kb, 50 kb, 15 kb, 10 kb, 7.5 kb, 5 kb, 2.5 kb, 2.0 kb, or 1 kb, in length. In a further embodiment, polynucleotides of the invention comprise a portion of the coding sequences, as disclosed herein, but do not comprise all or a portion of any intron. In another embodiment, the polynucleotides comprising coding sequences do not contain coding sequences of a genomic flanking gene (i.e., 5′ or 3′ to the gene of interest in the genome). In other embodiments, the polynucleotides of the invention do not contain the coding sequence of more than 1000, 500, 250, 100, 50, 25, 20, 15, 10, 5, 4, 3, 2, or 1 genomic flanking gene(s).

[0053] A “polynucleotide” of the present invention also includes those polynucleotides capable of hybridizing, under stringent hybridization conditions, to sequences contained in SEQ ID NO:X, or the complement thereof (e.g., the complement of any one, two, three, four, or more of the polynucleotide fragments described herein), the polynucleotide sequence delineated in columns 7 and 8 of Table 1A or the complement thereof, the polynucleotide sequence delineated in columns 8 and 9 of Table 2 or the complement thereof, and/or cDNA sequences contained in Clone ID: (e.g., the complement of any one, two, three, four, or more of the polynucleotide fragments, or the cDNA clone within the pool of cDNA clones deposited with the ATCC, described herein), and/or the polynucleotide sequence delineated in column 6 of Table 1C or the complement thereof. “Stringent hybridization conditions” refers to an overnight incubation at 42 degree C. in a solution comprising 50% formamide, 5×SSC (750 mM NaCl, 75 mM trisodium citrate), 50 mM sodium phosphate (pH 7.6), 5× Denhardt's solution, 10% dextran sulfate, and 20 μg/l ml denatured, sheared salmon sperm DNA, followed by washing the filters in 0.1×SSC at about 65 degree C.

[0054] Also contemplated are nucleic acid molecules that hybridize to the polynucleotides of the present invention at lower stringency hybridization conditions. Changes in the stringency of hybridization and signal detection are primarily accomplished through the manipulation of formamide concentration (lower percentages of formamide result in lowered stringency); salt conditions, or temperature. For example, lower stringency conditions include an overnight incubation at 37 degree C. in a solution comprising 6×SSPE (20×SSPE=3M NaCl; 0.2M NaH₂PO₄; 0.02M EDTA, pH 7.4), 0.5% SDS, 30% formamide, 100 ug/ml salmon sperm blocking DNA; followed by washes at 50 degree C. with 1×SSPE, 0.1% SDS. In addition, to achieve even lower stringency, washes performed following stringent hybridization can be done at higher salt concentrations (e.g. 5×SSC). Note that variations in the above conditions may be accomplished through the inclusion and/or substitution of alternate blocking reagents used to suppress background in hybridization experiments. Typical blocking reagents include Denhardt's reagent, BLOTTO, heparin, denatured salmon sperm DNA, and commercially available proprietary formulations. The inclusion of specific blocking reagents may require modification of the hybridization conditions described above, due to problems with compatibility.

[0055] Of course, a polynucleotide which hybridizes only to polyA+ sequences (such as any 3′ terminal polyA+ tract of a cDNA shown in the sequence listing), or to a complementary stretch of T (or U) residues, would not be included in the definition of “polynucleotide,” since such a polynucleotide would hybridize to any nucleic acid molecule containing a poly (A) stretch or the complement thereof (e.g., practically any double-stranded cDNA clone generated using oligo dT as a primer).

[0056] The polynucleotide of the present invention can be composed of any polyribonucleotide or polydeoxribonucleotide, which may be unmodified RNA or DNA or modified RNA or DNA. For example, polynucleotides can be composed of single- and double-stranded DNA, DNA that is a mixture of single- and double-stranded regions, single- and double-stranded RNA, and RNA that is mixture of single- and double-stranded regions, hybrid molecules comprising DNA and RNA that may be single-stranded or, more typically, double-stranded or a mixture of single- and double-stranded regions. In addition, the polynucleotide can be composed of triple-stranded regions comprising RNA or DNA or both RNA and DNA. A polynucleotide may also contain one or more modified bases or DNA or RNA backbones modified for stability or for other reasons. “Modified” bases include, for example, tritylated bases and unusual bases such as inosine. A variety of modifications can be made to DNA and RNA; thus, “polynucleotide” embraces chemically, enzymatically, or metabolically modified forms.

[0057] In specific embodiments, the polynucleotides of the invention are at least 15, at least 30, at least 50, at least 100, at least 125, at least 500, or at least 1000 continuous nucleotides but are less than or equal to 300 kb, 200 kb, 100 kb, 50 kb, 15 kb, 10 kb, 7.5 kb, 5 kb, 2.5 kb, 2.0 kb, or 1 kb, in length. In a further embodiment, polynucleotides of the invention comprise a portion of the coding sequences, as disclosed herein, but do not comprise all or a portion of any intron. In another embodiment, the polynucleotides comprising coding sequences do not contain coding sequences of a genomic flanking gene (i.e., 5′ or 3′ to the gene of interest in the genome). In other embodiments, the polynucleotides of the invention do not contain the coding sequence of more than 1000, 500, 250, 100, 50, 25, 20, 15, 10, 5, 4, 3, 2, or 1 genomic flanking gene(s).

[0058] “SEQ ID NO:X” refers to a polynucleotide sequence described in column 5 of Table 1A, while “SEQ ID NO:Y” refers to a polypeptide sequence described in column 10 of Table 1A. SEQ ID NO:X is identified by an integer specified in column 6 of Table 1A. The polypeptide sequence SEQ ID NO:Y is a translated open reading frame (ORF) encoded by polynucleotide SEQ ID NO:X. The polynucleotide sequences are shown in the sequence listing immediately followed by all of the polypeptide sequences. Thus, a polypeptide sequence corresponding to polynucleotide sequence SEQ ID NO:2 is the first polypeptide sequence shown in the sequence listing. The second polypeptide sequence corresponds to the polynucleotide sequence shown as SEQ ID NO:3, and so on.

[0059] The polypeptide of the present invention can be composed of amino acids joined to each other by peptide bonds or modified peptide bonds, i.e., peptide isosteres, and may contain amino acids other than the 20 gene-encoded amino acids. The polypeptides may be modified by either natural processes, such as posttranslational processing, or by chemical modification techniques which are well known in the art. Such modifications are well described in basic texts and in more detailed monographs, as well as in a voluminous research literature. Modifications can occur anywhere in a polypeptide, including the peptide backbone, the amino acid side-chains and the amino or carboxyl termini. It will be appreciated that the same type of modification may be present in the same or varying degrees at several sites in a given polypeptide. Also, a given polypeptide may contain many types of modifications. Polypeptides may be branched, for example, as a result of ubiquitination, and they may be cyclic, with or without branching. Cyclic, branched, and branched cyclic polypeptides may result from posttranslation natural processes or may be made by synthetic methods. Modifications include acetylation, acylation, ADP-ribosylation, amidation, covalent attachment of flavin, covalent attachment of a heme moiety, covalent attachment of a nucleotide or nucleotide derivative, covalent attachment of a lipid or lipid derivative, covalent attachment of phosphotidylinositol, cross-linking, cyclization, disulfide bond formation, demethylation, formation of covalent cross-links, formation of cysteine, formation of pyroglutamate, formylation, gamma-carboxylation, glycosylation, GPI anchor formation, hydroxylation, iodination, methylation, myristoylation, oxidation, pegylation, proteolytic processing, phosphorylation, prenylation, racemization, selenoylation, sulfation, transfer-RNA mediated addition of amino acids to proteins such as arginylation, and ubiquitination. (See, for instance, PROTEINS—STRUCTURE AND MOLECULAR PROPERTIES, 2nd Ed., T. E. Creighton, W.H. Freeman and Company, New York (1993); POSTTRANSLATIONAL COVALENT MODIFICATION OF PROTEINS, B. C. Johnson, Ed., Academic Press, New York, pgs. 1-12 (1983); Seifter et al., Meth. Enzymol. 182:626-646 (1990); Rattan et al., Ann. N.Y. Acad. Sci. 663:48-62 (1992)).

[0060] “SEQ ID NO:X” refers to a polynucleotide sequence described, for example, in Tables 1A, Table 1B, or Table 2, while “SEQ ID NO:Y” refers to a polypeptide sequence described in column 11 of Table 1A and or column 6 of Table. 1B.1, SEQ ID NO:X is identified by an integer specified in column 4 of Table 1B. The polypeptide sequence SEQ ID NO:Y is a translated open reading frame (ORF) encoded by polynucleotide SEQ ID NO:X. “Clone ID:” refers to a cDNA clone described in column 2 of Table 1A and/or 1B.

[0061] “A polypeptide having functional activity” refers to a polypeptide capable of displaying one or more known functional activities associated with a full-length (complete) protein. Such functional activities include, but are not limited to, biological activity (e.g. activity useful in treating, preventing and/or ameliorating hematopoietic and hematologic diseases and disorders), antigenicity (ability to bind [or compete with a polypeptide for binding] to an anti-polypeptide antibody), immunogenicity (ability to generate antibody which binds to a specific polypeptide of the invention), ability to form multimers with polypeptides of the invention, and ability to bind to a receptor or ligand for a polypeptide.

[0062] The polypeptides of the invention can be assayed for functional activity (e.g. biological activity) using or routinely modifying assays known in the art, as well as assays described herein. Specifically, one of skill in the art may routinely assay secreted polypeptides (including fragments and variants) of the invention for activity using assays as described in the examples section below.

[0063] “A polypeptide having biological activity” refers to a polypeptide exhibiting activity similar to, but not necessarily identical to, an activity of a polypeptide of the present invention, including mature forms, as measured in a particular biological assay, with or without dose dependency. In the case where dose dependency does exist, it need not be identical to that of the polypeptide, but rather substantially similar to the dose-dependence in a given activity as compared to the polypeptide of the present invention (i.e., the candidate polypeptide will exhibit greater activity or not more than about 25-fold less and, preferably, not more than about tenfold less activity, and most preferably, not more than about three-fold less activity relative to the polypeptide of the present invention).

Tables

[0064] Table 1A

[0065] Table 1A summarizes information concerning certain polypnucleotides and polypeptides of the invention. The first column provides the gene number in the application for each clone identifier. The second column provides a unique clone identifier, “Clone ID:”, for a cDNA clone related to each contig sequence disclosed in Table 1A. Third column, the cDNA Clones identified in the second column were deposited as indicated in the third column (i.e. by ATCC Deposit No:Z and deposit date). Some of the deposits contain multiple different clones corresponding to the same gene. In the fourth column, “Vector” refers to the type of vector contained in the corresponding cDNA Clone identified in the second column. In the fifth column, the nucleotide sequence identified as “NT SEQ ID NO:X” was assembled from partially homologous (“overlapping”) sequences obtained from the corresponding cDNA clone identified in the second column and, in some cases, from additional related cDNA clones. The overlapping sequences were assembled into a single contiguous sequence of high redundancy (usually three to five overlapping sequences at each nucleotide position), resulting in a final sequence identified as SEQ ID NO:X. In the sixth column, “Total NT Seq.” refers to the total number of nucleotides in the contig sequence identified as SEQ ID NO:X.” The deposited clone may contain all or most of these sequences, reflected by the nucleotide position indicated as “5′ NT of Clone Seq.” (seventh column) and the “3′ NT of Clone Seq.” (eighth column) of SEQ ID NO:X. In the ninth column, the nucleotide position of SEQ ID NO:X of the putative start codon (methionine) is identified as “5′ NT of Start Codon.” Similarly, in column ten, the nucleotide position of SEQ ID NO:X of the predicted signal sequence is identified as “5′ NT of First AA of Signal Pep.” In the eleventh column, the translated amino acid sequence, beginning with the methionine, is identified as “AA SEQ ID NO:Y,” although other reading frames can also be routinely translated using known molecular biology techniques. The polypeptides produced by these alternative open reading frames are specifically contemplated by the present invention.

[0066] In the twelfth and thirteenth columns of Table 1A, the first and last amino acid position of SEQ ID NO:Y of the predicted signal peptide is identified as “First AA of Sig Pep” and “Last AA of Sig Pep.” In the fourteenth column, the predicted first amino acid position of SEQ ID NO:Y of the secreted portion is identified as “Predicted First AA of Secreted Portion”. The amino acid position of SEQ ID NO:Y of the last amino acid encoded by the open reading frame is identified in the fifteenth column as “Last AA of ORF”.

[0067] SEQ ID NO:X (where X may be any of the polynucleotide sequences disclosed in the sequence listing) and the translated SEQ ID NO:Y (where Y may be any of the polypeptide sequences disclosed in the sequence listing) are sufficiently accurate and otherwise suitable for a variety of uses well known in the art and described further below. For instance, SEQ ID NO:X is useful for designing nucleic acid hybridization probes that will detect nucleic acid sequences contained in SEQ ID NO:X or the cDNA contained in the deposited clone. These probes will also hybridize to nucleic acid molecules in biological samples, thereby enabling a variety of forensic and diagnostic methods of the invention. Similarly, polypeptides identified from SEQ ID NO:Y may be used, for example, to generate antibodies which bind specifically to proteins containing the polypeptides and the secreted proteins encoded by the cDNA clones identified in Table 1A and/or elsewhere herein.

[0068] Nevertheless, DNA sequences generated by sequencing reactions can contain sequencing errors. The errors exist as misidentified nucleotides, or as insertions or deletions of nucleotides in the generated DNA sequence. The erroneously inserted or deleted nucleotides cause frame shifts in the reading frames of the predicted amino acid sequence. In these cases, the predicted amino acid sequence diverges from the actual amino acid sequence, even though the generated DNA sequence may be greater than 99.9% identical to the actual DNA sequence (for example, one base insertion or deletion in an open reading frame of over 1000 bases).

[0069] Accordingly, for those applications requiring precision in the nucleotide sequence or the amino acid sequence, the present invention provides not only the generated nucleotide sequence identified as SEQ ID NO:X, and the predicted translated amino acid sequence identified as SEQ ID NO:Y, but also a sample of plasmid DNA containing a human cDNA of the invention deposited with the ATCC, as set forth in Table 1A. The nucleotide sequence of each deposited plasmid can readily be determined by sequencing the deposited plasmid in accordance with known methods.

[0070] The predicted amino acid sequence can then be verified from such deposits. Moreover, the amino acid sequence of the protein encoded by a particular plasmid can also be directly determined by peptide sequencing or by expressing the protein in a suitable host cell containing the deposited human cDNA, collecting the protein, and determining its sequence.

[0071] Also provided in Table 1A is the name of the vector which contains the cDNA plasmid. Each vector is routinely used in the art. The following additional information is provided for convenience.

[0072] Vectors Lambda Zap (U.S. Pat. Nos. 5,128,256 and 5,286,636), Uni-Zap XR (U.S. Pat. Nos. 5,128,256 and 5,286,636), Zap Express (U.S. Pat. Nos. 5,128,256 and 5,286,636), pBluescript (pBS) (Short, J. M. et al., Nucleic Acids Res. 16:7583-7600 (1988); Alting-Mees, M. A. and Short, J. M., Nucleic Acids Res. 17:9494 (1989)) and pBK (Alting-Mees, M. A. et al., Strategies 5:58-61 (1992)) are commercially available from Stratagene Cloning Systems, Inc., 11011 N. Torrey Pines Road, La Jolla, Calif., 92037. pBS contains an ampicillin resistance gene and pBK contains a neomycin resistance gene. Phagemid pBS may be excised from the Lambda Zap and Uni-Zap XR vectors, and phagemid pBK may be excised from the Zap Express vector. Both phagemids may be transformed into E. coli strain XL-1 Blue, also available from Stratagene.

[0073] Vectors pSport1, pCMVSport 1.0, pCMVSport 2.0 and pCMVSport 3.0, were obtained from Life Technologies, Inc., P.O. Box 6009, Gaithersburg, Md. 20897. All Sport vectors contain an ampicillin resistance gene and may be transformed into E. coli strain DH10B, also available from Life Technologies. See, for instance, Gruber, C. E., et al., Focus 15:59 (1993). Vector lafmid BA (Bento Soares, Columbia University, New York, N.Y.) contains an ampicillin resistance gene and can be transformed into E. coli strain XL-1 Blue. Vector pCR®2.1, which is available from Invitrogen, 1600 Faraday Avenue, Carlsbad, Calif. 92008, contains an ampicillin resistance gene and may be transformed into E. coli strain DH10B, available from Life Technologies. See, for instance, Clark, J. M., Nuc. Acids Res. 16:9677-9686 (1988) and Mead, D. et al., Bio/Technology 9: (1991).

[0074] The present invention also relates to the genes corresponding to SEQ ID NO:X, SEQ ID NO:Y, and/or a deposited cDNA (cDNA Clone ID). The corresponding gene can be isolated in accordance with known methods using the sequence information disclosed herein. Such methods include, but are not limited to, preparing probes or primers from the disclosed sequence and identifying or amplifying the corresponding gene from appropriate sources of genomic material.

[0075] Also provided in the present invention are allelic variants, orthologs, and/or species homologs. Procedures known in the art can be used to obtain full-length genes, allelic variants, splice variants, full-length coding portions, orthologs, and/or species homologs of genes corresponding to SEQ ID NO:X and SEQ ID NO:Y using information from the sequences disclosed herein or the clones deposited with the ATCC. For example, allelic variants and/or species homologs may be isolated and identified by making suitable probes or primers from the sequences provided herein and screening a suitable nucleic acid source for allelic variants and/or the desired homologue.

[0076] The present invention provides a polynucleotide comprising, or alternatively consisting of, the nucleic acid sequence of SEQ ID NO:X and/or a cDNA contained in ATCC Deposit No. Z. The present invention also provides a polypeptide comprising, or alternatively, consisting of, the polypeptide sequence of SEQ ID NO:Y, a polypeptide encoded by SEQ ID NO:X, and/or a polypeptide encoded by a cDNA contained in ATCC deposit No. Z. Polynucleotides encoding a polypeptide comprising, or alternatively consisting of the polypeptide sequence of SEQ ID NO:Y, a polypeptide encoded by SEQ ID NO:X and/or a polypeptide encoded by the cDNA contained in ATCC Deposit No. Z, are also encompassed by the invention. The present invention further encompasses a polynucleotide comprising, or alternatively consisting of the complement of the nucleic acid sequence of SEQ ID NO:X, and/or the complement of the coding strand of the cDNA contained in ATCC Deposit No. Z.

TABLE 1A

| | | | | NT | | 5′ | 3′ | 5′ | | AA | | Last | | |
|---|---|---|---|---|---|---|---|---|---|---|---|---|---|---|
| | | ATCC | | SEQ | | NT | NT | NT | 5′ NT of | SEQ | First | AA | First | |
| | | Deposit | | ID | Total | of | of | of | First AA | ID | AA of | of | AA of | Last |
| Gene | cDNA | No: Z and | | NO: | NT | Clone | Clone | Start | of Signal | NO: | Sig | Sig | Secreted | AA of |
| No. | Clone ID | Date | Vector | X | Seq. | Seq. | Seq. | Codon | Pep | Y | Pep | Pep | Portion | ORF |
| 1 | H6EDM64 | 203959 | Uni-ZAP | 11 | 2610 | 1275 | 2377 | 1448 | 1448 | 274 | 1 | | | 6 |
| | | Apr. 26, 1999 | XR | | | | | | | | | | | |
| 2 | H6EEU40 | 203917 | Uni-ZAP | 12 | 951 | 1 | 951 | 175 | 175 | 275 | 1 | 27 | 28 | 47 |
| | | Apr. 08, 1999 | XR | | | | | | | | | | | |
| 3 | HACBJ56 | 203979 | Uni-ZAP | 13 | 888 | 1 | 888 | | 250 | 276 | 1 | 9 | 10 | 25 |
| | | Apr. 29, 1999 | XR | | | | | | | | | | | |
| 4 | HACBS22 | 203979 | Uni-ZAP | 14 | 3239 | 1 | 3239 | 217 | 217 | 277 | 1 | 23 | 24 | 41 |
| | | Apr. 29, 1999 | XR | | | | | | | | | | | |
| 5 | HACBT91 | 203917 | Uni-ZAP | 15 | 841 | 1 | 841 | | 329 | 278 | 1 | 7 | 8 | 59 |
| | | Apr. 08, 1999 | XR | | | | | | | | | | | |
| 6 | HADDJ13 | 203917 | pSport1 | 16 | 2318 | 1 | 2318 | 347 | 347 | 279 | 1 | 20 | 21 | 30 |
| | | Apr. 08, 1999 | | | | | | | | | | | | |
| 7 | HADMA77 | 203917 | pBluescript | 17 | 1913 | 763 | 1913 | | 992 | 280 | 1 | 14 | 15 | 23 |
| | | Apr. 08, 1999 | | | | | | | | | | | | |
| 8 | HADMB15 | 203979 | pBluescript | 18 | 330 | 1 | 330 | | 238 | 281 | 1 | 11 | 12 | 20 |
| | | Apr. 29, 1999 | | | | | | | | | | | | |
| 9 | HAGBQ12 | 203917 | Uni-ZAP | 19 | 743 | 1 | 743 | 171 | 171 | 282 | 1 | 19 | 20 | 21 |
| | | Apr. 08, 1999 | XR | | | | | | | | | | | |
| 10 | HAGCC87 | 203917 | Uni-ZAP | 20 | 1592 | 479 | 1592 | 509 | 509 | 283 | 1 | | | 9 |
| | | Apr. 08, 1999 | XR | | | | | | | | | | | |
| 11 | HAGFJ67 | PTA-181 | Uni-ZAP | 21 | 2122 | 1 | 2122 | 208 | 208 | 284 | 1 | 26 | 27 | 92 |
| | | Jun. 07, 1999 | XR | | | | | | | | | | | |
| 12 | HAGFS57 | 203979 | Uni-ZAP | 22 | 874 | 1 | 874 | 241 | 241 | 285 | 1 | 26 | 27 | 54 |
| | | Apr. 29, 1999 | XR | | | | | | | | | | | |
| 13 | HAGHN57 | 203917 | Uni-ZAP | 23 | 2440 | 843 | 2440 | 900 | 900 | 286 | 1 | | | 10 |
| | | Apr. 08, 1999 | XR | | | | | | | | | | | |
| 14 | HAGHR18 | 203917 | Uni-ZAP | 24 | 1142 | 1 | 1142 | 28 | 28 | 287 | 1 | 17 | 18 | 32 |
| | | Apr. 08, 1999 | XR | | | | | | | | | | | |
| 15 | HAJAA47 | 203917 | pCMVSport | 25 | 1237 | 1 | 1237 | | 192 | 288 | 1 | 15 | 16 | 38 |
| | | Apr. 08, 1999 | 3.0 | | | | | | | | | | | |
| 16 | HAJAY92 | 203959 | pCMVSport | 26 | 2345 | 1 | 2345 | 12 | 12 | 289 | 1 | 20 | 21 | 94 |
| | | Apr. 26, 1999 | 3.0 | | | | | | | | | | | |
| 17 | HAJBV67 | PTA-181 | pCMVSport | 27 | 2536 | 1 | 2536 | 605 | 605 | 290 | 1 | 19 | 20 | 359 |
| | | Jun. 07, 1999 | 3.0 | | | | | | | | | | | |
| 18 | HAQBG57 | 203917 | Uni-ZAP | 28 | 1048 | 1 | 1031 | | 170 | 291 | 1 | 15 | 16 | 56 |
| | | Apr. 08, 1999 | XR | | | | | | | | | | | |
| 19 | HARAE26 | 203917 | pBluescript | 29 | 1245 | 1 | 1245 | 225 | 225 | 292 | 1 | 30 | 31 | 97 |
| | | Apr. 08, 1999 | SK− | | | | | | | | | | | |
| 20 | HATCD80 | 203917 | Uni-ZAP | 30 | 1809 | 95 | 1809 | 296 | 296 | 293 | 1 | 23 | 24 | 37 |
| | | Apr. 08, 1999 | XR | | | | | | | | | | | |
| 21 | HBAGD86 | 203917 | pSport1 | 31 | 1713 | 293 | 1596 | 521 | 521 | 294 | 1 | 18 | 19 | 19 |
| | | Apr. 08, 1999 | | | | | | | | | | | | |
| 22 | HBGBC29 | 203917 | Uni-ZAP | 32 | 1856 | 764 | 1829 | | 1016 | 295 | 1 | | | 2 |
| | | Apr. 08, 1999 | XR | | | | | | | | | | | |
| 23 | HBHAA05 | 203917 | Uni-ZAP | 33 | 690 | 1 | 690 | | 110 | 296 | 1 | 16 | 17 | 58 |
| | | Apr. 08, 1999 | XR | | | | | | | | | | | |
| 24 | HBHAA81 | 203959 | Uni-ZAP | 34 | 1647 | 1 | 1647 | 28 | 28 | 297 | 1 | 24 | 25 | 203 |
| | | Apr. 26, 1999 | XR | | | | | | | | | | | |
| 25 | HBJAB02 | 203917 | Uni-ZAP | 35 | 1693 | 1 | 1665 | 84 | 84 | 298 | 1 | 27 | 28 | 34 |
| | | Apr. 08, 1999 | XR | | | | | | | | | | | |
| 26 | HBJAC40 | 203979 | Uni-ZAP | 36 | 1767 | 184 | 1729 | | 329 | 299 | 1 | | | 13 |
| | | Apr. 29, 1999 | XR | | | | | | | | | | | |
| 27 | HBJCR46 | 203917 | Uni-ZAP | 37 | 3208 | 2270 | 3202 | 589 | 589 | 300 | 1 | 1 | 2 | 733 |
| | | Apr. 08, 1999 | XR | | | | | | | | | | | |
| 28 | HBJDW56 | 203917 | Uni-ZAP | 38 | 637 | 1 | 637 | | 121 | 301 | 1 | | | 8 |
| | | Apr. 08, 1999 | XR | | | | | | | | | | | |
| 29 | HBJEL16 | 203979 | Uni-ZAP | 39 | 750 | 1 | 750 | 115 | 115 | 302 | 1 | 24 | 25 | 36 |
| | | Apr. 29, 1999 | XR | | | | | | | | | | | |
| 30 | HBJFK45 | 203917 | Uni-ZAP | 40 | 543 | 1 | 543 | | 430 | 303 | 1 | | | 8 |
| | | Apr. 08, 1999 | XR | | | | | | | | | | | |
| 31 | HBJKD16 | 203979 | Uni-ZAP | 41 | 1629 | 1 | 1629 | 78 | 78 | 304 | 1 | 18 | 19 | 31 |
| | | Apr. 29, 1999 | XR | | | | | | | | | | | |
| 32 | HBMUH74 | PTA-181 | Uni-ZAP | 42 | 726 | 1 | 726 | 344 | 344 | 305 | 1 | 13 | 14 | 28 |
| | | Jun. 07, 1999 | XR | | | | | | | | | | | |
| 33 | HBQAB79 | 203917 | Lambda | 43 | 1331 | 1 | 1331 | 190 | 190 | 306 | 1 | | | 11 |
| | | Apr. 08, 1999 | ZAP II | | | | | | | | | | | |
| 34 | HBXCM66 | 203917 | ZAP | 44 | 1010 | 41 | 1010 | 119 | 119 | 307 | 1 | | | 16 |
| | | Apr. 08, 1999 | Express | | | | | | | | | | | |
| 35 | HBXCX15 | 203917 | ZAP | 45 | 1219 | 1 | 1219 | | 1148 | 308 | 1 | | | 1 |
| | | Apr. 08, 1999 | Express | | | | | | | | | | | |
| 36 | HCDBO32 | 203917 | Uni-ZAP | 46 | 2630 | 1480 | 2630 | 1669 | 1669 | 309 | 1 | 25 | 26 | 71 |
| | | Apr. 08, 1999 | XR | | | | | | | | | | | |
| 37 | HCEDR26 | 203917 | Uni-ZAP | 47 | 1419 | 1 | 1419 | 177 | 177 | 310 | 1 | 26 | 27 | 55 |
| | | Apr. 08, 1999 | XR | | | | | | | | | | | |
| 38 | HCEEE79 | 203917 | Uni-ZAP | 48 | 1052 | 1 | 1052 | 131 | 131 | 311 | 1 | 15 | 16 | 55 |
| | | Apr. 08, 1999 | XR | | | | | | | | | | | |
| 39 | HGEFG93 | 203917 | Uni-ZAP | 49 | 2280 | 1 | 2280 | | 166 | 312 | 1 | | | 13 |
| | | Apr. 08, 1999 | XR | | | | | | | | | | | |
| 40 | HCEFZ82 | 203917 | Uni-ZAP | 50 | 1811 | 44 | 1781 | 215 | 215 | 313 | 1 | 16 | 17 | 265 |
| | | Apr. 08, 1999 | XR | | | | | | | | | | | |
| 41 | HCFLN88 | 203917 | pSport1 | 51 | 1434 | 1 | 1434 | 101 | 101 | 314 | 1 | 16 | 17 | 25 |
| | | Apr. 08, 1999 | | | | | | | | | | | | |
| 42 | HCHAB84 | 203979 | pSport1 | 52 | 1359 | 62 | 1359 | | 304 | 315 | 1 | 23 | 24 | 147 |
| | | Apr. 29, 1999 | | | | | | | | | | | | |
| 43 | HCLBK61 | 203979 | Lambda | 53 | 1588 | 574 | 1563 | | 1050 | 316 | 1 | 18 | 19 | 29 |
| | | Apr. 29, 1999 | ZAP II | | | | | | | | | | | |
| 44 | HCMSX51 | 203917 | Uni-ZAP | 54 | 2253 | 334 | 2190 | | 539 | 317 | 1 | 31 | 32 | 80 |
| | | Apr. 08, 1999 | XR | | | | | | | | | | | |
| 45 | HCNCO11 | 203917 | Lambda | 55 | 746 | 1 | 746 | 101 | 101 | 318 | 1 | | | 14 |
| | | Apr. 08, 1999 | ZAP II | | | | | | | | | | | |
| 46 | HCNSD29 | PTA-181 | pBluescript | 56 | 1728 | 1031 | 1633 | 1145 | 1145 | 319 | 1 | 19 | 20 | 31 |
| | | Jun. 07, 1999 | | | | | | | | | | | | |
| 47 | HCQBH72 | 203917 | Lambda | 57 | 1796 | 776 | 1796 | 31 | 31 | 320 | 1 | 25 | 26 | 47 |
| | | Apr. 08, 1999 | ZAP II | | | | | | | | | | | |
| 48 | HCQCC96 | 203979 | Lambda | 58 | 2166 | 632 | 1455 | 782 | 782 | 321 | 1 | 20 | 21 | 45 |
| | | Apr. 29, 1999 | ZAP II | | | | | | | | | | | |
| 49 | HCUDD64 | 203917 | ZAP | 59 | 402 | 150 | 389 | 256 | 256 | 322 | 1 | 35 | 36 | 49 |
| | | Apr. 08, 1999 | Express | | | | | | | | | | | |
| 50 | HCWAE64 | 203917 | ZAP | 60 | 471 | 1 | 471 | | 410 | 323 | 1 | | | 5 |
| | | Apr. 08, 1999 | Express | | | | | | | | | | | |
| 51 | HDPCW16 | 203960 | pCMVSport | 61 | 1536 | 1 | 1536 | 172 | 172 | 324 | 1 | 38 | 39 | 55 |
| | | Apr. 26, 1999 | 3.0 | | | | | | | | | | | |
| 52 | HDPDI72 | PTA-794 | pCMVSport | 62 | 1550 | 1 | 1550 | 23 | 23 | 325 | 1 | 17 | 18 | 120 |
| | | Sep. 27, 1999 | 3.0 | | | | | | | | | | | |
| 53 | HDPGE24 | 203960 | pCMVSport | 63 | 2625 | 1 | 2625 | 173 | 173 | 326 | 1 | 11 | 12 | 73 |
| | | Apr. 26, 1999 | 3.0 | | | | | | | | | | | |
| 54 | HDPIE44 | PTA-794 | pCMVSport | 64 | 4115 | 1 | 4115 | 169 | 169 | 327 | 1 | 35 | 36 | 60 |
| | | Sep. 27, 1999 | 3.0 | | | | | | | | | | | |
| 55 | HDPIU94 | 203960 | pCMVSport | 65 | 2196 | 21 | 2196 | 208 | 208 | 328 | 1 | 21 | 22 | 23 |
| | | Apr. 26, 1999 | 3.0 | | | | | | | | | | | |
| 56 | HDPIY31 | PTA-793 | pCMVSport | 66 | 1978 | 1 | 1978 | 268 | 268 | 329 | 1 | 16 | 17 | 35 |
| | | Sep. 27, 1999 | 3.0 | | | | | | | | | | | |
| 57 | HDPOC24 | 203960 | pCMVSport | 67 | 1777 | 302 | 1725 | 418 | 418 | 330 | 1 | 23 | 24 | 133 |
| | | Apr. 26, 1999 | 3.0 | | | | | | | | | | | |
| 58 | HDPPD93 | 203960 | pCMVSport | 68 | 701 | 1 | 701 | 28 | 28 | 331 | 1 | | | 12 |
| | | Apr. 26, 1999 | 3.0 | | | | | | | | | | | |
| 59 | HDPPQ30 | 203960 | pCMVSport | 69 | 1063 | 1 | 1063 | 220 | 220 | 332 | 1 | 22 | 23 | 38 |
| | | Apr. 26, 1999 | 3.0 | | | | | | | | | | | |
| 60 | HDQHM36 | PTA-181 | pCMVSport | 70 | 1547 | 1 | 1547 | 129 | 129 | 333 | 1 | 18 | 19 | 48 |
| | | Jun. 07, 1999 | 3.0 | | | | | | | | | | | |
| 61 | HDTLM18 | 203960 | pCMVSport | 71 | 525 | 1 | 525 | 345 | 345 | 334 | 1 | 18 | 19 | 60 |
| | | Apr. 26, 1999 | 2.0 | | | | | | | | | | | |
| 62 | HE2CM39 | 203960 | Uni-ZAP | 72 | 566 | 1 | 566 | | 10 | 335 | 1 | | | 13 |
| | | Apr. 26, 1999 | XR | | | | | | | | | | | |
| 63 | HE6CS65 | 203960 | Uni-ZAP | 73 | 1526 | 1 | 1526 | | 295 | 336 | 1 | 10 | 11 | 62 |
| | | Apr. 26, 1999 | XR | | | | | | | | | | | |
| 64 | HE6FU11 | 203979 | Uni-ZAP | 74 | 2000 | 1 | 1994 | 145 | 145 | 337 | 1 | 26 | 27 | 226 |
| | | Apr. 29, 1999 | XR | | | | | | | | | | | |
| 65 | HE6FV29 | 203960 | Uni-ZAP | 75 | 1526 | 1 | 1526 | 210 | 210 | 338 | 1 | 18 | 19 | 33 |
| | | Apr. 26, 1999 | XR | | | | | | | | | | | |
| 66 | HE8BQ49 | 203960 | Uni-ZAP | 76 | 1875 | 12 | 1875 | 133 | 133 | 339 | 1 | | | 11 |
| | | Apr. 26, 1999 | XR | | | | | | | | | | | |
| 67 | HE8SG96 | PTA-181 | Uni-ZAP | 77 | 2036 | 1 | 2036 | 118 | 118 | 340 | 1 | 17 | 18 | 24 |
| | | Jun. 07, 1999 | XR | | | | | | | | | | | |
| 68 | HE9EA10 | 203960 | Uni-ZAP | 78 | 2114 | 1 | 2111 | | 212 | 341 | 1 | 28 | 29 | 78 |
| | | Apr. 26, 1999 | XR | | | | | | | | | | | |
| 69 | HE9GG20 | 203960 | Uni-ZAP | 79 | 676 | 1 | 676 | 319 | 319 | 342 | 1 | | | 9 |
| | | Apr. 26, 1999 | XR | | | | | | | | | | | |
| 70 | HEAAW94 | 203979 | Uni-ZAP | 80 | 924 | 1 | 924 | 189 | 189 | 343 | 1 | | | 11 |
| | | Apr. 29, 1999 | XR | | | | | | | | | | | |
| 71 | HEBCI18 | 203960 | Uni-ZAP | 81 | 1121 | 713 | 1050 | 855 | 855 | 344 | 1 | 43 | 44 | 69 |
| | | Apr. 26, 1999 | XR | | | | | | | | | | | |
| 72 | HEBCY54 | 203960 | Uni-ZAP | 82 | 1189 | 1 | 1189 | 172 | 172 | 345 | 1 | 24 | 25 | 118 |
| | | Apr. 26, 1999 | XR | | | | | | | | | | | |
| 73 | HEBDQ91 | 203960 | Uni-ZAP | 83 | 1573 | 1007 | 1573 | | 1211 | 346 | 1 | 29 | 30 | 41 |
| | | Apr. 26, 1999 | XR | | | | | | | | | | | |
| 74 | HEBFR46 | 203979 | Uni-ZAP | 84 | 1304 | 1 | 1304 | 200 | 200 | 347 | 1 | 26 | 27 | 29 |
| | | Apr. 29, 1999 | XR | | | | | | | | | | | |
| 75 | HEBGE07 | 203960 | Uni-ZAP | 85 | 1867 | 1 | 1867 | 106 | 106 | 348 | 1 | 25 | 26 | 42 |
| | | Apr. 26, 1999 | XR | | | | | | | | | | | |
| 76 | HEBGE23 | 203960 | Uni-ZAP | 86 | 419 | 1 | 419 | 153 | 153 | 349 | 1 | 31 | 32 | 81 |
| | | Apr. 26, 1999 | XR | | | | | | | | | | | |
| 77 | HEGAU15 | 203960 | Uni-ZAP | 87 | 1125 | 1 | 1125 | 59 | 59 | 350 | 1 | 30 | 31 | 34 |
| | | Apr. 26, 1999 | XR | | | | | | | | | | | |
| 78 | HFCEI04 | 203960 | Uni-ZAP | 88 | 887 | 1 | 887 | | 136 | 351 | 1 | 17 | 18 | 42 |
| | | Apr. 26, 1999 | XR | | | | | | | | | | | |
| 79 | HFEAY59 | 203960 | Uni-ZAP | 89 | 1153 | 1 | 1153 | 154 | 154 | 352 | 1 | 24 | 25 | 40 |
| | | Apr. 26, 1999 | XR | | | | | | | | | | | |
| 80 | HFEBO17 | PTA-181 | Uni-ZAP | 90 | 990 | 1 | 990 | 136 | 136 | 353 | 1 | 17 | 18 | 27 |
| | | Jun. 7, 1999 | XR | | | | | | | | | | | |
| 81 | HFIJA68 | 203979 | pSport1 | 91 | 1157 | 1 | 1157 | 283 | 283 | 354 | 1 | 22 | 23 | 43 |
| | | Apr. 29, 1999 | | | | | | | | | | | | |
| 82 | HFKES05 | 203960 | Uni-ZAP | 92 | 1885 | 1 | 1885 | 243 | 243 | 355 | 1 | 17 | 18 | 42 |
| | | Apr. 26, 1999 | XR | | | | | | | | | | | |
| 83 | HFKFX64 | 203960 | Uni-ZAP | 93 | 779 | 1 | 779 | 127 | 127 | 356 | 1 | | | 14 |
| | | Apr. 26, 1999 | XR | | | | | | | | | | | |
| 84 | HFPCZ55 | 203960 | Uni-ZAP | 94 | 2735 | 341 | 2735 | 676 | 676 | 357 | 1 | 24 | 25 | 44 |
| | | Apr. 26, 1999 | XR | | | | | | | | | | | |
| 85 | HFTAS49 | 203979 | Uni-ZAP | 95 | 518 | 1 | 518 | 249 | 249 | 358 | 1 | 19 | 20 | 23 |
| | | Apr. 29, 1999 | XR | | | | | | | | | | | |
| 86 | HFVHW43 | 203960 | pBluescript | 96 | 1233 | 1 | 1233 | 92 | 92 | 359 | 1 | 30 | 31 | 39 |
| | | Apr. 26, 1999 | | | | | | | | | | | | |
| 87 | HGBER72 | 203960 | Uni-ZAP | 97 | 1316 | 1 | 1316 | 43 | 43 | 360 | 1 | 16 | 17 | 19 |
| | | Apr. 26, 1999 | XR | | | | | | | | | | | |
| 88 | HGBHP91 | 203960 | Uni-ZAP | 98 | 1054 | 1 | 1054 | | 50 | 361 | 1 | 14 | 15 | 52 |
| | | Apr. 26, 1999 | XR | | | | | | | | | | | |
| 89 | HGLBG15 | 203960 | Uni-ZAP | 99 | 778 | 1 | 778 | | 191 | 362 | 1 | | | 26 |
| | | Apr. 26, 1999 | XR | | | | | | | | | | | |
| 90 | HHEAK45 | 203960 | pCMVSport | 100 | 2014 | 87 | 1935 | | 813 | 363 | 1 | | | 3 |
| | | Apr. 26, 1999 | 3.0 | | | | | | | | | | | |
| 91 | HHEOW19 | PTA-793 | pCMVSport | 101 | 1589 | 1 | 1589 | 183 | 183 | 364 | 1 | 18 | 19 | 64 |
| | | Sep. 27, 1999 | 3.0 | | | | | | | | | | | |
| 92 | HHFEB79 | PTA-181 | Uni-ZAP | 102 | 3168 | 1 | 3168 | 120 | 120 | 365 | 1 | 18 | 19 | 756 |
| | | Jun. 7, 1999 | XR | | | | | | | | | | | |
| 92 | HHFEB79 | PTA-181 | Uni-ZAP | 256 | 2443 | 1 | 2443 | 715 | 715 | 519 | 1 | 18 | 19 | 571 |
| | | Jun. 7, 1999 | XR | | | | | | | | | | | |
| 93 | HHFEC39 | 203960 | Uni-ZAP | 103 | 1302 | 1 | 1302 | | 1211 | 366 | 1 | | | 1 |
| | | Apr. 26, 1999 | XR | | | | | | | | | | | |
| 94 | HHFFS40 | 203960 | Uni-ZAP | 104 | 1816 | 1 | 1816 | 37 | 37 | 367 | 1 | 18 | 19 | 47 |
| | | Apr. 26, 1999 | XR | | | | | | | | | | | |
| 95 | HHGCS78 | 203960 | Lambda | 105 | 575 | 46 | 575 | 290 | 290 | 368 | 1 | 17 | 18 | 24 |
| | | Apr. 26, 1999 | ZAP II | | | | | | | | | | | |
| 96 | HHPFP26 | 203960 | Uni-ZAP | 106 | 2352 | 1 | 2352 | | 24 | 369 | 1 | 27 | 28 | 80 |
| | | Apr. 26, 1999 | XR | | | | | | | | | | | |
| 97 | HHPFU28 | 203960 | Uni-ZAP | 107 | 1838 | 1 | 1838 | | 156 | 370 | 1 | 18 | 19 | 27 |
| | | Apr. 26, 1999 | XR | | | | | | | | | | | |
| 98 | HHSBI06 | 203959 | Uni-ZAP | 108 | 1049 | 27 | 803 | | 690 | 371 | 1 | | | 5 |
| | | Apr. 26, 1999 | XR | | | | | | | | | | | |
| 99 | HHSBI65 | 203917 | Uni-ZAP | 109 | 1444 | 1 | 1431 | 62 | 62 | 372 | 1 | 17 | 18 | 55 |
| | | Apr. 8, 1999 | XR | | | | | | | | | | | |
| 100 | HISAT67 | 203959 | pSport1 | 110 | 2154 | 1061 | 2142 | 1239 | 1239 | 373 | 1 | 35 | 36 | 56 |
| | | Apr. 26, 1999 | | | | | | | | | | | | |
| 101 | HISBA38 | 203957 | pSport1 | 111 | 1058 | 1 | 1058 | 169 | 169 | 374 | 1 | 32 | 33 | 36 |
| | | Apr. 26, 1999 | | | | | | | | | | | | |
| 102 | HJBCU75 | 203957 | pBluescript | 112 | 1009 | 1 | 1009 | 61 | 61 | 375 | 1 | | | 5 |
| | | Apr. 26, 1999 | SK− | | | | | | | | | | | |
| 103 | HJMAA03 | 203957 | pCMVSport | 113 | 665 | 1 | 665 | | 527 | 376 | 1 | | | 9 |
| | | Apr. 26, 1999 | 3.0 | | | | | | | | | | | |
| 104 | HJPCH08 | 203959 | Uni-ZAP | 114 | 879 | 1 | 879 | | 374 | 377 | 1 | 10 | 11 | 117 |
| | | Apr. 26, 1999 | XR | | | | | | | | | | | |
| 105 | HKABU43 | 203959 | pCMVSport | 115 | 1919 | 581 | 1919 | 755 | 755 | 378 | 1 | 20 | 21 | 281 |
| | | Apr. 26, 1999 | 2.0 | | | | | | | | | | | |
| 106 | HKIXC44 | 203957 | pBluescript | 116 | 788 | 343 | 750 | 572 | 572 | 379 | 1 | 26 | 27 | 36 |
| | | Apr. 26, 1999 | | | | | | | | | | | | |
| 107 | HKTAB41 | 203957 | Uni-ZAP | 117 | 797 | 1 | 797 | 172 | 172 | 380 | 1 | | | 10 |
| | | Apr. 26, 1999 | XR | | | | | | | | | | | |
| 108 | HLDBG17 | PTA-181 | pCMVSport | 118 | 652 | 1 | 652 | 184 | 184 | 381 | 1 | 23 | 24 | 41 |
| | | Jun. 7, 1999 | 3.0 | | | | | | | | | | | |
| 109 | HLDQU79 | 203959 | pCMVSport | 119 | 1488 | 1 | 1488 | 99 | 99 | 382 | 1 | 23 | 24 | 348 |
| | | Apr. 26, 1999 | 3.0 | | | | | | | | | | | |
| 109 | HLDQU79 | 203959 | pCMVSport | 257 | 3179 | 163 | 1474 | 75 | 75 | 520 | 1 | 29 | 30 | 348 |
| | | Apr. 26, 1999 | 3.0 | | | | | | | | | | | |
| 110 | HLHAP05 | 203957 | Uni-ZAP | 120 | 1842 | 12 | 1842 | 45 | 45 | 383 | 1 | | | 14 |
| | | Apr. 26, 1999 | XR | | | | | | | | | | | |
| 111 | HLHBS54 | 203957 | Uni-ZAP | 121 | 4038 | 2309 | 4023 | 73 | 73 | 384 | 1 | 1 | 2 | 343 |
| | | Apr. 26, 1999 | XR | | | | | | | | | | | |
| 112 | HLHCS23 | 203957 | Uni-ZAP | 122 | 1427 | 1 | 1427 | 25 | 25 | 385 | 1 | 24 | 25 | 34 |
| | | Apr. 26, 1999 | XR | | | | | | | | | | | |
| 113 | HLICE88 | 203957 | pCMVSport1 | 123 | 840 | 401 | 824 | | 708 | 386 | 1 | | | 2 |
| | | Apr. 26, 1999 | | | | | | | | | | | | |
| 114 | HLQAS12 | PTA-793 | Lambda | 124 | 2450 | 1 | 2450 | 305 | 305 | 387 | 1 | 11 | 12 | 12 |
| | | Sep. 27, 1999 | ZAP II | | | | | | | | | | | |
| 115 | HLYAR30 | 203957 | pSport1 | 125 | 854 | 1 | 854 | 562 | 562 | 388 | 1 | 1 | 2 | 97 |
| | | Apr. 26, 1999 | | | | | | | | | | | | |
| 116 | HLYDF73 | 203957 | pSport1 | 126 | 626 | 1 | 626 | | 363 | 389 | 1 | 11 | 12 | 23 |
| | | Apr. 26, 1999 | | | | | | | | | | | | |
| 117 | HLYDO73 | 203957 | pSport1 | 127 | 858 | 1 | 858 | 233 | 233 | 390 | 1 | | | 12 |
| | | Apr. 26, 1999 | | | | | | | | | | | | |
| 118 | HLYGY91 | 203957 | pSport1 | 128 | 640 | 1 | 640 | 211 | 211 | 391 | 1 | 20 | 21 | 42 |
| | | Apr. 26, 1999 | | | | | | | | | | | | |
| 119 | HMDAB29 | 203957 | Uni-ZAP | 129 | 1190 | 1 | 1190 | 97 | 97 | 392 | 1 | 17 | 18 | 26 |
| | | Apr. 26, 1999 | XR | | | | | | | | | | | |
| 120 | HMDAD44 | 203957 | Uni-ZAP | 130 | 1204 | 1 | 1204 | 135 | 135 | 393 | 1 | | | 8 |
| | | Apr. 26, 1999 | XR | | | | | | | | | | | |
| 121 | HMEDE24 | 203957 | Lambda | 131 | 2836 | 884 | 2806 | 900 | 900 | 394 | 1 | 16 | 17 | 33 |
| | | Apr. 26, 1999 | ZAP II | | | | | | | | | | | |
| 122 | HMEDI90 | 203957 | Lambda | 132 | 2276 | 362 | 2219 | | 622 | 395 | 1 | 12 | 13 | 17 |
| | | Apr. 26, 1999 | ZAP II | | | | | | | | | | | |
| 123 | HMIBD93 | 203957 | Uni-ZAP | 133 | 1323 | 734 | 1323 | | 983 | 396 | 1 | 27 | 28 | 65 |
| | | Apr. 26, 1999 | XR | | | | | | | | | | | |
| 124 | HMIBF07 | 203957 | Uni-ZAP | 134 | 1738 | 1 | 1738 | 229 | 229 | 397 | 1 | | | 6 |
| | | Apr. 26, 1999 | XR | | | | | | | | | | | |
| 125 | HMJAK70 | 203957 | pSport1 | 135 | 799 | 1 | 799 | 273 | 273 | 398 | 1 | | | 10 |
| | | Apr. 26, 1999 | | | | | | | | | | | | |
| 126 | HMQAI38 | 203957 | Uni-ZAP | 136 | 1777 | 1 | 1777 | 24 | 24 | 399 | 1 | | | 20 |
| | | Apr. 26, 1999 | XR | | | | | | | | | | | |
| 127 | HMSHY25 | PTA-793 | Uni-ZAP | 137 | 2205 | 1 | 2205 | | 656 | 400 | 1 | 11 | 12 | 35 |
| | | Sep. 27, 1999 | XR | | | | | | | | | | | |
| 128 | HMUAN45 | 203918 | pCMVSport | 138 | 2709 | 1 | 2709 | 239 | 239 | 401 | 1 | 25 | 26 | 227 |
| | | Apr. 8, 1999 | 3.0 | | | | | | | | | | | |
| 129 | HMVBC31 | 203957 | pSport1 | 139 | 2556 | 1327 | 2546 | 1437 | 1437 | 402 | 1 | 32 | 33 | 40 |
| | | Apr. 26, 1999 | | | | | | | | | | | | |
| 130 | HMWBL03 | 203957 | Uni-ZAP | 140 | 2596 | 80 | 2596 | 137 | 137 | 403 | 1 | 1 | 2 | 397 |
| | | Apr. 26, 1999 | XR | | | | | | | | | | | |
| 131 | HMWCG28 | 203979 | Uni-ZAP | 141 | 893 | 1 | 893 | 78 | 78 | 404 | 1 | 30 | 31 | 40 |
| | | Apr. 29, 1999 | XR | | | | | | | | | | | |
| 132 | HNECW49 | 203957 | Uni-ZAP | 142 | 489 | 1 | 463 | 316 | 316 | 405 | 1 | 20 | 21 | 58 |
| | | Apr. 26, 1999 | XR | | | | | | | | | | | |
| 133 | HNFCY57 | PTA-791 | Uni-ZAP | 143 | 2847 | 1 | 2847 | 317 | 317 | 406 | 1 | 10 | 11 | 629 |
| | | Sep. 27, 1999 | XR | | | | | | | | | | | |
| 134 | HNFGR08 | 203957 | Uni-ZAP | 144 | 1436 | 1 | 1436 | | 314 | 407 | 1 | 17 | 18 | 43 |
| | | Apr. 26, 1999 | XR | | | | | | | | | | | |
| 135 | HNGAK51 | 203957 | Uni-ZAP | 145 | 915 | 1 | 915 | 248 | 248 | 408 | 1 | 23 | 24 | 32 |
| | | Apr. 26, 1999 | XR | | | | | | | | | | | |
| 136 | HNGDX18 | PTA-181 | Uni-ZAP | 146 | 1425 | 1 | 1425 | 237 | 237 | 409 | 1 | 30 | 31 | 243 |
| | | Jun. 7, 1999 | XR | | | | | | | | | | | |
| 136 | HNGDX18 | PTA-181 | Uni-ZAP | 258 | 1411 | 1 | 1411 | 231 | 231 | 521 | 1 | 18 | 19 | 132 |
| | | Jun. 7, 1999 | XR | | | | | | | | | | | |
| 137 | HNGFR54 | 203957 | Uni-ZAP | 147 | 495 | 1 | 495 | | 73 | 410 | 1 | 36 | 37 | 52 |
| | | Apr. 26, 1999 | XR | | | | | | | | | | | |
| 138 | HNGGA68 | 203957 | Uni-ZAP | 148 | 585 | 1 | 585 | 184 | 184 | 411 | 1 | | | 32 |
| | | Apr. 26, 1999 | XR | | | | | | | | | | | |
| 139 | HNGHK37 | 203957 | Uni-ZAP | 149 | 1543 | 1 | 1543 | 234 | 234 | 412 | 1 | | | 12 |
| | | Apr. 26, 1999 | XR | | | | | | | | | | | |
| 140 | HNGIV64 | 203957 | Uni-ZAP | 150 | 1047 | 1 | 1047 | | 221 | 413 | 1 | | | 8 |
| | | Apr. 26, 1999 | XR | | | | | | | | | | | |
| 141 | HNGJB41 | PTA-181 | Uni-ZAP | 151 | 1246 | 1 | 1246 | 252 | 252 | 414 | 1 | 46 | 47 | 73 |
| | | Jun. 07, 1999 | XR | | | | | | | | | | | |
| 142 | HNGKT41 | 203959 | Uni-ZAP | 152 | 1048 | 1 | 1048 | 415 | 415 | 415 | 1 | 17 | 18 | 45 |
| | | Apr. 26, 1999 | XR | | | | | | | | | | | |
| 143 | HNGMW45 | 203959 | Uni-ZAP | 153 | 1530 | 1 | 1530 | 452 | 452 | 416 | 1 | 26 | 27 | 43 |
| | | Apr. 26, 1999 | XR | | | | | | | | | | | |
| 144 | HNGNO53 | 203959 | Uni-ZAP | 154 | 825 | 1 | 825 | 467 | 467 | 417 | 1 | 15 | 16 | 34 |
| | | Apr. 26, 1999 | XR | | | | | | | | | | | |
| 145 | HNGPJ25 | 203959 | Uni-ZAP | 155 | 853 | 129 | 853 | 544 | 544 | 418 | 1 | 20 | 21 | 25 |
| | | Apr. 26, 1999 | XR | | | | | | | | | | | |
| 146 | HNHCT47 | 203959 | Uni-ZAP | 156 | 621 | 12 | 621 | 73 | 73 | 419 | 1 | 20 | 21 | 39 |
| | | Apr. 26, 1999 | XR | | | | | | | | | | | |
| 147 | HNHKI74 | 203959 | Uni-ZAP | 157 | 817 | 1 | 817 | 127 | 127 | 420 | 1 | | | 10 |
| | | Apr. 26, 1999 | XR | | | | | | | | | | | |
| 148 | HNHKV56 | 203959 | Uni-ZAP | 158 | 1653 | 1 | 1653 | 294 | 294 | 421 | 1 | 31 | 32 | 66 |
| | | Apr. 26, 1999 | XR | | | | | | | | | | | |
| 149 | HOACG07 | 203959 | Uni-ZAP | 159 | 1298 | 772 | 1249 | 778 | 778 | 422 | 1 | 21 | 22 | 123 |
| | | Apr. 26, 1999 | XR | | | | | | | | | | | |
| 150 | HODBB70 | 203918 | Uni-ZAP | 160 | 604 | 1 | 604 | | 173 | 423 | 1 | 7 | 8 | 27 |
| | | Apr. 08, 1999 | XR | | | | | | | | | | | |
| 151 | HOEBK60 | 203959 | Uni-ZAP | 161 | 2218 | 1449 | 2216 | 1714 | 1714 | 424 | 1 | 39 | 40 | 43 |
| | | Apr. 26, 1999 | XR | | | | | | | | | | | |
| 152 | HOFMO16 | 203918 | pCMVSport | 162 | 1142 | 1 | 1142 | 149 | 149 | 425 | 1 | 40 | 41 | 152 |
| | | Apr. 08, 1999 | 2.0 | | | | | | | | | | | |
| 153 | HOFNB74 | 203959 | pCMVSport | 163 | 1036 | 1 | 1036 | 138 | 138 | 426 | 1 | 24 | 25 | 39 |
| | | Apr. 26, 1999 | 2.0 | | | | | | | | | | | |
| 154 | HOHBO66 | PTA-181 | pCMVSport | 164 | 1790 | 1 | 1790 | 338 | 338 | 427 | 1 | | | 21 |
| | | Jun. 07, 1999 | 2.0 | | | | | | | | | | | |
| 155 | HORBS82 | 203959 | Uni-ZAP | 165 | 1125 | 1 | 1125 | | 21 | 428 | 1 | 19 | 20 | 39 |
| | | Apr. 26, 1999 | XR | | | | | | | | | | | |
| 156 | HORBV76 | 203959 | Uni-ZAP | 166 | 1157 | 1 | 1157 | 183 | 183 | 429 | 1 | 25 | 26 | 198 |
| | | Apr. 26, 1999 | XR | | | | | | | | | | | |
| 157 | HOSDO75 | PTA-181 | Uni-ZAP | 167 | 902 | 1 | 902 | 88 | 88 | 430 | 1 | | | 28 |
| | | Jun. 07, 1999 | XR | | | | | | | | | | | |
| 158 | HOSEI81 | 203918 | Uni-ZAP | 168 | 897 | 1 | 897 | 203 | 203 | 431 | 1 | 22 | 23 | 83 |
| | | Apr. 08, 1999 | XR | | | | | | | | | | | |
| 159 | HOUDE92 | 203918 | Uni-ZAP | 169 | 1284 | 1 | 1282 | | 70 | 432 | 1 | 6 | 7 | 88 |
| | | Apr. 08, 1999 | XR | | | | | | | | | | | |
| 160 | HPCAL26 | 203917 | Uni-ZAP | 170 | 3097 | 803 | 3097 | 1021 | 1021 | 433 | 1 | 23 | 24 | 30 |
| | | Apr. 08, 1999 | XR | | | | | | | | | | | |
| 161 | HPEAD23 | 203959 | Uni-ZAP | 171 | 582 | 1 | 582 | 188 | 188 | 434 | 1 | 13 | 14 | 93 |
| | | Apr. 26, 1999 | XR | | | | | | | | | | | |
| 162 | HPEBA84 | 203959 | Uni-ZAP | 172 | 1160 | 250 | 1160 | 533 | 533 | 435 | 1 | 21 | 22 | 36 |
| | | Apr. 26, 1999 | XR | | | | | | | | | | | |
| 163 | HPFCI36 | PTA-181 | Uni-ZAP | 173 | 879 | 1 | 879 | 94 | 94 | 436 | 1 | 17 | 18 | 19 |
| | | Jun. 07, 1999 | XR | | | | | | | | | | | |
| 164 | HPFDI37 | PTA-181 | Uni-ZAP | 174 | 352 | 1 | 352 | 38 | 38 | 437 | 1 | | | 17 |
| | | Jun. 07, 1999 | XR | | | | | | | | | | | |
| 165 | HPIAA80 | 203959 | Uni-ZAP | 175 | 919 | 312 | 919 | | 314 | 438 | 1 | 13 | 14 | 37 |
| | | Apr. 26, 1999 | XR | | | | | | | | | | | |
| 166 | HPJCW58 | 203918 | Uni-ZAP | 176 | 1165 | 1 | 1165 | 177 | 177 | 439 | 1 | 19 | 20 | 28 |
| | | Apr. 08, 1999 | XR | | | | | | | | | | | |
| 167 | HPMCV30 | 203918 | Uni-ZAP | 177 | 908 | 1 | 908 | 52 | 52 | 440 | 1 | 27 | 28 | 47 |
| | | Apr. 08, 1999 | XR | | | | | | | | | | | |
| 168 | HPRBH85 | 203959 | Uni-ZAP | 178 | 1673 | 558 | 1648 | 684 | 684 | 441 | 1 | 18 | 19 | 134 |
| | | Apr. 26, 1999 | XR | | | | | | | | | | | |
| 169 | HPRCD35 | PTA-181 | Uni-ZAP | 179 | 709 | 1 | 689 | | 265 | 442 | 1 | 16 | 17 | 35 |
| | | Jun. 07, 1999 | XR | | | | | | | | | | | |
| 170 | HPRCM72 | 203959 | Uni-ZAP | 180 | 2455 | 26 | 1572 | | 281 | 443 | 1 | 24 | 25 | 108 |
| | | Apr. 26, 1999 | XR | | | | | | | | | | | |
| 171 | HPTRE80 | PTA-792 | pBluescript | 181 | 1173 | 1 | 1173 | | 102 | 444 | 1 | 21 | 22 | 187 |
| | | Sep. 27, 1999 | | | | | | | | | | | | |
| 172 | HPTRI42 | 203959 | pBluescript | 182 | 1098 | 1 | 1098 | | 266 | 445 | 1 | 18 | 19 | 71 |
| | | Apr. 26, 1999 | | | | | | | | | | | | |
| 173 | HPTRM02 | 203959 | pBluescript | 183 | 1760 | 658 | 1680 | 885 | 885 | 446 | 1 | 16 | 17 | 80 |
| | | Apr. 26, 1999 | | | | | | | | | | | | |
| 174 | HPTRQ52 | 203959 | pBluescript | 184 | 658 | 1 | 658 | 224 | 224 | 447 | 1 | 13 | 14 | 33 |
| | | Apr. 26, 1999 | | | | | | | | | | | | |
| 175 | HPTVI96 | 203959 | pBluescript | 185 | 520 | 1 | 520 | 271 | 271 | 448 | 1 | | | 6 |
| | | Apr. 26, 1999 | | | | | | | | | | | | |
| 176 | HPWBA29 | 203918 | Uni-ZAP | 186 | 325 | 1 | 325 | 194 | 194 | 449 | 1 | | | 13 |
| | | Apr. 08, 1999 | XR | | | | | | | | | | | |
| 177 | HRDAI17 | 203918 | Uni-ZAP | 187 | 1500 | 547 | 1500 | 578 | 578 | 450 | 1 | 27 | 28 | 31 |
| | | Apr. 08, 1999 | XR | | | | | | | | | | | |
| 178 | HRDDQ39 | 203959 | Uni-ZAP | 188 | 776 | 1 | 773 | | 215 | 451 | 1 | 17 | 18 | 46 |
| | | Apr. 26, 1999 | XR | | | | | | | | | | | |
| 179 | HRDEX93 | 203959 | Uni-ZAP | 189 | 1681 | 711 | 1638 | 649 | 649 | 452 | 1 | 20 | 21 | 72 |
| | | Apr. 26, 1999 | XR | | | | | | | | | | | |
| 180 | HRTAP63 | 203979 | pBluescript | 190 | 2576 | 891 | 2576 | 959 | 959 | 453 | 1 | 28 | 29 | 42 |
| | | Apr. 29, 1999 | SK− | | | | | | | | | | | |
| 181 | HSAVW42 | 203959 | Uni-ZAP | 191 | 595 | 1 | 595 | 129 | 129 | 454 | 1 | 16 | 17 | 22 |
| | | Apr. 26, 1999 | XR | | | | | | | | | | | |
| 182 | HSAWN53 | 203959 | Uni-ZAP | 192 | 349 | 1 | 349 | | 159 | 455 | 1 | 29 | 30 | 63 |
| | | Apr. 26, 1999 | XR | | | | | | | | | | | |
| 183 | HSAWZ40 | 203959 | Uni-ZAP | 193 | 1019 | 1 | 1019 | 124 | 124 | 456 | 1 | | | 37 |
| | | Apr. 26, 1999 | XR | | | | | | | | | | | |
| 184 | HSAYC41 | 203959 | Uni-ZAP | 194 | 214 | 1 | 214 | 106 | 106 | 457 | 1 | 16 | 17 | 36 |
| | | Apr. 26, 1999 | XR | | | | | | | | | | | |
| 185 | HSDBI90 | PTA-181 | Uni-ZAP | 195 | 1057 | 1 | 1057 | 218 | 218 | 458 | 1 | | | 14 |
| | | Jun. 07, 1999 | XR | | | | | | | | | | | |
| 186 | HSHAX04 | 203959 | Uni-ZAP | 196 | 1287 | 494 | 1285 | | 42 | 459 | 1 | 6 | 7 | 57 |
| | | Apr. 26, 1999 | XR | | | | | | | | | | | |
| 187 | HSKDR27 | 203918 | Uni-ZAP | 197 | 762 | 1 | 762 | | 473 | 460 | 1 | 11 | 12 | 27 |
| | | Apr. 08, 1999 | XR | | | | | | | | | | | |
| 188 | HSNBM34 | 203959 | Uni-ZAP | 198 | 2186 | 1391 | 1765 | | 1508 | 461 | 1 | 14 | 15 | 62 |
| | | Apr. 26, 1999 | XR | | | | | | | | | | | |
| 189 | HSRFD18 | 203959 | Uni-ZAP | 199 | 1889 | 1 | 1793 | 67 | 67 | 462 | 1 | 20 | 21 | 28 |
| | | Apr. 26, 1999 | XR | | | | | | | | | | | |
| 190 | HSSEF77 | 203959 | Uni-ZAP | 200 | 1053 | 1 | 1053 | | 184 | 463 | 1 | 25 | 26 | 60 |
| | | Apr. 26, 1999 | XR | | | | | | | | | | | |
| 191 | HSSGJ58 | 203918 | Uni-ZAP | 201 | 1954 | 1 | 1954 | 245 | 245 | 464 | 1 | 17 | 18 | 38 |
| | | Apr. 08, 1999 | XR | | | | | | | | | | | |
| 192 | HSVBD37 | 203959 | Uni-ZAP | 202 | 464 | 1 | 464 | 146 | 146 | 465 | 1 | | | 6 |
| | | Apr. 26, 1999 | XR | | | | | | | | | | | |
| 193 | HSYBI06 | 203918 | pCMVSport | 203 | 956 | 1 | 956 | 232 | 232 | 466 | 1 | 21 | 22 | 33 |
| | | Apr. 08, 1999 | 3.0 | | | | | | | | | | | |
| 194 | HT4FV41 | PTA-181 | Uni-ZAP | 204 | 1764 | 1 | 1764 | | 39 | 467 | 1 | 16 | 17 | 137 |
| | | Jun. 07, 1999 | XR | | | | | | | | | | | |
| 195 | HT5GR59 | 203959 | Uni-ZAP | 205 | 1743 | 1 | 1743 | 135 | 135 | 468 | 1 | 23 | 24 | 31 |
| | | Apr. 26, 1999 | XR | | | | | | | | | | | |
| 196 | HTDAA78 | 203918 | pSport1 | 206 | 825 | 1 | 825 | 151 | 151 | 469 | 1 | | | 20 |
| | | Apr. 08, 1999 | | | | | | | | | | | | |
| 197 | HTEAG62 | 203959 | Uni-ZAP | 207 | 2221 | 57 | 2221 | 1017 | 1017 | 470 | 1 | 20 | 21 | 22 |
| | | Apr. 26, 1999 | XR | | | | | | | | | | | |
| 198 | HTECB02 | 203959 | Uni-ZAP | 208 | 1662 | 106 | 1662 | 196 | 196 | 471 | 1 | 22 | 23 | 56 |
| | | Apr. 26, 1999 | XR | | | | | | | | | | | |
| 199 | HTEDJ28 | 203959 | Uni-ZAP | 209 | 1247 | 1 | 1247 | | 287 | 472 | 1 | 18 | 19 | 45 |
| | | Apr. 26, 1999 | XR | | | | | | | | | | | |
| 200 | HTEHU59 | 203959 | Uni-ZAP | 210 | 1523 | 1 | 1504 | 170 | 170 | 473 | 1 | 19 | 20 | 34 |
| | | Apr. 26, 1999 | XR | | | | | | | | | | | |
| 201 | HTEJD29 | 203959 | Uni-ZAP | 211 | 1324 | 1 | 1324 | 101 | 101 | 474 | 1 | | | 23 |
| | | Apr. 26, 1999 | XR | | | | | | | | | | | |
| 202 | HTEKM46 | PTA-181 | Uni-ZAP | 212 | 2116 | 1 | 2116 | 171 | 171 | 475 | 1 | 24 | 25 | 38 |
| | | Jun. 07, 1999 | XR | | | | | | | | | | | |
| 203 | HTENR63 | PTA-792 | Uni-ZAP | 213 | 1591 | 1 | 1591 | 132 | 132 | 476 | 1 | 20 | 21 | 56 |
| | | Sep. 27, 1999 | XR | | | | | | | | | | | |
| 204 | HTGBK95 | 203959 | Uni-ZAP | 214 | 1131 | 1 | 1131 | 271 | 271 | 477 | 1 | 12 | 13 | 16 |
| | | Apr. 26, 1999 | XR | | | | | | | | | | | |
| 205 | HTGGM44 | 203959 | Uni-ZAP | 215 | 3016 | 1 | 2761 | 179 | 179 | 478 | 1 | 18 | 19 | 84 |
| | | Apr. 26, 1999 | XR | | | | | | | | | | | |
| 206 | HTHBZ06 | 203959 | Uni-ZAP | 216 | 623 | 193 | 619 | 318 | 318 | 479 | 1 | | | 1 |
| | | Apr. 26, 1999 | XR | | | | | | | | | | | |
| 207 | HTLBT80 | 203959 | Uni-ZAP | 217 | 2101 | 817 | 1881 | 912 | 912 | 480 | 1 | 27 | 28 | 129 |
| | | Apr. 26, 1999 | XR | | | | | | | | | | | |
| 208 | HTLCX82 | 203979 | Uni-ZAP | 218 | 920 | 1 | 920 | | 46 | 481 | 1 | 15 | 16 | 75 |
| | | Apr. 29, 1999 | XR | | | | | | | | | | | |
| 209 | HTLDU78 | 203918 | Uni-ZAP | 219 | 1318 | 1 | 1318 | 219 | 219 | 482 | 1 | | | 8 |
| | | Apr. 08, 1999 | XR | | | | | | | | | | | |
| 210 | HTLEV48 | 203918 | Uni-ZAP | 220 | 1070 | 1 | 1070 | 205 | 205 | 483 | 1 | 30 | 31 | 207 |
| | | Apr. 08, 1999 | XR | | | | | | | | | | | |
| 210 | HTLEV48 | 203918 | Uni-ZAP | 259 | 1065 | 1 | 1065 | 91 | 91 | 522 | 1 | | | 9 |
| | | Apr. 08, 1999 | XR | | | | | | | | | | | |
| 211 | HTLFA13 | 203918 | Uni-ZAP | 221 | 1160 | 1 | 1160 | | 209 | 484 | 1 | 8 | 9 | 31 |
| | | Apr. 08, 1999 | XR | | | | | | | | | | | |
| 212 | HTLGI89 | 203959 | Uni-ZAP | 222 | 2377 | 1205 | 2377 | 1802 | 1802 | 485 | 1 | 16 | 17 | 37 |
| | | Apr. 26, 1999 | XR | | | | | | | | | | | |
| 213 | HTNBK13 | 203959 | pBluescript | 223 | 1160 | 295 | 1148 | 534 | 534 | 486 | 1 | 16 | 17 | 21 |
| | | Apr. 26, 1999 | SK− | | | | | | | | | | | |
| 214 | HTOAM11 | 203918 | Uni-ZAP | 224 | 1200 | 1 | 1200 | 89 | 89 | 487 | 1 | 24 | 25 | 34 |
| | | Apr. 08, 1999 | XR | | | | | | | | | | | |
| 215 | HTODH83 | 203918 | Uni-ZAP | 225 | 1981 | 1 | 1981 | 103 | 103 | 488 | 1 | 21 | 22 | 32 |
| | | Apr. 08, 1999 | XR | | | | | | | | | | | |
| 216 | HTODN35 | 203918 | Uni-ZAP | 226 | 1594 | 1 | 1594 | 67 | 67 | 489 | 1 | | | 14 |
| | | Apr. 08, 1999 | XR | | | | | | | | | | | |
| 217 | HTPCO75 | PTA-181 | Uni-ZAP | 227 | 1467 | 1 | 1467 | | 73 | 490 | 1 | 23 | 24 | 40 |
| | | Jun. 07, 1999 | XR | | | | | | | | | | | |
| 218 | HTTCB60 | PTA-181 | Uni-ZAP | 228 | 1504 | 1 | 1504 | 84 | 84 | 491 | 1 | 17 | 18 | 266 |
| | | Jun. 07, 1999 | XR | | | | | | | | | | | |
| 219 | HTTDN24 | 203959 | Uni-ZAP | 229 | 1992 | 856 | 1992 | | 1024 | 492 | 1 | 13 | 14 | 234 |
| | | Apr. 26, 1999 | XR | | | | | | | | | | | |
| 220 | HTTEE41 | 203959 | Uni-ZAP | 230 | 1973 | 864 | 1968 | | 1171 | 493 | 1 | | | 8 |
| | | Apr. 26, 1999 | XR | | | | | | | | | | | |
| 221 | HTWEH94 | 203918 | pSport1 | 231 | 1361 | 1 | 1361 | 66 | 66 | 494 | 1 | 43 | 44 | 81 |
| | | Apr. 08, 1999 | | | | | | | | | | | | |
| 222 | HTXDG92 | 203959 | Uni-ZAP | 232 | 1162 | 1 | 1162 | | 216 | 495 | 1 | 24 | 25 | 66 |
| | | Apr. 26, 1999 | XR | | | | | | | | | | | |
| 223 | HTXET11 | 203918 | Uni-ZAP | 233 | 989 | 1 | 989 | 178 | 178 | 496 | 1 | 22 | 23 | 29 |
| | | Apr. 08, 1999 | XR | | | | | | | | | | | |
| 224 | HTXFA72 | PTA-181 | Uni-ZAP | 234 | 1861 | 1 | 1861 | 192 | 192 | 497 | 1 | 17 | 18 | 29 |
| | | Jun. 07, 1999 | XR | | | | | | | | | | | |
| 225 | HTXJD85 | 203959 | Uni-ZAP | 235 | 1117 | 1 | 1117 | 211 | 211 | 498 | 1 | 16 | 17 | 31 |
| | | Apr. 26, 1999 | XR | | | | | | | | | | | |
| 226 | HTXJY08 | 203959 | Uni-ZAP | 236 | 1187 | 12 | 1187 | 108 | 108 | 499 | 1 | | | 16 |
| | | Apr. 26, 1999 | XR | | | | | | | | | | | |
| 227 | HTXLT36 | 203959 | Uni-ZAP | 237 | 1040 | 1 | 1038 | 189 | 189 | 500 | 1 | | | 13 |
| | | Apr. 26, 1999 | XR | | | | | | | | | | | |
| 228 | HUFCL31 | 203959 | pSport1 | 238 | 1460 | 1 | 1460 | | 287 | 501 | 1 | | | 26 |
| | | Apr. 26, 1999 | | | | | | | | | | | | |
| 229 | HUKDF20 | 203918 | Lambda | 239 | 1105 | 1 | 1105 | 214 | 214 | 502 | 1 | 20 | 21 | 33 |
| | | Apr. 08, 1999 | ZAP II | | | | | | | | | | | |
| 230 | HUSCJ14 | PTA-1838 | Lambda | 240 | 3342 | 1 | 3342 | 74 | 74 | 503 | 1 | 30 | 31 | 196 |
| | | May 09, 2000 | ZAP II | | | | | | | | | | | |
| 231 | HUVDJ48 | 203918 | Uni-ZAP | 241 | 1827 | 1 | 1827 | 196 | 196 | 504 | 1 | | | 5 |
| | | Apr. 08, 1999 | XR | | | | | | | | | | | |
| 232 | HWBBU75 | 203979 | pCMVSport | 242 | 2731 | 623 | 2731 | 783 | 783 | 505 | 1 | 22 | 23 | 51 |
| | | Apr. 29, 1999 | 3.0 | | | | | | | | | | | |
| 233 | HWBCN36 | 203959 | pCMVSport | 243 | 1008 | 1 | 1008 | 378 | 378 | 506 | 1 | 23 | 24 | 90 |
| | | Apr. 26, 1999 | 3.0 | | | | | | | | | | | |
| 234 | HWBDJ08 | 203959 | pCMVSport | 244 | 2085 | 1 | 2085 | 253 | 253 | 507 | 1 | 29 | 30 | 50 |
| | | Apr. 26, 1999 | 3.0 | | | | | | | | | | | |
| 235 | HWLBO67 | 203959 | pSport1 | 245 | 536 | 1 | 536 | 42 | 42 | 508 | 1 | 28 | 29 | 39 |
| | | Apr. 26, 1999 | | | | | | | | | | | | |
| 236 | HWLGP26 | 203959 | pSport1 | 246 | 1898 | 1007 | 1835 | 1091 | 1091 | 509 | 1 | 23 | 24 | 71 |
| | | Apr. 26, 1999 | | | | | | | | | | | | |
| 237 | HILCA24 | 203960 | pBluescript | 247 | 1982 | 153 | 1982 | 191 | 191 | 510 | 1 | 29 | 30 | 327 |
| | | Apr. 26, 1999 | SK− | | | | | | | | | | | |
| 237 | HILCA24 | 203960 | pBluescript | 260 | 1980 | 151 | 1976 | 189 | 189 | 523 | 1 | 29 | 30 | 327 |
| | | Apr. 26, 1999 | SK− | | | | | | | | | | | |
| 238 | HYABC84 | 203959 | pCMVSport | 248 | 1478 | 833 | 1306 | 1080 | 1080 | 511 | 1 | 28 | 29 | 62 |
| | | Apr. 26, 1999 | 3.0 | | | | | | | | | | | |
| 238 | HYABC84 | 203959 | pCMVSport | 261 | 1338 | 768 | 1238 | 1015 | 1015 | 524 | 1 | 28 | 29 | 62 |
| | | Apr. 26, 1999 | 3.0 | | | | | | | | | | | |
| 239 | HPWTF23 | 203979 | Uni-ZAP | 249 | 2008 | 94 | 1994 | 283 | 283 | 512 | 1 | 29 | 30 | 130 |
| | | Apr. 29, 1999 | XR | | | | | | | | | | | |
| 239 | HPWTF23 | 203979 | Uni-ZAP | 262 | 2008 | 94 | 1994 | 283 | 283 | 525 | 1 | 29 | 30 | 130 |
| | | Apr. 29, 1999 | XR | | | | | | | | | | | |
| 240 | HLWAU42 | 203957 | pCMVSport | 250 | 947 | 1 | 947 | 220 | 220 | 513 | 1 | 17 | 18 | 57 |
| | | Apr. 26, 1999 | 3.0 | | | | | | | | | | | |
| 240 | HLWAU42 | 203957 | pCMVSport | 263 | 2495 | 1542 | 2488 | 1751 | 1751 | 526 | 1 | 17 | 18 | 57 |
| | | Apr. 26, 1999 | 3.0 | | | | | | | | | | | |
| 241 | HGCAC19 | 203960 | pSport1 | 251 | 5061 | 23 | 1475 | | 317 | 514 | 1 | | | 9 |
| | | Apr. 26, 1999 | | | | | | | | | | | | |
| 241 | HGCAC19 | 203960 | pSport1 | 264 | 1771 | 21 | 1473 | | 315 | 527 | 1 | | | 9 |
| | | Apr. 26, 1999 | | | | | | | | | | | | |
| 241 | HGCAC19 | 203960 | pSport1 | 265 | 1534 | 23 | 1534 | | 317 | 528 | 1 | | | 9 |
| | | Apr. 26, 1999 | | | | | | | | | | | | |
| 242 | HEQBJ01 | 203960 | pCMVSport | 252 | 2791 | 2346 | 2731 | 2603 | 2603 | 515 | 1 | | | 19 |
| | | Apr. 26, 1999 | 3.0 | | | | | | | | | | | |
| 242 | HEQBJ01 | 203960 | pCMVSport | 266 | 2791 | 2346 | 2731 | 2603 | 2603 | 529 | 1 | | | 19 |
| | | Apr. 26, 1999 | 3.0 | | | | | | | | | | | |
| 242 | HEQBJ01 | 203960 | pCMVSport | 267 | 669 | 1 | 662 | 505 | 505 | 530 | 1 | | | 19 |
| | | Apr. 26, 1999 | 3.0 | | | | | | | | | | | |
| 243 | HBJHT01 | 203917 | Uni-ZAP | 253 | 1251 | 1 | 1251 | 200 | 200 | 516 | 1 | 20 | 21 | 21 |
| | | Apr. 08, 1999 | XR | | | | | | | | | | | |
| 243 | HBJHT01 | 203917 | Uni-ZAP | 268 | 1252 | 1 | 1252 | 193 | 193 | 531 | 1 | 21 | 22 | 47 |
| | | Apr. 08, 1999 | XR | | | | | | | | | | | |
| 244 | HE8FD92 | 203979 | Uni-ZAP | 254 | 3977 | 1986 | 3960 | 2141 | 2141 | 517 | 1 | 25 | 26 | 43 |
| | | Apr. 29, 1999 | XR | | | | | | | | | | | |
| 244 | HE8FD92 | 203979 | Uni-ZAP | 269 | 1995 | 1 | 1978 | 157 | 157 | 532 | 1 | 25 | 26 | 43 |
| | | Apr. 29, 1999 | XR | | | | | | | | | | | |
| 244 | HE8FD92 | 203979 | Uni-ZAP | 270 | 4102 | 2114 | 4085 | 2268 | 2268 | 533 | 1 | 25 | 26 | 43 |
| | | Apr. 29, 1999 | XR | | | | | | | | | | | |
| 244 | HE8FD92 | 203979 | Uni-ZAP | 271 | 4907 | 2918 | 4890 | | 2 | 534 | 1 | 1 | 2 | 471 |
| | | Apr. 29, 1999 | XR | | | | | | | | | | | |
| 244 | HE8FD92 | 203979 | Uni-ZAP | 272 | 2908 | 918 | 2891 | 1074 | 1074 | 535 | 1 | 25 | 26 | 43 |
| | | Apr. 29, 1999 | XR | | | | | | | | | | | |
| 245 | HBDAB91 | 203917 | pSport1 | 255 | 1007 | 320 | 1007 | 671 | 671 | 518 | 1 | 19 | 20 | 29 |
| | | Apr. 08, 1999 | | | | | | | | | | | | |
| 245 | HBDAB91 | 203917 | pSport1 | 273 | 687 | 1 | 687 | 351 | 351 | 536 | 1 | 19 | 20 | 29 |
| | | Apr. 08, 1999 | | | | | | | | | | | | |

[0077] Table 1B (Comprised of Tables 1B.1 and 1B.2)

[0078] The first column in Table 1B.1 and Table 1B.2 provides the gene number in the application corresponding to the clone identifier. The second column in Table 1B.1 and Table 1B.2 provides a unique “Clone ID:” for the cDNA clone related to each contig sequence disclosed in Table 1B.1 and Table 1B.2. This clone ID references the cDNA clone which contains at least the 5′ most sequence of the assembled contig and at least a portion of SEQ ID NO:X as determined by directly sequencing the referenced clone. The referenced clone may have more sequence than described in the sequence listing or the clone may have less. In the vast majority of cases, however, the clone is believed to encode a full-length polypeptide. In the case where a clone is not full-length, a full-length cDNA can be obtained by methods described elsewhere herein. The third column in Table 1B.1 and Table 1B.2 provides a unique “Contig ID” identification for each contig sequence. The fourth column in Table 1B.1 and Table 1B.2 provides the “SEQ ID NO:” identifier for each of the contig polynucleotide sequences disclosed in Table 1B.

[0079] Table 1B.1

[0080] The fifth column in Table 1B.1, “ORF (From-To)”, provides the location (i.e., nucleotide position numbers) within the polynucleotide sequence “SEQ ID NO:X” that delineate the preferred open reading frame (ORF) shown in the sequence listing and referenced in Table 1B.1, column 6, as SEQ ID NO:Y. Where the nucleotide position number “To” is lower than the nucleotide position number “From”, the preferred ORF is the reverse complement of the referenced polynucleotide sequence. The sixth column in Table 1B.1 provides the corresponding SEQ ID NO:Y for the polypeptide sequence encoded by the preferred ORF delineated in column 5. In one embodiment, the invention provides an amino acid sequence comprising, or alternatively consisting of, a polypeptide encoded by the portion of SEQ ID NO:X delineated by “ORF (From-To)”. Also provided are polynucleotides encoding such amino acid sequences and the complementary strand thereto. Column 7 in Table 1B.1 lists residues comprising epitopes contained in the polypeptides encoded by the preferred ORF (SEQ ID NO:Y), as predicted using the algorithm of Jameson and Wolf, (1988) Comp. Appl. Biosci. 4:181-186. The Jameson-Wolf antigenic analysis was performed using the computer program PROTEAN (Version 3.11 for the Power MacIntosh, DNASTAR, Inc., 1228 South Park Street Madison, Wis.). In specific embodiments, polypeptides of the invention comprise, or alternatively consist of, at least one, two, three, four, five or more of the predicted epitopes as described in Table 1B. It will be appreciated that depending on the analytical criteria used to predict antigenic determinants, the exact address of the determinant may vary slightly.

[0081] Column 8 in Table 1B.1 provides a chromosomal map location for certain polynucleotides of the invention. Chromosomal location was determined by finding exact matches to EST and cDNA sequences contained in the NCBI (National Center for Biotechnology Information) UniGene database. Each sequence in the UniGene database is assigned to a “cluster”; all of the ESTs, cDNAs, and STSs in a cluster are believed to be derived from a single gene. Chromosomal mapping data is often available for one or more sequence(s) in a UniGene cluster; this data (if consistent) is then applied to the cluster as a whole. Thus, it is possible to infer the chromosomal location of a new polynucleotide sequence by determining its identity with a mapped UniGene cluster.

[0082] A modified version of the computer program BLASTN (Altshul, et al., J. Mol. Biol. 215:403-410 (1990), and Gish, and States, Nat. Genet. 3:266-272) (1993) was used to search the UniGene database for EST or cDNA sequences that contain exact or near-exact matches to a polynucleotide sequence of the invention (the ‘Query’). A sequence from the UniGene database (the ‘Subject’) was said to be an exact match if it contained a segment of 50 nucleotides in length such that 48 of those nucleotides were in the same order as found in the Query sequence. If all of the matches that met this criteria were in the same UniGene cluster, and mapping data was available for this cluster, it is indicated in Table 1B under the heading “Cytologic Band”. Where a cluster had been further localized to a distinct cytologic band, that band is disclosed; where no banding information was available, but the gene had been localized to a single chromosome, the chromosome is disclosed.

[0083] Once a presumptive chromosomal location was determined for a polynucleotide of the invention, an associated disease locus was identified by comparison with a database of diseases which have been experimentally associated with genetic loci. The database used was the Morbid Map, derived from OMIM™ and National Center for Biotechnology Information, National Library of Medicine (Bethesda, Md.) 2000. If the putative chromosomal location of a polynucleotide of the invention (Query sequence) was associated with a disease in the Morbid Map database, an OMIM reference identification number was noted in column 9, Table 1B.1, labelled “OMIM Disease Reference(s). Table 5 is a key to the OMIM reference identification numbers (column 1), and provides a description of the associated disease in Column 2.

[0084] Table 1B.2

[0085] Column 5, in Table 1B.2, provides an expression profile and library code:count for each of the contig sequences (SEQ ID NO:X) disclosed in Table 1B, which can routinely be combined with the information provided in Table 4 and used to determine the tissues, cells, and/or cell line libraries which predominantly express the polynucleotides of the invention. The first number in Table 1B.2, column 5 (preceding the colon), represents the tissue/cell source identifier code corresponding to the code and description provided in Table 4. The second number in column 5 (following the colon) represents the number of times a sequence corresponding to the reference polynucleotide sequence was identified in the corresponding tissue/cell source. Those tissue/cell source identifier codes in which the first two letters are “AR” designate information generated using DNA array technology. Utilizing this technology, cDNAs were amplified by PCR and then transferred, in duplicate, onto the array. Gene expression was assayed through hybridization of first strand cDNA probes to the DNA array. cDNA probes were generated from total RNA extracted from a variety of different tissues and cell lines. Probe synthesis was performed in the presence of ³³P dCTP, using oligo (dT) to prime reverse transcription. After hybridization, high stringency washing conditions were employed to remove non-specific hybrids from the array. The remaining signal, emanating from each gene target, was measured using a Phosphorimager. Gene expression was reported as Phosphor Stimulating Luminescence (PSL) which reflects the level of phosphor signal generated from the probe hybridized to each of the gene targets represented on the array. A local background signal subtraction was performed before the total signal generated from each array was used to normalize gene expression between the different hybridizations. The value presented after “[array code]:” represents the mean of the duplicate values, following background subtraction and probe normalization. One of skill in the art could routinely use this information to identify normal and/or diseased tissue(s) which show a predominant expression pattern of the corresponding polynucleotide of the invention or to identify polynucleotides which show predominant and/or specific tissue and/or cell expression.

TABLE 1B.1

| | | | | | AA | | | |
|---|---|---|---|---|---|---|---|---|
| | | | SEQ | | SEQ | | | |
| | | | ID | | ID | | | |
| Gene | cDNA | Contig | NO: | ORF | NO: | | Cytologic | |
| No: | Clone ID | ID: | X | (From-To) | Y | Predicted Epitopes | Band | OMIM Disease Reference(s): |
| 1 | H6EDM64 | 841331 | 11 | 1448-1468 | 274 | | 11q13 | 102200, 106100, 131100, 131100, 131100, 133780, |
| | | | | | | | | 147050, 153700, 161015, 164009, 168461, 168461, |
| | | | | | | | | 168461, 180721, 180840, 191181, 193235, 209901, |
| | | | | | | | | 232600, 259700, 259770, 600045, 600319, 600528, |
| | | | | | | | | 601884 |
| 2 | H6EEU40 | 757048 | 12 | 175-318 | 275 | | 11q12.1 | 106100, 147050, 259700, 259770, 600045, 601884 |
| 3 | HACBJ56 | 847112 | 13 | 250-327 | 276 | Arg-14 to Ile-24. | | |
| 4 | HACBS22 | 847113 | 14 | 217-342 | 277 | Cys-2 to Leu-8. | | |
| 5 | HACBT91 | 789939 | 15 | 329-508 | 278 | Ser-49 to Lys-59. | 17q25.3 | 170500, 170500, 170500, 232300, 252900 |
| 6 | HADDJ13 | 827273 | 16 | 347-439 | 279 | | | |
| 7 | HADMA77 | 783049 | 17 | 992-1063 | 280 | | | |
| 8 | HADMB15 | 847116 | 18 | 238-300 | 281 | | | |
| 9 | HAGBQ12 | 722205 | 19 | 171-236 | 282 | | | |
| 10 | HAGCC87 | 638587 | 20 | 509-538 | 283 | | | |
| 11 | HAGFJ67 | 861680 | 21 | 208-486 | 284 | Cys-26 to Asp-31. | | |
| 12 | HAGFS57 | 847120 | 22 | 241-405 | 285 | Met-1 to Lys-6. | 15q15.3 | 114240, 224120, 600839, 602099 |
| 13 | HAGHN57 | 773286 | 23 | 900-932 | 286 | | 7q22-q32 | 126650, 126650, 154276, 173360, 173360, 180105, |
| | | | | | | | | 190900, 222800, 246900, 602136, 602136, 602136, |
| | | | | | | | | 602447 |
| 14 | HAGHR18 | 655435 | 24 | 28-126 | 287 | | | |
| 15 | HAJAA47 | 534670 | 25 | 192-308 | 288 | Leu-33 to Asp-38. | | |
| 16 | HAJAY92 | 845601 | 26 | 12-296 | 289 | Lys-89 to Glu-94. | | |
| 17 | HAJBV67 | 866415 | 27 | 605-1684 | 290 | Arg-24 to Trp-44, | 10q23.33 | 157640, 174900, 236730, 600512 |
| | | | | | | Leu-87 to Ser-93, | | |
| | | | | | | Arg-119 to Trp-125, | | |
| | | | | | | Pro-206 to Lys-211, | | |
| | | | | | | Glu-280 to Trp-286. | | |
| 18 | HAQBG57 | 837545 | 28 | 170-340 | 291 | Trp-10 to Lys-18, | | |
| | | | | | | Val-32 to Cys-38, | | |
| | | | | | | Asp-41 to Thr-47. | | |
| 19 | HARAE26 | 560598 | 29 | 225-518 | 292 | Pro-52 to Cys-57. | | |
| 20 | HATCD80 | 826098 | 30 | 296-409 | 293 | | | |
| 21 | HBAGD86 | 838799 | 31 | 521-580 | 294 | | | |
| 22 | HBGBC29 | 691473 | 32 | 1016-1024 | 295 | | 3q13.3 | 126451, 600882 |
| 23 | HBHAA05 | 603174 | 33 | 110-286 | 296 | | | |
| 24 | HBHAA81 | 846465 | 34 | 28-639 | 297 | | 3p21.32 | 116806, 168468, 182280, 600163 |
| 25 | HBJAB02 | 837309 | 35 | 84-188 | 298 | Arg-24 to Asp-31. | 17q23 | 106180, 138700, 139250, 150200, 154275, 176960, |
| | | | | | | | | 249000, 253250 |
| 26 | HBJAC40 | 841235 | 36 | 329-370 | 299 | | 16p13.3 | 141750, 141800, 141800, 141800, 141800, 141850, |
| | | | | | | | | 141850, 141850, 141850, 141850, 156850, 186580, |
| | | | | | | | | 191092, 600140, 600273, 601313, 601785 |
| 27 | HBJCR46 | 815649 | 37 | 589-2787 | 300 | Met-1 to Ala-8, Phe- | 15q12 | 103581, 146150, 182279, 203200, 203200, 227220, |
| | | | | | | 42 to Asp-57, Tyr- | | 601623, 601800, 601889, 602117 |
| | | | | | | 105 to Thr-110, His- | | |
| | | | | | | 121 to Cys-127, Asp- | | |
| | | | | | | 154 to Lys-181, Arg- | | |
| | | | | | | 186 to Pro-210, Ala- | | |
| | | | | | | 233 to Asp-252, Ser- | | |
| | | | | | | 296 to Ser-306, Pro- | | |
| | | | | | | 313 to Ser-320, Gln- | | |
| | | | | | | 331 to Gly-346, Ser- | | |
| | | | | | | 355 to Thr-360, Cys- | | |
| | | | | | | 386 to Phe-395, Ser- | | |
| | | | | | | 400 to Glu-425, Thr- | | |
| | | | | | | 440 to Thr-446, Pro- | | |
| | | | | | | 449 to Cys-466, Glu- | | |
| | | | | | | 470 to Thr-509, Ser- | | |
| | | | | | | 512 to Asp-533, Ala- | | |
| | | | | | | 544 to Arg-550, Arg- | | |
| | | | | | | 562 to Glu-571, Lys- | | |
| | | | | | | 587 to Thr-594, Asp- | | |
| | | | | | | 713 to Glu-733. | | |
| 28 | HBJDW56 | 520401 | 38 | 121-147 | 301 | | | |
| 29 | HBJEL16 | 847030 | 39 | 115-225 | 302 | | 1q23.1- | 107300, 131210, 136132, 145001, 173610, 249270, |
| | | | | | | | q23.2 | 601652 |
| 30 | HBJFK45 | 531919 | 40 | 430-456 | 303 | | | |
| 31 | HBJKD16 | 853358 | 41 | 78-173 | 304 | | 2p14 | 203800 |
| 32 | HBMUH74 | 866160 | 42 | 344-430 | 305 | | 12p11.22 | 112410, 135700, 168470, 200990 |
| 33 | HBQAB79 | 810542 | 43 | 190-225 | 306 | | 4q31.1 | 189800, 600983 |
| 34 | HBXCM66 | 639039 | 44 | 119-169 | 307 | | | |
| 35 | HBXCX15 | 637542 | 45 | 72-77 | 308 | | | |
| 36 | HCDBO32 | 831942 | 46 | 1669-1884 | 309 | Val-2 to Thr-7. | | |
| 37 | HCEDR26 | 771144 | 47 | 177-344 | 310 | | | |
| 38 | HCEEE79 | 560609 | 48 | 131-298 | 311 | Gly-35 to Pro-41. | | |
| 39 | HCEFG93 | 745400 | 49 | 166-207 | 312 | | | |
| 40 | HCEFZ82 | 831745 | 50 | 215-1012 | 313 | Tyr-30 to Gln-35, | 3p23-cen | |
| | | | | | | Asn-114 to Lys-119, | | |
| | | | | | | Ser-161 to Ala-171, | | |
| | | | | | | Arg-183 to Gly-189, | | |
| | | | | | | Pro-205 to Ala-211, | | |
| | | | | | | Lys-231 to Trp-237, | | |
| | | | | | | Gly-246 to Lys-265. | | |
| 41 | HCFLN88 | 610000 | 51 | 101-178 | 314 | | 7q11.23 | 116860, 129900, 233700, 600079 |
| 42 | HCHAB84 | 834326 | 52 | 304-747 | 315 | Asn-47 to Leu-52, | | |
| | | | | | | Tyr-134 to Trp-143. | | |
| 43 | HCLBK61 | 845659 | 53 | 1050-1139 | 316 | | 19p13.12 | 143890, 151440, 600276, 601843 |
| 44 | HCMSX51 | 788643 | 54 | 539-781 | 317 | Leu-57 to Glu-66. | 8p21 | 152760, 180100, 185430, 602629 |
| 45 | HCNCO11 | 775086 | 55 | 101-145 | 318 | | | |
| 46 | HCNSD29 | 862314 | 56 | 1145-1240 | 319 | | 2q23.3 | |
| 47 | HCQBH72 | 637548 | 57 | 31-174 | 320 | | | |
| 48 | HCQCC96 | 845066 | 58 | 782-919 | 321 | | | |
| 49 | HCUDD64 | 835082 | 59 | 256-402 | 322 | Met-1 to Ser-6, Gln- | 19p13.3 | 108725, 120700, 133171, 136836, 145981, 147141, |
| | | | | | | 32 to Asn-39. | | 164953, 188070, 600957, 601238, 601846, 602216, |
| | | | | | | | | 602477 |
| 50 | HCWAE64 | 535893 | 60 | 410-427 | 323 | | | |
| 51 | HDPCW16 | 840358 | 61 | 172-339 | 324 | Met-1 to Ser-7. | 11q12- | 106100, 133780, 147050, 259700, 259770, 600045, |
| | | | | | | | q13.1 | 601650, 601884 |
| 52 | HDPDI72 | 897277 | 62 | 23-385 | 325 | Arg-63 to Phe-72, | | |
| | | | | | | Ile-114 to Phe-120. | | |
| 53 | HDPGE24 | 801947 | 63 | 173-394 | 326 | | | |
| 54 | HDPIE44 | 899328 | 64 | 169-351 | 327 | | | |
| 55 | HDPIU94 | 813352 | 65 | 208-279 | 328 | | 8p21.1 | 138300, 240400, 602629 |
| 56 | HDPIY31 | 886159 | 66 | 268-375 | 329 | | 20q13.33 | |
| 57 | HDPOC24 | 777493 | 67 | 418-819 | 330 | Pro-36 to Cys-42, | 9q34.12 | |
| | | | | | | Pro-44 to Cys-54, | | |
| | | | | | | Arg-100 to Gly-105. | | |
| 58 | HDPPD93 | 637588 | 68 | 28-66 | 331 | | | |
| 59 | HDPPQ30 | 684292 | 69 | 220-336 | 332 | | | |
| 60 | HDQHM36 | 852328 | 70 | 129-275 | 333 | | | |
| 61 | HDTLM18 | 836057 | 71 | 345-524 | 334 | Ile-47 to Ser-60. | | |
| 62 | HE2CM39 | 553651 | 72 | 10-51 | 335 | | | |
| 63 | HE6CS65 | 762960 | 73 | 295-483 | 336 | Trp-50 to Leu-55. | 1q23.2 | 107300, 131210, 136132, 145001, 173610, 249270, |
| | | | | | | | | 601652 |
| 64 | HE6FU11 | 827236 | 74 | 145-825 | 337 | | | |
| 65 | HE6FV29 | 588454 | 75 | 210-311 | 338 | | | |
| 66 | HE8BQ49 | 589443 | 76 | 133-168 | 339 | | | |
| 67 | HE8SG96 | 862016 | 77 | 118-192 | 340 | Tyr-16 to Gln-23. | | |
| 68 | HE9EA10 | 827796 | 78 | 212-448 | 341 | Arg-6 to Trp-11. | | |
| 69 | HE9GG20 | 633719 | 79 | 319-348 | 342 | | | |
| 70 | HEAAW94 | 847340 | 80 | 189-224 | 343 | | 3p14.3 | 150250, 164500, 277730, 600971, 601226 |
| 71 | HEBCI18 | 831464 | 81 | 855-1064 | 344 | Val-40 to Cys-45, | 2q14.2 | 165320 |
| | | | | | | Lys-58 to Thr-64. | | |
| 72 | HEBCY54 | 600355 | 82 | 172-528 | 345 | Arg-18 to Lys-26, | 8p22-p21 | 148370, 152760, 180100, 185430, 238600, 238600, |
| | | | | | | Gly-35 to Ala-42, | | 238600, 238600, 600143, 601385, 602629 |
| | | | | | | Gln-61 to Gly-67. | | |
| 73 | HEBDQ91 | 840288 | 83 | 1211-1336 | 346 | | | |
| 74 | HEBFR46 | 847064 | 84 | 200-289 | 347 | Met-1 to Thr-6. | | |
| 75 | HEBGE07 | 798096 | 85 | 106-234 | 348 | | | |
| 76 | HEBGE23 | 836129 | 86 | 153-398 | 349 | | 19q13.2 | 107741, 113900, 122720, 122720, 126340, 126391, |
| | | | | | | | | 160900, 164731, 173850, 207750, 248600, 258501 |
| 77 | HEGAU15 | 834379 | 87 | 59-163 | 350 | | | |
| 78 | HFCEI04 | 692438 | 88 | 136-264 | 351 | Asn-21 to Gly-28. | | |
| 79 | HFEAY59 | 658685 | 89 | 154-276 | 352 | Arg-2 to Lys-8, Arg- | | |
| | | | | | | 22 to Lys-31. | | |
| 80 | HFEBO17 | 852218 | 90 | 136-219 | 353 | | | |
| 81 | HFIJA68 | 847074 | 91 | 283-414 | 354 | | | |
| 82 | HFKES05 | 827572 | 92 | 243-371 | 355 | Ile-26 to Ala-42. | | |
| 83 | HFKFX64 | 566835 | 93 | 127-171 | 356 | | 18q11 | 114400, 257220, 257220 |
| 84 | HFPCZ55 | 840840 | 94 | 676-810 | 357 | | 11p15 | 108985, 186921, 602092 |
| 85 | HFTAS49 | 847386 | 95 | 249-320 | 358 | | 6p21.2 | 150270, 248611, 601690 |
| 86 | HFVHW43 | 570948 | 96 | 92-211 | 359 | | | |
| 87 | HGBER72 | 826710 | 97 | 43-102 | 360 | | | |
| 88 | HGBHP91 | 693011 | 98 | 50-208 | 361 | | | |
| 89 | HGLBG15 | 701990 | 99 | 191-271 | 362 | | | |
| 90 | HHEAK45 | 765278 | 100 | 813-824 | 363 | | 6p21.33 | 248611 |
| 91 | HHEOW19 | 886174 | 101 | 183-377 | 364 | Ala-41 to Pro-57. | 1q42 | 106150, 106150, 145260, 173870, 173870, 600759, |
| | | | | | | | | 600996, 601744, 601975 |
| 92 | HHFEB79 | 1300768 | 102 | 120-2390 | 365 | Ala-31 to Val-38, | | |
| | | | | | | Pro-63 to Gly-68, | | |
| | | | | | | Gly-74 to Cys-87, | | |
| | | | | | | Pro-93 to Asp-104, | | |
| | | | | | | Arg-109 to Ser-121, | | |
| | | | | | | Gln-128 to Thr-133, | | |
| | | | | | | Thr-148 to Ser-163, | | |
| | | | | | | Pro-170 to Leu-179, | | |
| | | | | | | Val-183 to Ser-195, | | |
| | | | | | | Pro-202 to Asp-219, | | |
| | | | | | | Thr-243 to Lys-287, | | |
| | | | | | | Leu-290 to Thr-307, | | |
| | | | | | | Pro-309 to Ala-323, | | |
| | | | | | | Pro-325 to Glu-331, | | |
| | | | | | | Ser-333 to Lys-341, | | |
| | | | | | | Lys-347 to Lys-354, | | |
| | | | | | | Pro-364 to Ser-376, | | |
| | | | | | | Ser-386 to Thr-399, | | |
| | | | | | | Leu-402 to Pro-407, | | |
| | | | | | | Pro-415 to Asp-438, | | |
| | | | | | | Lys-444 to Ser-451, | | |
| | | | | | | Lys-467 to Ser-479, | | |
| | | | | | | Ser-500 to Thr-518, | | |
| | | | | | | Pro-524 to Asn-529, | | |
| | | | | | | Gly-538 to Gly-545, | | |
| | | | | | | Ser-552 to Phe-558, | | |
| | | | | | | Val-569 to Asp-575, | | |
| | | | | | | Val-583 to Asp-590, | | |
| | | | | | | Arg-618 to Trp-628, | | |
| | | | | | | Glu-630 to Pro-635, | | |
| | | | | | | Pro-642 to Ala-652, | | |
| | | | | | | Ser-654 to Thr-660, | | |
| | | | | | | Glu-708 to Pro-713, | | |
| | | | | | | Ala-715 to Trp-732, | | |
| | | | | | | Thr-738 to His-751. | | |
| | HHFEB79 | 863749 | 256 | 715-2430 | 519 | Ala-31 to Val-38, | | |
| | | | | | | Pro-63 to Gly-68, | | |
| | | | | | | Gly-74 to Cys-87, | | |
| | | | | | | Pro-93 to Asp-104, | | |
| | | | | | | Arg-109 to Ser-121, | | |
| | | | | | | Gln-128 to Thr-133, | | |
| | | | | | | Thr-148 to Ser-163, | | |
| | | | | | | Pro-170 to Leu-179, | | |
| | | | | | | Val-183 to Glu-188. | | |
| 93 | HHFEC39 | 609873 | 103 | 1211-1216 | 366 | | 6p22-p21 | 180297, 248611, 251000, 263200, 600211, 600701, |
| | | | | | | | | 601690 |
| 94 | HHFFS40 | 824059 | 104 | 37-180 | 367 | | 5p14.1 | 123000 |
| 95 | HHGCS78 | 634605 | 105 | 290-364 | 368 | | 17q11.1 | 182138, 600881, 601954 |
| 96 | HHPFP26 | 753269 | 106 | 24-266 | 369 | Trp-46 to Pro-52, | 14q23.1 | 107970, 182600, 182870, 182870, 182870 |
| | | | | | | Val-67 to Gly-72. | | |
| 97 | HHPFU28 | 824573 | 107 | 156-239 | 370 | Ser-12 to Tyr-17. | 4q12 | 103600, 103600, 103600, 104150, 104150, 104500, |
| | | | | | | | | 164920, 164920, 164920, 170650, 600900 |
| 98 | HHSBI06 | 639097 | 108 | 690-707 | 371 | | | |
| 99 | HHSBI65 | 801910 | 109 | 62-229 | 372 | Ala-16 to Val-35. | 8q24.3 | 188450, 188450, 188450 |
| 100 | HISAT67 | 843549 | 110 | 1239-1409 | 373 | | 2p23.3 | 176830, 176830, 182601, 229800, 602134 |
| 101 | HISBA38 | 561711 | 111 | 169-279 | 374 | | | |
| 102 | HJBCU75 | 638329 | 112 | 61-78 | 375 | | | |
| 103 | HJMAA03 | 824062 | 113 | 527-556 | 376 | | | |
| 104 | HJPCH08 | 840365 | 114 | 374-727 | 377 | Glu-3 to Phe-9, Gln- | | |
| | | | | | | 17 to Leu-50. | | |
| 105 | HKABU43 | 838573 | 115 | 755-1600 | 378 | Ile-69 to Ala-74, | | |
| | | | | | | Ala-122 to Ser-129, | | |
| | | | | | | Thr-160 to Glu-170, | | |
| | | | | | | Lys-197 to Arg-202. | | |
| 106 | HKIXC44 | 716213 | 116 | 572-682 | 379 | | | |
| 107 | HKTAB41 | 695732 | 117 | 172-204 | 380 | | | |
| 108 | HLDBG17 | 855953 | 118 | 184-309 | 381 | Leu-29 to His-34. | | |
| 109 | HLDQU79 | 740755 | 119 | 99-1142 | 382 | Leu-68 to Lys-74, | | |
| | | | | | | Tyr-109 to Lys-115, | | |
| | | | | | | Gln-200 to Val-205, | | |
| | | | | | | Lys-207 to Lys-214, | | |
| | | | | | | Glu-237 to Ile-244, | | |
| | | | | | | Ala-271 to Thr-279, | | |
| | | | | | | Ser-317 to Ser-329, | | |
| | | | | | | Gln-342 to Gly-348. | | |
| | HLDQU79 | 837599 | 257 | 75-1121 | 520 | | | |
| 110 | HLHAP05 | 638476 | 120 | 45-89 | 383 | Gln-4 to Leu-14. | | |
| 111 | HLHBS54 | 837503 | 121 | 73-1101 | 384 | Glu-25 to Glu-36, | | |
| | | | | | | Thr-51 to Asp-57, | | |
| | | | | | | Leu-117 to Gly-129. | | |
| 112 | HLHCS23 | 560663 | 122 | 25-129 | 385 | | | |
| 113 | HLICE88 | 840321 | 123 | 708-716 | 386 | | 4q28 | 107250, 134820, 134820, 134820, 134830, 134850, |
| | | | | | | | | 134850, 181600, 189800, 266300 |
| 114 | HLQAS12 | 886180 | 124 | 305-343 | 387 | | 12p13.2- | 103950, 200990, 601458, 602096 |
| | | | | | | | p12.3 | |
| 115 | HLYAR30 | 781249 | 125 | 562-852 | 388 | Ala-2 to Arg-10, | | |
| | | | | | | Arg-77 to Arg-97. | | |
| 116 | HLYDF73 | 566869 | 126 | 363-434 | 389 | | | |
| 117 | HLYDO73 | 584787 | 127 | 233-271 | 390 | | | |
| 118 | HLYGY91 | 658703 | 128 | 211-339 | 391 | | | |
| 119 | HMDAB29 | 584789 | 129 | 97-177 | 392 | | | |
| 120 | HMDAD44 | 566854 | 130 | 135-161 | 393 | | | |
| 121 | HMEDE24 | 837027 | 131 | 900-1001 | 394 | Asn-17 to Asn-22, | 6p25.1 | |
| | | | | | | Arg-27 to Lys-33. | | |
| 122 | HMEDI90 | 840077 | 132 | 622-675 | 395 | Ser-7 to Thr-13. | | |
| 123 | HMIBD93 | 634227 | 133 | 983-1180 | 396 | Pro-4 to Gly-13, Ala- | | |
| | | | | | | 42 to Ser-50. | | |
| 124 | HMIBF07 | 603528 | 134 | 229-249 | 397 | | | |
| 125 | HMJAK70 | 610099 | 135 | 273-305 | 398 | | | |
| 126 | HMQAI38 | 589964 | 136 | 24-86 | 399 | | | |
| 127 | HMSHY25 | 886183 | 137 | 656-763 | 400 | His-1 to Gln-6, Glu- | | |
| | | | | | | 28 to Pro-35. | | |
| 128 | HMUAN45 | 833072 | 138 | 239-922 | 401 | Pro-33 to Gly 45, | 11q13.5 | 133780, 266150, 276903, 276903, 276903 |
| | | | | | | Cys-121 to Gly-131, | | |
| | | | | | | Ala-155 to His-166, | | |
| | | | | | | Gly-180 to Gln-185. | | |
| 129 | HMVBC31 | 825598 | 139 | 1437-1559 | 402 | Ser-33 to Tyr-39. | 1p36.21 | 120550, 120570, 120575, 153454, 256700 |
| 130 | HMWBL03 | 822861 | 140 | 137-1327 | 403 | Met-1 to Leu-11, | | |
| | | | | | | Val-13 to Lys-19, | | |
| | | | | | | Thr-30 to Asp-39, | | |
| | | | | | | Thr-49 to Gly-68, | | |
| | | | | | | Ala-78 to Gly-111, | | |
| | | | | | | Pro-140 to Thr-163, | | |
| | | | | | | Ser-169 to Ser-185, | | |
| | | | | | | Glu-197 to Lys-204, | | |
| | | | | | | Lys-210 to Asp-215, | | |
| | | | | | | Glu-220 to Ser-231, | | |
| | | | | | | Ser-255 to Leu-266, | | |
| | | | | | | Thr-269 to Asp-288, | | |
| | | | | | | Cys-300 to Val-309, | | |
| | | | | | | Phe-331 to Cys-339, | | |
| | | | | | | Ser-362 to Ile-373. | | |
| 131 | HMWCG28 | 847413 | 141 | 78-200 | 404 | | 12p13.3 | 103950, 193100, 193400, 200990, 601458 |
| 132 | HNECW49 | 639117 | 142 | 316-489 | 405 | Cys-21 toTrp-26, | | |
| | | | | | | Val-37 to Ser-53. | | |
| 133 | HNFCY57 | 877653 | 143 | 317-2206 | 406 | Leu-15 to Leu-25, | 1q44 | 601975 |
| | | | | | | Arg-47 to His-53, | | |
| | | | | | | Glu-130 to Asn-138, | | |
| | | | | | | Pro-140 to Ser-148, | | |
| | | | | | | Asn-157 to Lys-163, | | |
| | | | | | | Asn-178 to Lys-187, | | |
| | | | | | | Pro-281 to Arg-292, | | |
| | | | | | | Leu-341 to Leu-346, | | |
| | | | | | | Lys-471 to Cys-477, | | |
| | | | | | | Arg-513 to Gly-521, | | |
| | | | | | | Gly-570 to Gly-575, | | |
| | | | | | | Leu-614 to Glu-620. | | |
| 134 | HNFGR08 | 825417 | 144 | 314-445 | 407 | | | |
| 135 | HNGAK51 | 603910 | 145 | 248-346 | 408 | | | |
| 136 | HNGDX18 | 1145071 | 146 | 237-965 | 409 | Ser-21 to Ser-39, | | |
| | | | | | | Gln-45 to Gln-61, | | |
| | | | | | | Cys-124 to Ser-139. | | |
| | HNGDX18 | 866177 | 258 | 231-629 | 521 | Ser-21 to Ser-39, | | |
| | | | | | | Gln-45 to Gln-61, | | |
| | | | | | | Cys-124 to Gly-130. | | |
| 137 | HNGFR54 | 695748 | 147 | 73-231 | 410 | Trp-6 to Tyr-11. | | |
| 138 | HNGGA68 | 638116 | 148 | 184-282 | 411 | Ala-8 to Gly-20. | | |
| 139 | HNGHK37 | 609889 | 149 | 234-272 | 412 | | | |
| 140 | HNGIV64 | 561572 | 150 | 221-247 | 413 | | | |
| 141 | HNGJB41 | 852178 | 151 | 252-473 | 414 | | 22q12.2 | 101000, 101000, 101000, 101000, 123620, 138981, |
| | | | | | | | | 188826, 600850, 601669 |
| 142 | HNGKT41 | 836061 | 152 | 415-552 | 415 | | | |
| 143 | HNGMW45 | 838613 | 153 | 452-583 | 416 | | | |
| 144 | HNGNO53 | 836063 | 154 | 467-571 | 417 | | | |
| 145 | HNGPJ25 | 834942 | 155 | 544-621 | 418 | | | |
| 146 | HNHCT47 | 634691 | 156 | 73-192 | 419 | Asn-25 to Thr-33. | | |
| 147 | HNHKI74 | 777856 | 157 | 127-159 | 420 | | | |
| 148 | HNHKV56 | 800877 | 158 | 294-494 | 421 | | | |
| 149 | HOACG07 | 792928 | 159 | 778-1149 | 422 | Pro-32 to Ser-42, | 20p13 | 192340, 234200 |
| | | | | | | Cys-51 to Gly-83, | | |
| | | | | | | Gly-87 to Ser-93. | | |
| 150 | HODBB70 | 520196 | 160 | 173-256 | 423 | | | |
| 151 | HOEBK60 | 789396 | 161 | 1714-1845 | 424 | Lys-5 to Thr-10, | | |
| | | | | | | Gln-36 to Gly-43. | | |
| 152 | HOFMO16 | 596835 | 162 | 149-607 | 425 | Arg-138 to Arg-143. | 16p12- | 108730, 147781, 172471, 182381, 186580, 266600, |
| | | | | | | | p11.2 | 600760, 600760, 600761, 600761, 602066 |
| 153 | HOFNB74 | 762821 | 163 | 138-257 | 426 | Ser-30 to Ser-36. | 12q12- | 181430, 600194, 600231, 600808, 601284, 601769, |
| | | | | | | | 12q14.3 | 601769, 602116 |
| 154 | HOHBO66 | 853375 | 164 | 338-403 | 427 | | | |
| 155 | HORBS82 | 638293 | 165 | 21-140 | 428 | Gly-30 to Ser-35. | | |
| 156 | HORBV76 | 839270 | 166 | 183-779 | 429 | Gly-25 to Leu-38, | | |
| | | | | | | Asp-56 to Gly-65, | | |
| | | | | | | Ser-115 to Lys-121. | | |
| 157 | HOSDO75 | 862049 | 167 | 88-174 | 430 | Phe-2 to Ser-8, Phe- | 11q13.4 | 133780, 266150 |
| | | | | | | 21 to Ser-26. | | |
| 158 | HOSEI81 | 562778 | 168 | 203-454 | 431 | Lys-70 to Asn-76. | 12q12- | 107777, 123940, 139350, 139350, 148040, 148041, |
| | | | | | | | q13 | 148043, 148070, 231550, 600194, 600231, 600536, |
| | | | | | | | | 600808, 600956, 601284, 601769, 601769, 601928, |
| | | | | | | | | 602116, 602153 |
| 159 | HOUDE92 | 580866 | 169 | 70-336 | 432 | Pro-22 to His-31, | | |
| | | | | | | Ser-80 to Gln-88. | | |
| 160 | HPCAL26 | 762822 | 170 | 1021-1113 | 433 | | 12 | |
| 161 | HPEAD23 | 773409 | 171 | 188-469 | 434 | Ala-54 to Lys-59. | | |
| 162 | HPEBA84 | 753957 | 172 | 533-643 | 435 | | | |
| 163 | HPFCI36 | 855966 | 173 | 94-153 | 436 | | 10q23.31 | 157640, 174900, 236730, 600512 |
| 164 | HPFDI37 | 862056 | 174 | 38-91 | 437 | | 22q11.21 | 123620, 151410, 600850 |
| 165 | HPIAA80 | 829972 | 175 | 314-427 | 438 | | | |
| 166 | HPJCW58 | 612866 | 176 | 177-263 | 439 | Leu-16 to Gly-21. | | |
| 167 | HPMCV30 | 612870 | 177 | 52-195 | 440 | Leu-39 to His-47. | | |
| 168 | HPRBH85 | 695752 | 178 | 684-1088 | 441 | Glu-121 to Leu-126. | 3q21.1 | 106165, 117700, 117700, 150210, 169600, 180380, |
| | | | | | | | | 180380, 180380, 203500, 232050, 276902, 600882, |
| | | | | | | | | 601199, 601199, 601199, 601471, 601682 |
| 169 | HPRCD35 | 853551 | 179 | 265-372 | 442 | Asp-16 to Gln-27. | | |
| 170 | HPRCM72 | 813512 | 180 | 281-607 | 443 | Arg-76 to Lys-91. | | |
| 171 | HPTRE80 | 884167 | 181 | 102-665 | 444 | Gly-35 to Ser-40, | 22q13.33 | |
| | | | | | | Ser-61 to Arg-72, | | |
| | | | | | | Pro-148 to Arg-172. | | |
| 172 | HPTRI42 | 655362 | 182 | 266-481 | 445 | Pro-19 to Pro-26, | 11q13.1 | 106100, 133780, 601650 |
| | | | | | | Gly-33 to Ser-38, | | |
| | | | | | | Gly-45 to Tyr-52, | | |
| | | | | | | Ser-65 to Ser-71. | | |
| 173 | HPTRM02 | 812879 | 183 | 885-1127 | 446 | His-48 to Ser-61, | 7 | |
| | | | | | | Ala-66 to Val-72. | | |
| 174 | HPTRQ52 | 655363 | 184 | 224-325 | 447 | | 1p34 | 130500, 133200, 138140, 168360, 171760, 171760, |
| | | | | | | | | 176100, 176100, 178300, 230000, 255800 |
| 175 | HPTVI96 | 636064 | 185 | 271-291 | 448 | | 16p13.3 | 141750, 141800, 141800, 141800, 141800, 141850, |
| | | | | | | | | 141850, 141850, 141850, 141850, 156850, 186580, |
| | | | | | | | | 191092, 600140, 600273, 601313, 601785 |
| 176 | HPWBA29 | 561956 | 186 | 194-235 | 449 | | | |
| 177 | HRDAI17 | 560720 | 187 | 578-673 | 450 | | | |
| 178 | HRDDQ39 | 840405 | 188 | 215-355 | 451 | Gly-27 to Pro-35. | | |
| 179 | HRDEX93 | 816046 | 189 | 649-867 | 452 | | 1p34 | 130500, 133200, 138140, 168360, 171760, 171760, |
| | | | | | | | | 176100, 176100, 178300, 230000, 255800 |
| 180 | HRTAP63 | 780698 | 190 | 959-1087 | 453 | Asn-2 to Trp-13. | 2p23.3 | 176830, 176830, 182601, 229800, 602134 |
| 181 | HSAVW42 | 637660 | 191 | 129-197 | 454 | | 3p22.3 | 182280, 227646, 261510, 600163, 601154 |
| 182 | HSAWN53 | 634697 | 192 | 159-347 | 455 | Gln-42 to Ser-63. | | |
| 183 | HSAWZ40 | 634000 | 193 | 124-237 | 456 | | | |
| 184 | HSAYC41 | 688057 | 194 | 106-213 | 457 | Lys-23 to Lys-36. | 11q12.1 | 106100, 147050, 259700, 259770, 600045, 601884 |
| 185 | HSDBI90 | 853376 | 195 | 218-262 | 458 | | | |
| 186 | HSHAX04 | 812178 | 196 | 42-215 | 459 | | 1p32 | 120950, 120960, 138140, 178300, 187040, 600101, |
| | | | | | | | | 600650, 600650, 600722, 600722 |
| 187 | HSKDR27 | 580874 | 197 | 473-556 | 460 | Pro-18 to Gly-26. | 19p13.2 | 108725, 120700, 133171, 143890, 147670, 147670, |
| | | | | | | | | 147670, 151440, 164953, 231670, 600276, 600957, |
| | | | | | | | | 601843 |
| 188 | HSNBM34 | 635131 | 198 | 1508-1696 | 461 | Ala-17 to Thr-26, | 17p13- | 100710, 138190, 254210, 271900, 600179, 600977, |
| | | | | | | Gly-49 to Gln-62. | p11 | 601202, 601777 |
| 189 | HSRFD18 | 840771 | 199 | 67-153 | 462 | | | |
| 190 | HSSEF77 | 658725 | 200 | 184-366 | 463 | Arg-22 to Lys-27, | 2p12 | 147200, 178640, 216900 |
| | | | | | | Leu-30 to Asn-39. | | |
| 191 | HSSGJ58 | 747714 | 201 | 245-361 | 464 | Thr-14 to Gln-34. | | |
| 192 | HSVBD37 | 637110 | 202 | 146-166 | 465 | | 1p22-p21 | 102770, 120280, 120280, 166600, 170995, 191540, |
| | | | | | | | | 232400, 232400, 274270, 274270, 600309, 601414, |
| | | | | | | | | 601691, 601691, 601691, 601691, 601718, 602094 |
| 193 | HSYBI06 | 740766 | 203 | 232-333 | 466 | | | |
| 194 | HT4FV41 | 853400 | 204 | 39-452 | 467 | Ala-15 to Gln-22, | 19p13.3 | 108725, 120700, 133171, 136836, 145981, 147141, |
| | | | | | | Gly-36 to Gly-41, | | 164953, 188070, 600957, 601238, 601846, 602216, |
| | | | | | | Arg-47 to Pro-63, | | 602477 |
| | | | | | | Pro-85 to His-98. | | |
| 195 | HT5GR59 | 801930 | 205 | 135-230 | 468 | | 8p21.3 | 602629 |
| 196 | HTDAA78 | 566861 | 206 | 151-213 | 469 | Ala-5 to Leu-18. | 1q25.1 | 145001, 150292, 208250, 600995, 601652 |
| 197 | HTEAG62 | 812332 | 207 | 1017-1085 | 470 | | | |
| 198 | HTECB02 | 806305 | 208 | 196-366 | 471 | Ser-3 to Arg-9, Ser- | 14q32 | 123270, 245200, 251600, 270100, 276900 |
| | | | | | | 19 to Pro-28, Arg-34 | | |
| | | | | | | to Ala-43. | | |
| 199 | HTEDJ28 | 762845 | 209 | 287-424 | 472 | Thr-34 to Leu-41. | 8p22-q11 | 148370, 180100, 238600, 238600, 238600, 238600, |
| | | | | | | | | 600143, 601385, 602629 |
| 200 | HTEHU59 | 840385 | 210 | 170-274 | 473 | Ser-29 to Phe-34. | | |
| 201 | HTEJD29 | 695798 | 211 | 101-172 | 474 | | | |
| 202 | HTEKM46 | 862069 | 212 | 171-287 | 475 | | | |
| 203 | HTENR63 | 877952 | 213 | 132-302 | 476 | Pro-22 to Lys-28. | 4q24 | 157147, 248510 |
| 204 | HTGBK95 | 834490 | 214 | 271-321 | 477 | | | |
| 205 | HTGGM44 | 842856 | 215 | 179-433 | 478 | | 3q23 | 106165, 110100, 117700, 117700, 150210, 169600, |
| | | | | | | | | 180380, 180380, 180380, 203500, 276902, 601199, |
| | | | | | | | | 601199, 601199, 601682 |
| 206 | HTHBZ06 | 832477 | 216 | 318-323 | 479 | | 12q24.31 | 181405 |
| 207 | HTLBT80 | 840045 | 217 | 912-1301 | 480 | Ser-107 to Ser-116. | 20q11.21- | 102700, 102700, 602025 |
| | | | | | | | q13.11 | |
| 208 | HTLCX82 | 847091 | 218 | 46-273 | 481 | Glu-48 to Gly-60, | 22q11.21 | 123620, 151410, 600850 |
| | | | | | | Pro-68 to Trp-74. | | |
| 209 | HTLDU78 | 637702 | 219 | 219-245 | 482 | | | |
| 210 | HTLEV48 | 723799 | 220 | 205-825 | 483 | Met-1 to Arg-12, | 22q11.2- | 123620, 138720, 145410, 188826, 231950, 239500, |
| | | | | | | Thr-19 to Leu-27, | q12.1 | 275350, 600850, 601669 |
| | | | | | | Asp-72 to Val-79, | | |
| | | | | | | Arg-89 to Pro-94, | | |
| | | | | | | Lys-102 to Ser-111, | | |
| | | | | | | Glu-116 to Arg-122, | | |
| | | | | | | Lys-134 to Pro-142, | | |
| | | | | | | Ser-146 to Ser-151, | | |
| | | | | | | Gly-177 to Asp-196. | | |
| | HTLEV48 | 566786 | 259 | 91-120 | 522 | | | |
| 211 | HTLFA13 | 535937 | 221 | 209-304 | 484 | | | |
| 212 | HTLGI89 | 835069 | 222 | 1802-1915 | 485 | | | |
| 213 | HTNBK13 | 831967 | 223 | 534-599 | 486 | | 22q12 | 123620, 133450, 133450, 600850, 601669 |
| 214 | HTOAM11 | 664508 | 224 | 89-193 | 487 | | | |
| 215 | HTODH83 | 580884 | 225 | 103-201 | 488 | | | |
| 216 | HTODN35 | 570901 | 226 | 67-111 | 489 | | | |
| 217 | HTPCO75 | 853645 | 227 | 73-195 | 490 | | | |
| 218 | HTTCB60 | 853401 | 228 | 84-884 | 491 | Ser-83 to Asp-88, | | |
| | | | | | | Val-166 to Gly-181, | | |
| | | | | | | Pro-193 to Ala-199, | | |
| | | | | | | Glu-235 to Gln-250. | | |
| 219 | HTTDN24 | 766485 | 229 | 1024-1728 | 492 | Asp-194 to Leu-199, | 19q13.42 | |
| | | | | | | Ile-206 to Pro-211, | | |
| | | | | | | Glu-224 to Ser-229. | | |
| 220 | HTTEE41 | 840950 | 230 | 1171-1197 | 493 | | 12q15 | 181430, 600698, 600698, 600698, 600698, 600808, |
| | | | | | | | | 602116 |
| 221 | HTWEH94 | 561680 | 231 | 66-311 | 494 | | | |
| 222 | HTXDG92 | 658730 | 232 | 216-416 | 495 | | 17q11.2 | 154275, 162200, 162200, 182138, 239100, 600881, |
| | | | | | | | | 601954, 602403 |
| 223 | HTXET11 | 581521 | 233 | 178-267 | 496 | | | |
| 224 | HTXFA72 | 853410 | 234 | 192-281 | 497 | | | |
| 225 | HTXJD85 | 840391 | 235 | 211-306 | 498 | | | |
| 226 | HTXJY08 | 637774 | 236 | 108-158 | 499 | | | |
| 227 | HTXLT36 | 843477 | 237 | 189-230 | 500 | | 4p16 | 225500, 600593, 602363 |
| 228 | HUFCL31 | 801938 | 238 | 287-367 | 501 | | 9p21 | 108120, 112250, 247640, 600160, 600221, 601606 |
| 229 | HUKDF20 | 566823 | 239 | 214-315 | 502 | | | |
| 230 | HUSCJ14 | 894699 | 240 | 74-661 | 503 | Phe-166 to Arg-174, | | |
| | | | | | | Ser-191 to Tyr-196. | | |
| 231 | HUVDJ48 | 564853 | 241 | 196-213 | 504 | | | |
| 232 | HWBBU75 | 780360 | 242 | 783-938 | 505 | Ser-17 to Gly-22, | | |
| | | | | | | Leu-34 to Ala-42. | | |
| 233 | HWBCN36 | 722259 | 243 | 378-650 | 506 | Lys-45 to Pro-51, | | |
| | | | | | | Arg-80 to Arg-85. | | |
| 234 | HWBDJ08 | 762860 | 244 | 253-405 | 507 | Ser-30 to Gly-36. | | |
| 235 | HWLBO67 | 834315 | 245 | 42-161 | 508 | | | |
| 236 | HWLGP26 | 834770 | 246 | 1091-1306 | 509 | Pro-26 to Met-35. | 7p13 | 138079, 138079, 165240, 165240, 165240, 180104, |
| | | | | | | | | 203740, 219800, 261670, 601649 |
| 237 | HILCA24 | 869856 | 247 | 191-1174 | 510 | Gln-52 to Arg-57, | 5p15.2 | 123000, 602568 |
| | | | | | | Glu-74 to Leu-84, | | |
| | | | | | | Val-104 to Asp-110, | | |
| | | | | | | Gly-157 to Gly-163, | | |
| | | | | | | Asn-185 to Ser-195, | | |
| | | | | | | Arg-245 to Asp-250, | | |
| | | | | | | Pro-302 to Pro-310, | | |
| | | | | | | Thr-316 to Tyr-322. | | |
| | HILCA24 | 782450 | 260 | 189-1172 | 523 | Gln-52 to Arg-57, | | |
| | | | | | | Glu-74 to Leu-84, | | |
| | | | | | | Val-104 to Asp-110, | | |
| | | | | | | Gly-157 to Gly-163, | | |
| | | | | | | Asn-185 to Ser-195, | | |
| | | | | | | Arg-245 to Asp-250, | | |
| | | | | | | Pro-302 to Pro-310, | | |
| | | | | | | Thr-316 to Tyr-322. | | |
| 238 | HYABC84 | 865064 | 248 | 1080-1268 | 511 | Pro-3 to Ala-8. | 20q11.22 | |
| | HYABC84 | 789854 | 261 | 1015-1203 | 524 | Pro-3 to Ala-8. | | |
| 239 | HPWTF23 | 844775 | 249 | 283-675 | 512 | Val-80 to Leu-92, | | |
| | | | | | | Ser-98 to Lys-104, | | |
| | | | | | | Pro-111 to Pro-122. | | |
| | HPWTF23 | 843700 | 262 | 283-675 | 525 | Val-80 to Leu-92, | | |
| | | | | | | Ser-98 to Lys-104, | | |
| | | | | | | Pro-111 to Pro-122. | | |
| 240 | HLWAU42 | 695737 | 250 | 220-393 | 513 | | | |
| | HLWAU42 | 840855 | 263 | 1751-1924 | 526 | | | |
| 241 | HGCAC19 | 851527 | 251 | 317-346 | 514 | | 14q24.3 | 104311, 109150, 182600, 245200, 601208 |
| | HGCAC19 | 842540 | 264 | 315-344 | 527 | | | |
| | HGCAC19 | 801999 | 265 | 317-346 | 528 | | | |
| 242 | HEQBJ01 | 876546 | 252 | 2603-2662 | 515 | | | |
| | HEQBJ01 | 861786 | 266 | 2603-2662 | 529 | | | |
| | HEQBJ01 | 834633 | 267 | 505-564 | 530 | | | |
| 243 | HBJHT01 | 587262 | 253 | 200-265 | 516 | | | |
| | HBJHT01 | 580026 | 268 | 193-336 | 531 | | | |
| 244 | HE8FD92 | 901142 | 254 | 2141-2272 | 517 | | | |
| | HE8FD92 | 888274 | 269 | 157-288 | 532 | | | |
| | HE8FD92 | 869847 | 270 | 2268-2399 | 533 | | | |
| | HE8FD92 | 856544 | 271 | 2-1414 | 534 | Asp-11 to Tyr-16. | | |
| | HE8FD92 | 843825 | 272 | 1074-1205 | 535 | | | |
| 245 | HBDAB91 | 864374 | 255 | 671-760 | 518 | Lys-21 to Gln-29. | | |
| | HBDAB91 | 789532 | 273 | 351-440 | 536 | Lys-21 to Gln-29. | | |

[0086] TABLE 1B.2

| Gene | cDNA | | | Tissue DistributionLibrary Code: Count |
|---|---|---|---|---|
| No: | Clone ID | Contig ID: | SEQ ID NO: X | (see Table 4 for Library Codes) |
| 1 | H6EDM64 | 841331 | 11 | AR277: 22, AR060: 22, AR055: 21, AR283: 18, AR282: 18, AR104: 16, AR185: 16, AR089: 16, AR299: 16, AR219: 14, AR240: 14, |
| | | | | AR316: 13, AR096: 12, AR218: 12, AR039: 11, AR300: 11, AR313: 11, H0333: 6, H0556: 5, H0255: 5, H0618: 4, L0783: 4, S0358: 3, |
| | | | | H0549: 3, S0222: 3, H0318: 3, H0052: 3, H0553: 3, H0135: 3, L0769: 3, L3905: 3, H0547: 3, H0521: 3, H0555: 3, H0423: 3, H0716: 2, |
| | | | | H0341: 2, H0402: 2, H0592: 2, H0253: 2, S0474: 2, H0620: 2, H0181: 2, H0617: 2, H0059: 2, L0761: 2, L0764: 2, L0809: 2, L5622: 2, |
| | | | | H0520: 2, H0682: 2, S0330: 2, H0436: 2, L0751: 2, L0747: 2, L0750: 2, L0755: 2, S0436: 2, L0596: 2, L0601: 2, H0624: 1, H0686: 1, |
| | | | | H0295: 1, T0049: 1, H0657: 1, H0656: 1, H0484: 1, H0483: 1, S0356: 1, S0442: 1, S0354: 1, S0360: 1, S0410: 1, H0729: 1, H0742: 1, |
| | | | | S0045: 1, S0476: 1, H0619: 1, S0300: 1, L0717: 1, S0220: 1, H0370: 1, H0455: 1, H0586: 1, H0587: 1, H0559: 1, L0623: 1, T0082: 1, |
| | | | | H0581: 1, H0183: 1, H0205: 1, H0327: 1, H0050: 1, H0687: 1, H0615: 1, T0006: 1, H0424: 1, H0213: 1, H0606: 1, H0166: 1, S0366: 1, |
| | | | | H0090: 1, H0087: 1, H0264: 1, H0488: 1, H0413: 1, H0100: 1, H0625: 1, H0561: 1, H0130: 1, H0633: 1, H0647: 1, S0426: 1, H0529: 1, |
| | | | | L0371: 1, L0796: 1, L0637: 1, L5566: 1, L0648: 1, L0364: 1, L0649: 1, L0774: 1, L0375: 1, L0378: 1, L0659: 1, L0636: 1, L5623: 1, |
| | | | | L4501: 1, L0663: 1, H0693: 1, H0593: 1, S0126: 1, H0522: 1, S0027: 1, S0028: 1, L0740: 1, L0780: 1, L0758: 1, H0445: 1, S0011: 1, H0136: 1, S0196: 1 |
| | | | | and H0352: 1. |
| 2 | H6EEU40 | 757048 | 12 | AR277: 63, AR283: 52, AR219: 45, AR282: 44, AR104: 43, AR218: 41, AR316: 39, AR089: 37, AR313: 37, AR299: 35, AR055: 33, |
| | | | | AR240: 33, AR096: 30, AR185: 29, AR300: 28, AR039: 27, AR060: 27, L0741: 8, H0677: 7, L0439: 6, H0052: 5, H0494: 5, L0747: 5, |
| | | | | S0007: 4, H0543: 4, H0009: 3, L0771: 3, L0775: 3, L0663: 3, L0665: 3, L0438: 3, H0547: 3, H0521: 3, H0436: 3, L0742: 3, L0748: 3, |
| | | | | L0751: 3, S0436: 3, H0556: 2, H0255: 2, S0420: 2, S0358: 2, S0046: 2, L0717: 2, S0222: 2, H0333: 2, H0559: 2, H0318: 2, H0581: 2, |
| | | | | H0545: 2, H0620: 2, H0024: 2, H0266: 2, H0617: 2, H0529: 2, L0662: 2, L0653: 2, L0659: 2, L0809: 2, L0664: 2, H0690: 2, H0555: 2, |
| | | | | L0743: 2, L0755: 2, L0757: 2, L0759: 2, L0588: 2, H0352: 2, H0624: 1, H0685: 1, H0740: 1, H0295: 1, S0134: 1, H0583: 1, H0656: 1, |
| | | | | H0341: 1, S0212: 1, H0484: 1, L3659: 1, S0418: 1, S0356: 1, S0442: 1, S0410: 1, H0729: 1, H0735: 1, H0339: 1, H0619: 1, S0278: 1, |
| | | | | H0257: 1, H0069: 1, H0744: 1, H0327: 1, H0023: 1, S0051: 1, T0010: 1, H0031: 1, H0181: 1, H0032: 1, H0169: 1, S0364: 1, H0135: 1, |
| | | | | H0163: 1, H0090: 1, H0063: 1, H0087: 1, H0551: 1, H0264: 1, H0488: 1, H0623: 1, H0100: 1, S0438: 1, S0440: 1, L0369: 1, L0770: 1, |
| | | | | L0769: 1, L5565: 1, L0761: 1, L0667: 1, L0772: 1, L0641: 1, L0644: 1, L0764: 1, L0773: 1, L0363: 1, L0768: 1, L0794: 1, L0766: 1, |
| | | | | L0381: 1, L0803: 1, L0774: 1, L0375: 1, L0806: 1, L0512: 1, L0517: 1, L0666: 1, H0144: 1, H0702: 1, S0148: 1, L0352: 1, H0519: 1, |
| | | | | H0593: 1, H0435: 1, H0658: 1, H0539: 1, S0406: 1, H0478: 1, H0631: 1, S0028: 1, S0206: 1, L0744: 1, L0740: 1, L0745: 1, L0749: 1, L0750: 1, L0758: 1, |
| | | | | H0445: 1, S0434: 1, L0594: 1, S0194: 1, H0542: 1 and H0423: 1. |
| 3 | HACBJ56 | 847112 | 13 | AR251: 7, AR310: 6, AR265: 6, AR053: 6, AR060: 6, AR182: 6, AR055: 6, AR312: 5, AR309: 5, AR273: 5, AR282: 5, AR061: 5, |
| | | | | AR206: 5, AR241: 5, AR194: 5, AR186: 5, AR270: 4, AR213: 4, AR052: 4, AR266: 4, AR218: 4, AR089: 4, AR274: 4, AR253: 4, |
| | | | | AR269: 4, AR291: 4, AR248: 4, AR296: 4, AR183: 4, AR240: 4, AR104: 4, AR293: 4, AR205: 4, AR284: 4, AR289: 3, AR313: 3, |
| | | | | AR184: 3, AR299: 3, AR247: 3, AR185: 3, AR316: 3, AR231: 3, AR298: 3, AR033: 3, AR243: 3, AR268: 3, AR290: 3, AR283: 3, |
| | | | | AR295: 3, AR300: 3, AR246: 3, AR277: 3, AR232: 3, AR175: 3, AR096: 3, AR219: 3, AR177: 3, AR234: 3, AR233: 3, AR275: 3, |
| | | | | AR237: 3, AR238: 3, AR285: 3, AR227: 3, AR202: 3, AR263: 3, AR292: 3, AR204: 2, AR286: 2, AR314: 2, AR267: 2, AR280: 2, |
| | | | | AR229: 2, AR258: 2, AR039: 2, AR294: 2, AR256: 2, AR259: 2, AR281: 1, AR315: 1, AR226: 1, AR244: 1, AR249: 1, H0661: 1, |
| | | | | S0045: 1, H0550: 1, S0280: 1, S0010: 1, H0028: 1, L0764: 1, L0803: 1, L0805: 1, L0665: 1, S0053: 1, H0670: 1, L0748: 1, L0731: 1 and |
| | | | | L0581: 1. |
| 4 | HACBS22 | 847113 | 14 | L0439: 9, L0751: 7, L0766: 6, L0361: 6, H0052: 5, S0002: 5, L0769: 5, L0777: 5, L0770: 4, L0771: 4, L0748: 4, L0754: 4, L0758: 4, |
| | | | | L0759: 4, L0596: 4, S0474: 3, S0051: 3, S0142: 3, L0662: 3, L0747: 3, H0170: 2, H0580: 2, S0046: 2, H0619: 2, L0717: 2, H0550: 2, |
| | | | | S0280: 2, H0039: 2, S0422: 2, L0794: 2, L0775: 2, L0805: 2, L0655: 2, L5623: 2, L0666: 2, L0665: 2, L0438: 2, H0539: 2, L0742: 2, |
| | | | | L0749: 2, L0779: 2, L0731: 2, L0757: 2, L0581: 2, H0171: 1, H0265: 1, H0556: 1, H0686: 1, S0040: 1, H0650: 1, H0661: 1, H0663: 1, |
| | | | | H0306: 1, S0420: 1, S0356: 1, S0442: 1, S0354: 1, L3646: 1, H0637: 1, S0222: 1, H0431: 1, H0586: 1, H0492: 1, H0486: 1, L3655: 1, |
| | | | | H0156: 1, H0042: 1, H0253: 1, H0545: 1, H0563: 1, H0123: 1, H0014: 1, H0622: 1, T0023: 1, H0033: 1, H0213: 1, H0135: 1, H0038: 1, |
| | | | | H0063: 1, S0038: 1, T0042: 1, H0560: 1, H0561: 1, S0372: 1, S0450: 1, S0344: 1, H0538: 1, S0426: 1, L0762: 1, L0637: 1, L3905: 1, |
| | | | | L5566: 1, L0643: 1, L0650: 1, L0774: 1, L0375: 1, L0776: 1, L0807: 1, L0663: 1, L2263: 1, L3824: 1, S0126: 1, H0689: 1, H0658: 1, |
| | | | | H0754: 1, S0174: 1, S0406: 1, L0743: 1, S0031: 1, S0436: 1, H0668: 1, L3378: 1 and H0506: 1. |
| 5 | HACBT91 | 789939 | 15 | AR283: 41, AR219: 39, AR277: 38, AR218: 33, AR055: 29, AR316: 28, AR039: 25, AR104: 22, AR299: 22, AR096: 20, AR089: 20, |
| | | | | AR185: 19, AR240: 19, AR282: 18, AR060: 17, AR300: 16, AR313: 16, L0665: 5, L0743: 3, H0341: 2, L0761: 2, L0756: 2, S0356: 1, |
| | | | | H0734: 1, S0280: 1, T0048: 1, H0271: 1, S0440: 1, H0641: 1, H0646: 1, L0770: 1, L0637: 1, L0800: 1, L0773: 1, L0648: 1, L0662: 1, |
| | | | | L0768: 1, L0766: 1, L0649: 1, L0375: 1, L0784: 1, L0806: 1, L0655: 1, L0809: 1, H0672: 1, S0406: 1, L0747: 1, L0749: 1 and L0750: 1. |
| 6 | HADDJ13 | 827273 | 16 | H0427: 1 |
| 7 | HADMA77 | 783049 | 17 | AR104: 16, AR039: 10, AR277: 9, AR089: 9, AR240: 9, AR055: 9, AR300: 8, AR218: 7, AR299: 7, AR283: 7, AR060: 7, AR282: 7, |
| | | | | AR316: 6, AR219: 6, AR096: 5, AR185: 5, AR313: 4, L0439: 15, S0222: 4, L0157: 4, L0769: 4, L0438: 3, L0745: 3, L0731: 3, |
| | | | | L0758: 3, L0599: 3, H0443: 2, H0441: 2, S0010: 2, L0662: 2, L0744: 2, L0748: 2, L0750: 2, L0756: 2, L0777: 2, H0583: 1, L0005: 1, |
| | | | | S0354: 1, H0675: 1, S0408: 1, H0619: 1, H0369: 1, H0574: 1, H0486: 1, H0390: 1, S0346: 1, H0309: 1, H0597: 1, T0003: 1, H0024: 1, |
| | | | | S6028: 1, H0028: 1, T0006: 1, H0628: 1, H0135: 1, H0551: 1, S0438: 1, L0520: 1, L0768: 1, L0776: 1, L0559: 1, L0659: 1, L0384: 1, |
| | | | | L0809: 1, H0144: 1, H0547: 1, L0746: 1, L0747: 1, L0757: 1 and S0434: 1. |
| 8 | HADMB15 | 847116 | 18 | AR104: 19, AR218: 19, AR219: 16, AR089: 11, AR313: 8, AR055: 8, AR060: 7, AR299: 6, AR282: 5, AR300: 5, AR039: 5, AR240: 5, |
| | | | | AR316: 5, AR185: 5, AR277: 4, AR283: 4, AR096: 3, L0595: 2, L0442: 1, L0005: 1, L3653: 1, H0390: 1, H0081: 1, H0024: 1, |
| | | | | L0770: 1, L5566: 1, L0651: 1, L0565: 1, L0439: 1, L0747: 1, L0752: 1, H0445: 1, L0592: 1 and L0599: 1. |
| 9 | HAGBQ12 | 722205 | 19 | AR060: 7, AR055: 6, AR104: 5, AR185: 5, AR089: 4, AR299: 4, AR277: 4, AR300: 4, AR283: 4, AR313: 3, AR316: 3, AR240: 3, |
| | | | | AR039: 3, AR096: 3, AR282: 2, AR218: 2, AR219: 1, L0754: 4, L0805: 2, L0777: 2, L0755: 2, S0010: 1, H0049: 1, L0163: 1, L0771: 1, |
| | | | | L0775: 1 and L0776: 1. |
| 10 | HAGCC87 | 638587 | 20 | AR313: 17, AR039: 14, AR277: 10, AR104: 10, AR089: 9, AR300: 9, AR096: 9, AR299: 8, AR185: 7, AR055: 6, AR060: 6, AR218: 6, |
| | | | | AR240: 6, AR316: 6, AR282: 4, AR283: 4, AR219: 3, L0439: 4, L0519: 3, S0010: 2, T0010: 1, L0809: 1, H0682: 1, S0404: 1, S0406: 1, |
| | | | | H0436: 1 and L0756: 1. |
| 11 | HAGFJ67 | 861680 | 21 | AR219: 15, AR218: 14, AR104: 10, AR060: 9, AR089: 9, AR055: 8, AR299: 8, AR240: 7, AR096: 7, AR039: 7, AR300: 7, AR185: 7, |
| | | | | AR316: 6, AR282: 6, AR283: 6, AR313: 6, AR277: 3, L0777: 6, L0749: 5, L0804: 3, L0439: 3, L0754: 3, L0766: 2, L0788: 2, L0438: 2, |
| | | | | L0747: 2, H0265: 1, H0455: 1, S0010: 1, L0655: 1, L0666: 1, S0053: 1, S0374: 1, L0352: 1, L0751: 1, L0756: 1, L0755: 1, L0731: 1, |
| | | | | L0757: 1, L0758: 1, L0759: 1, L0599: 1 and L0604: 1. |
| 12 | HAGFS57 | 847120 | 22 | AR055: 7, AR104: 6, AR060: 5, AR277: 4, AR300: 3, AR299: 3, AR096: 3, AR316: 3, AR039: 2, AR185: 2, AR089: 2, AR283: 2, |
| | | | | AR218: 2, AR219: 1, AR313: 1, AR240: 1, L0438: 6, L0439: 4, S0360: 3, S0422: 3, H0547: 3, L0747: 3, L0005: 2, S0222: 2, S0002: 2, |
| | | | | L0664: 2, L0754: 2, S0434: 2, H0506: 2, H0170: 1, H0171: 1, S0116: 1, S0212: 1, H0580: 1, H0749: 1, H0455: 1, L3655: 1, H0069: 1, |
| | | | | H0098: 1, S0010: 1, L0105: 1, H0581: 1, H0263: 1, H0009: 1, L0471: 1, H0099: 1, S0003: 1, H0039: 1, S0036: 1, H0090: 1, H0591: 1, |
| | | | | S0426: 1, L0794: 1, L0776: 1, L5622: 1, S0052: 1, H0144: 1, H0682: 1, H0659: 1, H0521: 1, H0555: 1, L0756: 1, H0445: 1 and |
| | | | | S0452: 1. |
| 13 | HAGHN57 | 773286 | 23 | AR313: 12, AR316: 11, AR218: 11, AR185: 11, AR039: 10, AR219: 10, AR299: 10, AR060: 9, AR055: 8, AR277: 8, AR282: 8, |
| | | | | AR096: 7, AR089: 7, AR300: 7, AR240: 6, AR104: 6, AR283: 4, H0521: 5, L0777: 5, S0376: 4, H0733: 3, H0156: 3, H0519: 3, |
| | | | | H0436: 3, L0731: 3, H0656: 2, H0580: 2, H0747: 2, L3816: 2, H0036: 2, L0471: 2, H0090: 2, H0040: 2, H0551: 2, H0494: 2, S0438: 2, |
| | | | | S0440: 2, H0529: 2, L0809: 2, H0144: 2, S0374: 2, H0593: 2, H0170: 1, L3643: 1, H0583: 1, H0650: 1, S0418: 1, S0358: 1, S0444: 1, |
| | | | | L3645: 1, H0741: 1, H0734: 1, S0045: 1, S0476: 1, H0619: 1, H0586: 1, H0643: 1, H0632: 1, H0486: 1, S0280: 1, H0590: 1, S0010: 1, |
| | | | | S0346: 1, H0581: 1, H0231: 1, H0046: 1, H0123: 1, S6028: 1, H0687: 1, S0003: 1, S0214: 1, H0252: 1, H0615: 1, H0212: 1, L0455: 1, |
| | | | | S0366: 1, H0163: 1, H0038: 1, H0634: 1, T0067: 1, L0475: 1, H0560: 1, H0561: 1, S0464: 1, H0646: 1, S0426: 1, H0026: 1, L0790: 1, |
| | | | | H0520: 1, H0435: 1, S0328: 1, H0539: 1, H0704: 1, S0027: 1, L0439: 1, L0750: 1, L0756: 1, L0757: 1, S0434: 1, L0581: 1, L0595: 1, |
| | | | | H0543: 1 and H0423: 1. |
| 14 | HAGHR18 | 655435 | 24 | AR052: 6, AR055: 6, AR247: 6, AR061: 6, AR053: 6, AR060: 5, AR182: 5, AR263: 5, AR310: 5, AR312: 4, AR251: 4, AR033: 4, |
| | | | | AR244: 4, AR293: 4, AR282: 4, AR269: 3, AR185: 3, AR270: 3, AR298: 3, AR089: 3, AR253: 3, AR296: 3, AR104: 3, AR232: 3, |
| | | | | AR299: 3, AR285: 3, AR198: 3, AR286: 3, AR184: 3, AR237: 3, AR277: 3, AR295: 3, AR300: 3, AR213: 3, AR284: 2, AR283: 2, |
| | | | | AR267: 2, AR266: 2, AR290: 2, AR268: 2, AR289: 2, AR313: 2, AR316: 2, AR294: 2, AR186: 2, AR096: 2, AR183: 2, AR233: 2, |
| | | | | AR240: 2, AR229: 2, AR218: 2, AR177: 2, AR259: 2, AR246: 2, AR248: 2, AR175: 2, AR292: 2, AR309: 2, AR265: 2, AR226: 1, |
| | | | | AR039: 1, AR234: 1, AR179: 1, AR258: 1, AR219: 1, AR231: 1, AR238: 1, L0717: 1 and S0346: 1. |
| 15 | HAJAA47 | 534670 | 25 | H0560: 1, H0561: 1 and H0542: 1. |
| 16 | HAJAY92 | 845601 | 26 | AR060: 184, AR055: 136, AR185: 131, AR299: 118, AR283: 100, AR300: 99, AR277: 94, AR089: 94, AR104: 84, AR282: 79, |
| | | | | AR039: 68, AR316: 65, AR240: 60, AR096: 54, AR218: 35, AR219: 33, AR313: 33, H0561: 1 and L0758: 1. |
| 17 | HAJBV67 | 866415 | 27 | AR039: 11, AR219: 10, AR316: 9, AR218: 9, AR089: 9, AR270: 8, AR282: 8, AR283: 8, AR269: 8, AR248: 7, AR299: 7, AR183: 7, |
| | | | | AR309: 7, AR277: 7, AR096: 7, AR104: 7, AR313: 7, AR281: 7, AR265: 6, AR249: 6, AR253: 6, AR315: 6, AR300: 6, AR290: 6, |
| | | | | AR292: 6, AR202: 6, AR312: 6, AR280: 6, AR175: 6, AR231: 5, AR182: 5, AR185: 5, AR268: 5, AR060: 5, AR294: 5, AR194: 5, |
| | | | | AR238: 5, AR247: 4, AR243: 4, AR053: 4, AR267: 4, AR295: 4, AR291: 4, AR055: 4, AR285: 4, AR213: 4, AR052: 4, AR184: 4, |
| | | | | AR293: 4, AR296: 3, AR240: 3, AR033: 3, AR310: 3, AR314: 3, AR275: 3, AR246: 3, AR205: 3, AR286: 3, AR271: 3, AR234: 3, |
| | | | | AR192: 3, AR298: 3, AR263: 3, AR232: 3, AR256: 3, AR251: 3, AR259: 2, AR284: 2, AR229: 2, AR289: 2, AR226: 2, AR274: 2, |
| | | | | AR237: 2, AR258: 2, AR179: 2, AR177: 2, AR233: 2, AR273: 2, AR227: 2, AR204: 2, AR186: 1, AR061: 1, AR241: 1, L0754: 9, |
| | | | | S0444: 6, S0442: 5, S0358: 5, H0622: 5, H0624: 4, H0040: 4, L0659: 4, H0144: 4, H0521: 4, H0171: 3, L3499: 3, L2630: 3, H0046: 3, |
| | | | | H0658: 3, H0555: 3, H0436: 3, L0758: 3, S0434: 3, H0543: 3, S0418: 2, S0360: 2, S0222: 2, L2499: 2, H0013: 2, H0156: 2, H0575: 2, |
| | | | | H0615: 2, H0674: 2, H0616: 2, H0551: 2, H0412: 2, H0623: 2, S0440: 2, H0647: 2, S0422: 2, H0529: 2, L0666: 2, L2263: 2, S0374: 2, |
| | | | | S0380: 2, S0146: 2, L0740: 2, L0731: 2, L0759: 2, S0436: 2, L0362: 2, H0556: 1, L3644: 1, S0114: 1, T0049: 1, L0002: 1, L2910: 1, |
| | | | | S0282: 1, L2300: 1, S0356: 1, S0354: 1, S0408: 1, S0410: 1, L3709: 1, H0637: 1, H0742: 1, H0722: 1, S0046: 1, S0132: 1, S0300: 1, |
| | | | | L2744: 1, L0717: 1, H0411: 1, H0431: 1, H0586: 1, H0587: 1, L2491: 1, L2647: 1, H0036: 1, H0004: 1, S0010: 1, H0318: 1, H0581: 1, |
| | | | | H0251: 1, H0596: 1, L0471: 1, H0024: 1, H0014: 1, H0375: 1, H0266: 1, S0003: 1, S0214: 1, H0688: 1, T0023: 1, H0553: 1, L0055: 1, |
| | | | | H0032: 1, S0036: 1, H0090: 1, H0591: 1, H0038: 1, T0067: 1, H0477: 1, H0488: 1, H0059: 1, H0561: 1, L0369: 1, L3905: 1, L0662: 1, |
| | | | | L0766: 1, L0388: 1, L0774: 1, L0775: 1, L0606: 1, L0661: 1, L0526: 1, L0809: 1, L0665: 1, L2653: 1, L3665: 1, L3811: 1, H0519: 1, |
| | | | | S0126: 1, H0683: 1, H0684: 1, H0659: 1, H0672: 1, H0710: 1, H0522: 1, S3014: 1, S0028: 1, L0752: 1, H0595: 1, S0394: 1, L0596: 1, |
| | | | | L0589: 1, L0485: 1, L0595: 1, H0667: 1, S0242: 1, S0194: 1, H0423: 1, H0422: 1, S0384: 1, H0506: 1 and H0352: 1. |
| 18 | HAQBG57 | 837545 | 28 | H0295: 6, H0255: 2, H0392: 1, H0587: 1, H0333: 1, H0545: 1, H0328: 1, H0616: 1, S0142: 1, H0529: 1, L0659: 1, L0783: 1, L0528: 1, |
| | | | | H0547: 1, S0136: 1, S0390: 1, L0754: 1, L0747: 1 and L0752: 1. |
| 19 | HARAE26 | 560598 | 29 | AR283: 497, AR055: 181, AR218: 59, AR219: 57, AR277: 46, AR316: 43, AR240: 38, AR096: 37, AR104: 36, AR313: 35, |
| | | | | AR039: 35, AR089: 34, AR282: 30, AR185: 28, AR299: 26, AR060: 23, AR300: 23, T0082: 1 |
| 20 | HATCD80 | 826098 | 30 | AR316: 50, AR055: 4, AR277: 3, AR060: 3, AR300: 3, AR282: 3, AR283: 2, AR218: 2, AR039: 1, AR104: 1, AR089: 1, AR240: 1, |
| | | | | AR299: 1, AR185: 1, H0156: 1 and H0038: 1. |
| 21 | HBAGD86 | 838799 | 31 | AR219: 7, AR218: 4, AR313: 4, AR104: 4, AR039: 3, AR299: 3, AR282: 2, AR300: 2, AR096: 2, AR316: 2, AR277: 1, AR240: 1, |
| | | | | AR089: 1, L0809: 4, L0766: 3, L0439: 3, H0624: 2, H0411: 2, L0794: 2, L0749: 2, L0756: 2, L0005: 1, L3649: 1, S0476: 1, H0599: 1, |
| | | | | L0471: 1, S0051: 1, T0010: 1, H0266: 1, S0150: 1, S0422: 1, L0637: 1, L0765: 1, L0803: 1, L0783: 1, L5622: 1, H0144: 1, H0672: 1, |
| | | | | S0392: 1, L0748: 1, L0754: 1, L0779: 1, L0777: 1, L0731: 1 and L0759: 1. |
| 22 | HBGBC29 | 691473 | 32 | AR299: 5, AR218: 5, AR313: 4, AR300: 4, AR055: 4, AR060: 4, AR277: 3, AR316: 3, AR089: 3, AR185: 3, AR096: 3, AR039: 3, |
| | | | | AR219: 3, AR104: 3, AR240: 3, AR282: 2, AR283: 2, L0731: 20, L0747: 7, L0794: 6, L0764: 4, L0803: 4, L0759: 4, L0662: 3, |
| | | | | L0774: 3, L0749: 3, L0756: 3, S0436: 3, S0360: 2, H0156: 2, H0046: 2, H0181: 2, L0766: 2, L0659: 2, L0809: 2, L0438: 2, S0126: 2, |
| | | | | H0658: 2, L0439: 2, L0754: 2, L0777: 2, L0755: 2, L0757: 2, L0604: 2, S0242: 2, S0442: 1, S0376: 1, S0408: 1, L0717: 1, H0270: 1, |
| | | | | H0263: 1, H0597: 1, H0123: 1, H0617: 1, H0551: 1, S0440: 1, H0647: 1, L0770: 1, L0769: 1, L0638: 1, L0775: 1, L0651: 1, L0527: 1, |
| | | | | L0526: 1, L0789: 1, L0666: 1, L0665: 1, H0547: 1, H0435: 1, H0648: 1, S0330: 1, S0406: 1, H0627: 1, L0750: 1, L0780: 1, L0752: 1, |
| | | | | L0758: 1, L0366: 1 and H0293: 1. |
| 23 | HBHAA05 | 603174 | 33 | AR313: 74, AR039: 45, AR299: 34, AR089: 33, AR185: 31, AR277: 29, AR096: 26, AR300: 26, AR240: 22, AR316: 20, AR218: 17, |
| | | | | AR060: 15, AR219: 14, AR104: 14, AR282: 11, AR055: 9, AR283: 6, S0029: 1 |
| 24 | HBHAA81 | 846465 | 34 | AR289: 34, AR291: 33, AR283: 32, AR055: 32, AR294: 26, AR266: 26, AR286: 26, AR256: 23, AR285: 21, AR293: 19, AR259: 17, |
| | | | | AR295: 16, AR292: 15, AR298: 14, AR258: 14, AR296: 12, AR284: 11, AR104: 10, AR033: 9, AR186: 9, AR202: 7, AR206: 7, |
| | | | | AR246: 7, AR204: 7, AR241: 6, AR194: 5, AR198: 4, AR244: 4, AR251: 4, AR060: 4, AR061: 4, AR282: 4, AR052: 4, AR053: 4, |
| | | | | AR205: 4, AR309: 4, AR316: 3, AR182: 3, AR312: 3, AR192: 3, AR273: 3, AR229: 3, AR183: 3, AR310: 3, AR271: 3, AR213: 3, |
| | | | | AR248: 3, AR270: 3, AR277: 2, AR185: 2, AR275: 2, AR299: 2, AR269: 2, AR300: 2, AR247: 2, AR267: 2, AR175: 2, AR089: 2, |
| | | | | AR313: 2, AR265: 2, AR268: 2, AR237: 2, AR096: 1, AR232: 1, AR039: 1, AR240: 1, AR179: 1, AR231: 1, AR234: 1, H0599: 8, |
| | | | | S0366: 7, L0485: 6, H0733: 5, H0734: 5, L0769: 5, H0735: 4, H0729: 3, H0728: 3, H0619: 2, H0706: 2, L0661: 2, L0756: 2, L0759: 2, |
| | | | | S0282: 1, S0029: 1, S0222: 1, L0622: 1, H0122: 1, S0010: 1, H0196: 1, H0012: 1, H0200: 1, H0373: 1, S6028: 1, S0364: 1, S0036: 1, |
| | | | | S0294: 1, L0770: 1, L0638: 1, L5565: 1, L0657: 1, L0809: 1, L0789: 1, L0791: 1, L0438: 1, L0439: 1, L0750: 1, L0777: 1, S0260: 1, L0604: 1 and |
| | | | | S0460: 1. |
| 25 | HBJAB02 | 837309 | 35 | AR282: 3, AR277: 1, AR039: 1, AR316: 1, S0434: 5, L0794: 3, H0255: 2, H0318: 2, H0251: 2, L0764: 2, L0628: 2, L0809: 2, L0665: 2, |
| | | | | H0658: 2, S0406: 2, L0361: 2, H0265: 1, H0685: 1, H0657: 1, H0483: 1, S0420: 1, S0442: 1, S0358: 1, H0729: 1, H0734: 1, S0132: 1, |
| | | | | S0222: 1, T0082: 1, H0150: 1, H0083: 1, S0214: 1, H0252: 1, H0628: 1, T0041: 1, S0344: 1, H0529: 1, L0520: 1, L0535: 1, L0662: 1, |
| | | | | L0387: 1, L0375: 1, L0518: 1, L0666: 1, L0663: 1, H0726: 1, H0519: 1, H0670: 1, H0660: 1, L0602: 1, L0747: 1, L0777: 1, L0601: 1, |
| | | | | S0276: 1, H0423: 1 and H0422: 1. |
| 26 | HBJAC40 | 841235 | 36 | AR104: 23, AR060: 6, AR055: 6, AR283: 5, AR185: 5, AR282: 4, AR313: 4, AR299: 4, AR316: 4, AR277: 3, AR096: 3, AR240: 3, |
| | | | | AR219: 2, AR089: 2, AR300: 2, AR039: 2, AR218: 2, L0439: 18, H0052: 12, L0741: 8, L0438: 6, S0051: 5, H0556: 4, L0769: 4, |
| | | | | L0774: 4, S0474: 3, H0622: 3, S0036: 3, L3905: 3, H0261: 2, H0318: 2, H0194: 2, L0471: 2, H0538: 2, L0749: 2, L0757: 2, L0758: 2, |
| | | | | S0436: 2, L0593: 2, H0624: 1, H0265: 1, S0342: 1, H0717: 1, H0650: 1, H0657: 1, S0212: 1, S0282: 1, H0730: 1, S0045: 1, S0476: 1, |
| | | | | H0619: 1, S0222: 1, H0455: 1, H0559: 1, H0075: 1, H0253: 1, H0251: 1, H0544: 1, L0158: 1, H0012: 1, S0050: 1, L0163: 1, H0083: 1, |
| | | | | H0594: 1, H0615: 1, T0006: 1, H0708: 1, H0087: 1, H0056: 1, S0038: 1, H0494: 1, S0450: 1, S0144: 1, L0770: 1, L4747: 1, L0639: 1, |
| | | | | L0761: 1, L0775: 1, L0805: 1, L0635: 1, L5622: 1, L0788: 1, S0428: 1, S0044: 1, L0612: 1, L0742: 1, L0748: 1, L0779: 1, L0777: 1, |
| | | | | S0011: 1 and H0136: 1. |
| 27 | HBJCR46 | 815649 | 37 | L0794: 11, L0803: 10, L0779: 10, H0038: 9, L0777: 9, L0758: 9, S0358: 6, L0809: 5, S0408: 4, H0616: 4, L0748: 4, L0439: 4, |
| | | | | L0591: 4, S0282: 3, L0789: 3, L0666: 3, L0438: 3, L0756: 3, H0036: 2, H0196: 2, H0046: 2, H0154: 2, L0163: 2, H0213: 2, S0036: 2, |
| | | | | L0804: 2, L0774: 2, L0655: 2, L0656: 2, S0374: 2, S0126: 2, S0328: 2, S0152: 2, H0521: 2, S0406: 2, L0731: 2, L0588: 2, L0485: 2, |
| | | | | S0026: 2, H0543: 2, H0170: 1, H0171: 1, H0713: 1, S6024: 1, H0650: 1, H0656: 1, S0116: 1, H0341: 1, H0638: 1, S0442: 1, S0354: 1, |
| | | | | H0318: 1, H0581: 1, H0230: 1, H0597: 1, H0544: 1, H0178: 1, H0123: 1, H0050: 1, S0050: 1, H0014: 1, S6028: 1, H0266: 1, S0003: 1, |
| | | | | H0033: 1, H0032: 1, H0673: 1, H0598: 1, H0163: 1, H0040: 1, H0551: 1, H0623: 1, H0100: 1, T0041: 1, H0561: 1, S0438: 1, H0641: 1, |
| | | | | S0344: 1, S0002: 1, S0426: 1, L0769: 1, L0800: 1, L0641: 1, L0766: 1, L0775: 1, L0375: 1, L0653: 1, L0634: 1, L0659: 1, L0783: 1, |
| | | | | L0787: 1, L0663: 1, L0664: 1, L0665: 1, H0725: 1, H0670: 1, H0522: 1, H0436: 1, H0540: 1, S0027: 1, L0740: 1, L0751: 1, L0747: 1, |
| | | | | L0749: 1, L0786: 1, L0780: 1, L0752: 1, L0757: 1, L0608: 1, L0604: 1, S0192: 1 and S0276: 1. |
| 28 | HBJDW56 | 520401 | 38 | AR055: 8, AR060: 7, AR282: 6, AR104: 5, AR313: 5, AR185: 5, AR300: 4, AR089: 4, AR299: 4, AR240: 4, AR039: 4, AR219: 4, |
| | | | | AR316: 3, AR096: 3, AR283: 3, AR218: 3, AR277: 2, H0318: 1 |
| 29 | HBJEL16 | 847030 | 39 | H0046: 2, H0009: 2, H0090: 2, H0494: 2, L0438: 2, H0547: 2, H0521: 2, L0439: 2, L0777: 2, H0543: 2, H0556: 1, S0342: 1, S0045: 1, |
| | | | | H0619: 1, H0632: 1, H0013: 1, H0156: 1, L0021: 1, H0575: 1, H0318: 1, S0003: 1, L0483: 1, H0628: 1, H0623: 1, H0561: 1, L0761: 1, |
| | | | | L0803: 1, L0804: 1, L0659: 1, L0382: 1, H0144: 1, H0539: 1, S0152: 1, H0478: 1, H0631: 1, L0741: 1, L0740: 1 and L0591: 1. |
| 30 | HBJFK45 | 531919 | 40 | AR282: 3, AR055: 2, AR060: 2, AR219: 2, AR185: 2, AR300: 1, AR039: 1, AR283: 1, AR218: 1, H0318: 1 and L0766: 1. |
| 31 | HBJKD16 | 853358 | 41 | AR172: 63, AR171: 62, AR215: 61, AR274: 50, AR216: 48, AR213: 43, AR214: 41, AR272: 41, AR169: 41, AR224: 37, AR225: 37, |
| | | | | AR217: 37, AR254: 36, AR205: 36, AR170: 35, AR243: 35, AR168: 35, AR247: 34, AR245: 32, AR312: 32, AR221: 32, AR212: 31, |
| | | | | AR161: 29, AR222: 28, AR162: 28, AR311: 27, AR308: 27, AR163: 26, AR275: 26, AR165: 25, AR164: 24, AR313: 23, AR053: 23, |
| | | | | AR166: 23, AR223: 21, AR039: 20, AR089: 20, AR309: 19, AR096: 19, AR242: 18, AR253: 18, AR240: 17, AR289: 16, AR266: 16, |
| | | | | AR283: 16, AR263: 16, AR193: 16, AR316: 16, AR264: 16, AR204: 16, AR250: 15, AR282: 15, AR201: 15, AR277: 15, AR207: 14, |
| | | | | AR291: 14, AR246: 14, AR200: 13, AR198: 13, AR271: 12, AR299: 12, AR300: 12, AR195: 12, AR185: 12, AR104: 12, AR290: 11, |
| | | | | AR192: 11, AR173: 11, AR255: 11, AR257: 11, AR060: 11, AR197: 11, AR252: 10, AR180: 10, AR297: 10, AR179: 10, AR210: 10, |
| | | | | AR061: 10, AR181: 9, AR296: 9, AR199: 9, AR270: 9, AR269: 9, AR178: 9, AR183: 9, AR268: 8, AR055: 8, AR177: 8, AR262: 8, |
| | | | | AR236: 8, AR288: 8, AR211: 8, AR188: 7, AR267: 7, AR293: 7, AR219: 7, AR285: 7, AR256: 7, AR294: 7, AR174: 7, AR176: 7, |
| | | | | AR189: 7, AR033: 7, AR261: 7, AR218: 7, AR287: 6, AR175: 6, AR196: 6, AR231: 6, AR203: 6, AR286: 5, AR235: 5, AR190: 5, |
| | | | | AR230: 5, AR234: 5, AR191: 5, AR182: 5, AR260: 5, AR258: 4, AR295: 4, AR237: 4, AR233: 4, AR229: 4, AR238: 4, AR239: 3, |
| | | | | AR226: 3, AR232: 2, AR227: 2, AR228: 2, L0766: 9, L0439: 9, L0747: 6, L2528: 5, L0777: 5, H0673: 4, L0438: 4, L0758: 4, L0362: 4, |
| | | | | S0116: 3, L0748: 3, L0752: 3, H0445: 3, H0156: 2, T0010: 2, H0615: 2, H0038: 2, H0616: 2, H0264: 2, H0646: 2, L0761: 2, L0776: 2, |
| | | | | L0750: 2, L0779: 2, S0436: 2, L0593: 2, S0242: 2, H0222: 1, H0740: 1, H0657: 1, H0661: 1, H0663: 1, L2293: 1, H0589: 1, S0444: 1, |
| | | | | H0340: 1, L3646: 1, H0580: 1, H0749: 1, H0393: 1, H0549: 1, S0222: 1, H0574: 1, H0486: 1, H0013: 1, H0069: 1, L0021: 1, S0010: 1, |
| | | | | H0318: 1, S0474: 1, H0046: 1, L0471: 1, H0090: 1, L0638: 1, L0646: 1, L0764: 1, L0521: 1, L0364: 1, L0774: 1, L0659: 1, L0543: 1, |
| | | | | L5622: 1, L0792: 1, L0666: 1, L0664: 1, L0665: 1, S0428: 1, L2657: 1, L2652: 1, L3663: 1, L2262: 1, H0435: 1, L3832: 1, L0741: 1, |
| | | | | L0749: 1, S0434: 1, L0588: 1, H0422: 1, L0698: 1 and L2359: 1. |
| 32 | HBMUH74 | 866160 | 42 | AR218: 12, AR055: 8, AR060: 7, AR104: 7, AR219: 5, AR240: 5, AR299: 5, AR096: 4, AR316: 4, AR300: 4, AR039: 4, AR089: 3, |
| | | | | AR283: 3, AR185: 3, AR313: 3, AR282: 2, AR277: 2, L0754: 3, L0777: 3, L0439: 2, S0116: 1, H0341: 1, H0661: 1, H0038: 1, |
| | | | | H0412: 1, L0761: 1, L0667: 1, L0764: 1, L0788: 1, H0435: 1, L0749: 1, L0779: 1 and L0758: 1. |
| 33 | HBQAB79 | 810542 | 43 | AR055: 7, AR218: 7, AR060: 6, AR039: 6, AR300: 5, AR185: 5, AR313: 5, AR240: 4, AR299: 4, AR089: 4, AR096: 3, AR316: 3, |
| | | | | AR283: 3, AR104: 2, AR219: 2, AR277: 2, AR282: 1, H0229: 1 |
| 34 | HBXCM66 | 639039 | 44 | AR313: 74, AR039: 52, AR299: 36, AR300: 36, AR096: 35, AR089: 32, AR277: 32, AR185: 32, AR240: 23, AR316: 22, AR218: 15, |
| | | | | AR104: 14, AR219: 14, AR060: 13, AR282: 11, AR055: 7, AR283: 3, H0550: 2, L0523: 2, S0282: 1, S0045: 1, H0549: 1, H0052: 1 and |
| | | | | S0038: 1. |
| 35 | HBXCX15 | 637542 | 45 | S0038: 3, H0438: 1, L0363: 1 and S0053: 1. |
| 36 | HCDBO32 | 831942 | 46 | AR219: 9, AR185: 8, AR055: 8, AR218: 8, AR089: 6, AR313: 6, AR283: 6, AR282: 6, AR104: 5, AR060: 5, AR316: 5, AR300: 5, |
| | | | | AR299: 4, AR096: 4, AR240: 4, AR277: 4, AR039: 3, L0803: 7, L0766: 4, L0777: 4, L0666: 3, H0521: 3, T0115: 2, H0687: 2, L0809: 2, |
| | | | | H0659: 2, L0754: 2, L0779: 2, L0759: 2, L3643: 1, H0341: 1, H0747: 1, H0749: 1, L3387: 1, H0351: 1, S0222: 1, H0441: 1, L3816: 1, |
| | | | | H0013: 1, S0280: 1, H0251: 1, H0544: 1, H0123: 1, H0354: 1, H0266: 1, H0622: 1, H0090: 1, T0041: 1, H0641: 1, S0422: 1, L0371: 1, |
| | | | | L0646: 1, L0662: 1, L0774: 1, L0805: 1, L0653: 1, L0659: 1, L0635: 1, L0526: 1, L0783: 1, L0663: 1, L0664: 1, L0665: 1, H0144: 1, |
| | | | | T0068: 1, L3811: 1, H0519: 1, H0682: 1, S0152: 1, S0136: 1, L0744: 1, L0780: 1, L0758: 1, H0444: 1, H0445: 1, L0590: 1, L0594: 1, |
| | | | | S0026: 1 and H0422: 1. |
| 37 | HCEDR26 | 771144 | 47 | AR313: 59, AR039: 47, AR277: 33, AR299: 28, AR185: 25, AR096: 23, AR089: 23, AR300: 20, AR219: 19, AR240: 17, AR316: 16, |
| | | | | AR104: 15, AR282: 13, AR218: 13, AR060: 13, AR283: 10, AR055: 10, H0052: 2, H0018: 1, H0264: 1 and L0700: 1. |
| 38 | HCEEE79 | 560609 | 48 | H0052: 1 |
| 39 | HCEFG93 | 745400 | 49 | AR313: 44, AR039: 38, AR299: 23, AR185: 18, AR089: 17, AR277: 16, AR096: 15, AR300: 15, AR219: 15, AR104: 14, AR218: 12, |
| | | | | AR316: 11, AR240: 9, AR060: 8, AR282: 6, AR055: 6, AR283: 3, H0052: 1 |
| 40 | HCEFZ82 | 831745 | 50 | L0748: 11, H0052: 8, L0803: 8, L0749: 8, L0770: 7, L0439: 5, L0746: 4, L0752: 4, L3811: 3, H0575: 2, H0012: 2, H0031: 2, L0768: 2, |
| | | | | L0804: 2, L0774: 2, L0740: 2, L0747: 2, L0756: 2, L0779: 2, L0757: 2, L0758: 2, L0592: 2, L0593: 2, H0556: 1, S0420: 1, S0376: 1, |
| | | | | H0441: 1, H0632: 1, S0010: 1, T0115: 1, H0545: 1, H0009: 1, H0620: 1, H0197: 1, H0051: 1, S0388: 1, S0051: 1, H0252: 1, H0032: 1, |
| | | | | L0455: 1, H0591: 1, H0272: 1, L0564: 1, S0438: 1, S0344: 1, L0373: 1, L0646: 1, L0794: 1, L0766: 1, L0805: 1, L0776: 1, L0783: 1, |
| | | | | L0809: 1, S0374: 1, H0522: 1, H0134: 1, L0780: 1, L0731: 1, L0759: 1, S0436: 1, L0597: 1, H0543: 1, H0423: 1 and L0600: 1. |
| 41 | HCFLN88 | 610000 | 51 | S0410: 22, L0770: 9, L0748: 9, L0769: 7, L0776: 6, L0659: 6, H0424: 5, L0761: 5, L0731: 5, H0486: 4, L0803: 4, L0809: 4, L0666: 4, |
| | | | | H0696: 4, L0754: 4, L0779: 4, L0758: 4, H0729: 3, H0618: 3, H0135: 3, L0637: 3, L0771: 3, L0766: 3, L0805: 3, L0665: 3, L0751: 3, |
| | | | | H0542: 3, H0341: 2, H0402: 2, S0358: 2, S0376: 2, S0360: 2, H0747: 2, S0132: 2, L3109: 2, L0717: 2, H0592: 2, H0253: 2, S0010: 2, |
| | | | | H0052: 2, H0545: 2, H0050: 2, H0617: 2, H0087: 2, H0551: 2, H0100: 2, H0560: 2, L0763: 2, L5565: 2, L0646: 2, L0764: 2, L0655: 2, |
| | | | | L0663: 2, L2260: 2, S0374: 2, H0414: 2, S0406: 2, H0436: 2, L0743: 2, L0740: 2, L0749: 2, L0755: 2, L0757: 2, L0759: 2, H0445: 2, |
| | | | | H0136: 2, H0543: 2, H0423: 2, H0352: 2, H0170: 1, H0171: 1, H0225: 1, H0713: 1, S0218: 1, L0785: 1, H0692: 1, S0212: 1, H0483: 1, |
| | | | | H0254: 1, H0305: 1, S0356: 1, S0442: 1, S0444: 1, S0408: 1, H0619: 1, H0393: 1, H0406: 1, H0370: 1, H0249: 1, H0101: 1, H0250: 1, |
| | | | | S0280: 1, H0599: 1, H0575: 1, H0706: 1, T0048: 1, H0318: 1, S0474: 1, H0581: 1, T0115: 1, H0009: 1, H0572: 1, H0024: 1, S0051: 1, |
| | | | | H0271: 1, H0288: 1, T0006: 1, H0213: 1, H0553: 1, H0644: 1, S0364: 1, H0163: 1, H0090: 1, H0264: 1, H0488: 1, S0112: 1, H0494: 1, |
| | | | | H0652: 1, S0344: 1, S0002: 1, S0426: 1, L4497: 1, L5575: 1, L3905: 1, L5566: 1, L0772: 1, L0641: 1, L0645: 1, L0773: 1, L0650: 1, |
| | | | | L0774: 1, L0775: 1, L0378: 1, L0806: 1, L0783: 1, L5622: 1, L0790: 1, L0664: 1, L3827: 1, H0547: 1, H0519: 1, S0126: 1, H0711: 1, |
| | | | | H0672: 1, S0330: 1, H0521: 1, S0392: 1, S0037: 1, L0742: 1, L0439: 1, L0745: 1, L0747: 1, L0750: 1, L0777: 1, S0436: 1, L0485: 1, |
| | | | | L0608: 1, S0011: 1, H0653: 1 and H0422: 1. |
| 42 | HCHAB84 | 834326 | 52 | AR313: 37, AR039: 34, AR104: 24, AR300: 24, AR277: 23, AR096: 23, AR185: 20, AR089: 20, AR299: 19, AR219: 18, AR218: 17, |
| | | | | AR316: 16, AR240: 16, AR282: 13, AR283: 9, AR060: 8, AR055: 7, S0354: 9, S0358: 3, H0494: 3, S0476: 2, S0474: 2, S0438: 2, |
| | | | | H0519: 2, H0521: 2, L0754: 2, H0170: 1, S0040: 1, S0114: 1, H0484: 1, H0483: 1, H0255: 1, S0376: 1, S0444: 1, S0408: 1, S0046: 1, |
| | | | | H0619: 1, H0549: 1, H0042: 1, H0581: 1, H0052: 1, H0083: 1, S0440: 1, L0773: 1, L0517: 1, L0383: 1, S0374: 1, S0152: 1, S3014: 1, |
| | | | | L0751: 1, L0759: 1, S0434: 1, S0436: 1, H0543: 1 and H0422: 1. |
| 43 | HCLBK61 | 845659 | 53 | AR185: 98, AR096: 71, AR055: 67, AR104: 53, AR240: 51, AR089: 49, AR219: 36, AR218: 34, AR299: 28, AR316: 27, AR300: 25, |
| | | | | AR039: 24, AR277: 22, AR060: 21, AR313: 20, AR283: 18, AR282: 17, H0156: 3, H0052: 3, L0731: 3, T0040: 2, H0599: 2, S0010: 2, |
| | | | | H0050: 2, H0012: 2, H0201: 2, S6028: 2, H0188: 2, H0628: 2, H0038: 2, L0796: 2, S0037: 2, S3014: 2, S0032: 2, L0777: 2, S0114: 1, |
| | | | | S0212: 1, H0663: 1, S0418: 1, H0735: 1, H0351: 1, H0550: 1, T0039: 1, H0013: 1, H0004: 1, H0318: 1, L0738: 1, H0544: 1, H0545: 1, |
| | | | | H0009: 1, H0123: 1, H0024: 1, H0594: 1, S0022: 1, H0031: 1, H0644: 1, H0135: 1, H0090: 1, H0616: 1, T0041: 1, H0646: 1, S0210: 1, |
| | | | | L3905: 1, L0761: 1, L0521: 1, L0807: 1, L0809: 1, L0789: 1, S0310: 1, S0126: 1, H0658: 1, S0044: 1, S0406: 1, S0027: 1, S0028: 1, |
| | | | | S0206: 1, L0748: 1, L0439: 1, L0740: 1, L0751: 1, L0779: 1, L0759: 1, S0436: 1, L0485: 1, L0599: 1, L0594: 1, L0603: 1, S0194: 1 and |
| | | | | S0276: 1. |
| 44 | HCMSX51 | 788643 | 54 | L0740: 16, L0745: 7, L0439: 6, L0438: 4, H0547: 4, L0750: 4, L0759: 4, H0619: 3, H0618: 3, L0770: 3, L3828: 3, L0749: 3, L0758: 3, |
| | | | | H0393: 2, H0599: 2, H0083: 2, H0124: 2, H0623: 2, H0100: 2, L3905: 2, L0794: 2, L0809: 2, L3825: 2, L3829: 2, S0406: 2, S0027: 2, |
| | | | | L0743: 2, L0746: 2, L0777: 2, L0603: 2, S0040: 1, L2879: 1, L2906: 1, S0420: 1, S0442: 1, S0358: 1, L3311: 1, L3485: 1, H0261: 1, |
| | | | | H0392: 1, H0013: 1, H0250: 1, H0590: 1, H0196: 1, H0545: 1, H0046: 1, H0123: 1, H0620: 1, S0051: 1, S0250: 1, H0617: 1, S0036: 1, |
| | | | | H0135: 1, H0634: 1, H0087: 1, H0269: 1, H0561: 1, H0509: 1, H0646: 1, S0426: 1, L0763: 1, L0769: 1, L3904: 1, L0662: 1, L0363: 1, |
| | | | | L0767: 1, L0768: 1, L0650: 1, L0375: 1, L0806: 1, L0776: 1, L0657: 1, L0787: 1, L4559: 1, L0664: 1, L2260: 1, H0520: 1, L3831: 1, |
| | | | | H0670: 1, H0518: 1, L3834: 1, H0704: 1, H0436: 1, L0747: 1, L0780: 1, L0608: 1, L0595: 1, and H0423: 1. |
| 45 | HCNCO11 | 775086 | 55 | AR055: 2, AR060: 2, AR277: 1, AR282: 1, H0597: 1 |
| 46 | HCNSD29 | 862314 | 56 | AR252: 128, AR253: 67, AR245: 63, AR272: 55, AR308: 49, AR246: 47, AR263: 46, AR212: 40, AR053: 37, AR243: 35, AR312: 34, |
| | | | | AR254: 33, AR275: 33, AR205: 33, AR309: 32, AR264: 31, AR250: 31, AR197: 31, AR271: 29, AR224: 26, AR195: 26, AR311: 26, |
| | | | | AR200: 26, AR223: 26, AR201: 25, AR198: 25, AR219: 23, AR274: 22, AR210: 22, AR172: 21, AR218: 21, AR222: 21, AR225: 20, |
| | | | | AR221: 20, AR268: 19, AR104: 19, AR096: 18, AR240: 17, AR188: 17, AR313: 17, AR199: 17, AR213: 17, AR203: 16, AR242: 16, |
| | | | | AR039: 15, AR316: 15, AR170: 15, AR193: 15, AR180: 15, AR165: 14, AR269: 14, AR192: 14, AR204: 14, AR164: 14, AR166: 14, |
| | | | | AR211: 13, AR033: 13, AR168: 13, AR270: 13, AR207: 12, AR175: 12, AR290: 12, AR169: 12, AR089: 12, AR183: 12, AR247: 12, |
| | | | | AR176: 11, AR171: 11, AR267: 11, AR178: 11, AR162: 11, AR161: 11, AR217: 11, AR163: 10, AR174: 10, AR229: 10, AR291: 10, |
| | | | | AR173: 10, AR189: 9, AR214: 9, AR266: 9, AR255: 9, AR181: 8, AR196: 8, AR177: 8, AR297: 8, AR289: 8, AR299: 8, AR179: 8, |
| | | | | AR190: 8, AR191: 8, AR300: 8, AR060: 8, AR182: 8, AR238: 7, AR216: 7, AR215: 7, AR257: 7, AR261: 7, AR262: 7, AR282: 7, |
| | | | | AR296: 7, AR185: 7, AR293: 7, AR235: 6, AR295: 6, AR283: 6, AR231: 6, AR055: 6, AR288: 6, AR285: 6, AR287: 6, AR234: 6, |
| | | | | AR258: 6, AR237: 5, AR239: 5, AR236: 5, AR256: 5, AR277: 5, AR286: 5, AR228: 5, AR230: 4, AR294: 4, AR226: 4, AR233: 4, |
| | | | | AR260: 4, AR232: 4, AR061: 3, AR227: 3, L0648: 2, L0768: 2, L0766: 2, L0748: 2, L0588: 2, H0125: 1, S0468: 1, H0497: 1, H0486: 1, |
| | | | | H0744: 1, H0231: 1, H0266: 1, H0202: 1, H0641: 1, S0422: 1, L0638: 1, L0644: 1, L5572: 1, L0662: 1, L0650: 1, L0807: 1, L0657: 1, |
| | | | | L0663: 1, L0665: 1, H0519: 1, L0759: 1, S0026: 1 and L0718: 1. |
| 47 | HCQBH72 | 637548 | 57 | AR055: 2, AR060: 2, AR299: 2, AR089: 2, AR219: 1, AR185: 1, AR039: 1, AR283: 1, AR104: 1, L0520: 4, L0754: 2, H0263: 1, |
| | | | | H0272: 1 and H0555: 1. |
| 48 | HCQCC96 | 845066 | 58 | AR252: 46, AR197: 44, AR204: 38, AR195: 35, AR253: 34, AR178: 31, AR230: 31, AR254: 31, AR233: 29, AR250: 28, AR180: 28, |
| | | | | AR198: 28, AR266: 26, AR243: 26, AR193: 24, AR239: 23, AR061: 23, AR267: 23, AR201: 23, AR227: 22, AR229: 22, AR228: 22, |
| | | | | AR237: 21, AR162: 21, AR181: 21, AR163: 21, AR170: 21, AR161: 20, AR257: 20, AR192: 20, AR226: 20, AR176: 19, AR234: 19, |
| | | | | AR171: 18, AR183: 18, AR245: 18, AR271: 18, AR182: 17, AR258: 17, AR270: 17, AR179: 17, AR275: 17, AR238: 16, AR231: 16, |
| | | | | AR296: 16, AR261: 16, AR033: 16, AR174: 15, AR185: 15, AR255: 15, AR164: 15, AR262: 15, AR207: 15, AR053: 15, AR165: 15, |
| | | | | AR272: 14, AR256: 14, AR039: 14, AR269: 14, AR242: 14, AR166: 14, AR205: 14, AR175: 14, AR246: 14, AR300: 13, AR203: 13, |
| | | | | AR289: 12, AR236: 12, AR104: 12, AR316: 11, AR232: 11, AR293: 11, AR055: 11, AR287: 11, AR169: 11, AR260: 11, AR235: 11, |
| | | | | AR168: 11, AR089: 11, AR173: 10, AR308: 10, AR286: 10, AR268: 10, AR291: 10, AR060: 10, AR297: 10, AR313: 10, AR288: 10, |
| | | | | AR212: 10, AR213: 10, AR299: 10, AR177: 10, AR188: 9, AR096: 9, AR190: 9, AR191: 9, AR294: 9, AR282: 9, AR285: 9, AR283: 9, |
| | | | | AR172: 8, AR277: 8, AR189: 8, AR247: 8, AR309: 8, AR312: 8, AR274: 8, AR240: 7, AR218: 7, AR264: 7, AR210: 6, AR200: 6, |
| | | | | AR295: 6, AR290: 6, AR219: 6, AR215: 6, AR199: 5, AR263: 5, AR196: 5, AR223: 5, AR311: 5, AR216: 5, AR214: 4, AR224: 4, |
| | | | | AR225: 4, AR211: 4, AR217: 4, AR221: 2, AR222: 2, S0360: 5, L0748: 5, L0766: 3, H0657: 2, L3388: 2, H0581: 2, H0596: 2, |
| | | | | H0563: 2, S0003: 2, H0328: 2, H0670: 2, L0756: 2, S0436: 2, S0026: 2, H0170: 1, H0556: 1, H0344: 1, H0650: 1, H0656: 1, H0638: 1, |
| | | | | S0420: 1, H0675: 1, S0007: 1, H0574: 1, H0632: 1, H0013: 1, H0036: 1, S0010: 1, H0318: 1, H0052: 1, H0251: 1, H0150: 1, H0050: 1, |
| | | | | H0090: 1, H0038: 1, S0440: 1, H0130: 1, S0142: 1, S0422: 1, H0529: 1, L0803: 1, L0659: 1, L5623: 1, L0666: 1, S0428: 1, S0126: 1, |
| | | | | H0689: 1, H0648: 1, H0672: 1, S0330: 1, H0539: 1, S0378: 1, H0521: 1, H0522: 1, H0478: 1, L0744: 1, L0754: 1, L0779: 1, L0752: 1, |
| | | | | S0260: 1, H0445: 1, H0343: 1, H0595: 1, S0434: 1, H0423: 1 and S0424: 1. |
| 49 | HCUDD64 | 835082 | 59 | AR282: 3, AR219: 3, H0052: 3, S3012: 2, L0754: 2, H0402: 1, H0413: 1, S0374: 1, L0438: 1, L0748: 1 and L0740: 1. |
| 50 | HCWAE64 | 535893 | 60 | AR277: 7, AR282: 1, H0305: 1 |
| 51 | HDPCW16 | 840358 | 61 | AR089: 36, AR185: 34, AR219: 34, AR218: 27, AR104: 14, AR316: 13, AR282: 12, AR277: 10, AR240: 8, AR283: 8, AR313: 7, |
| | | | | AR096: 6, AR039: 6, AR055: 5, AR299: 4, AR300: 4, AR060: 4, L0783: 7, H0441: 5, L0666: 4, H0617: 3, L3905: 3, L0439: 3, |
| | | | | T0049: 2, H0341: 2, H0661: 2, L0717: 2, H0009: 2, L0471: 2, H0641: 2, L0764: 2, L0662: 2, L0659: 2, L0792: 2, L0663: 2, H0521: 2, |
| | | | | L0748: 2, H0657: 1, H0255: 1, H0664: 1, H0402: 1, S0418: 1, S0045: 1, S0046: 1, H0749: 1, H0370: 1, H0600: 1, H0497: 1, H0333: 1, |
| | | | | H0486: 1, L0021: 1, H0706: 1, H0544: 1, H0545: 1, H0046: 1, H0041: 1, H0178: 1, L0157: 1, H0673: 1, T0069: 1, L0351: 1, H0494: 1, |
| | | | | H0625: 1, H0649: 1, L0502: 1, L0770: 1, L0769: 1, L5575: 1, L0645: 1, L0533: 1, L0493: 1, L0517: 1, L0518: 1, L0782: 1, L0809: 1, |
| | | | | L0787: 1, L0789: 1, L0665: 1, L0438: 1, H0520: 1, S0126: 1, H0690: 1, H0539: 1, L0609: 1, L0612: 1, L0747: 1, L0749: 1, L0786: 1, |
| | | | | L0779: 1, L0731: 1, L0758: 1, H0653: 1, H0667: 1 and H0352: 1. |
| 52 | HDPDI72 | 897277 | 62 | AR263: 7, AR039: 6, AR089: 5, AR184: 5, AR096: 4, AR313: 4, AR299: 4, AR282: 3, AR277: 3, AR240: 3, AR060: 3, AR218: 3, |
| | | | | AR249: 3, AR316: 3, AR185: 2, AR055: 2, AR274: 2, AR104: 2, AR267: 2, AR247: 2, AR300: 2, AR206: 1, AR283: 1, AR052: 1, |
| | | | | AR312: 1, AR275: 1, AR183: 1, AR270: 1, AR309: 1, AR238: 1, H0521: 2 and H0580: 1. |
| 53 | HDPGE24 | 801947 | 63 | H0555: 8, S0002: 7, L0748: 6, H0556: 5, H0179: 5, L0369: 5, S0222: 4, S0474: 4, S0045: 3, H0427: 3, H0599: 3, H0575: 3, H0271: 3, |
| | | | | H0628: 3, H0598: 3, S0426: 3, L0766: 3, L0581: 3, H0265: 2, S0114: 2, S0212: 2, H0402: 2, S0442: 2, S0354: 2, S0132: 2, H0431: 2, |
| | | | | H0370: 2, H0632: 2, H0581: 2, H0196: 2, H0050: 2, H0124: 2, L0665: 2, H0521: 2, S0390: 2, S0028: 2, L0777: 2, H0444: 2, S0436: 2, |
| | | | | H0423: 2, L3643: 1, S0040: 1, L0002: 1, H0381: 1, S0116: 1, H0255: 1, H0662: 1, S0360: 1, H0676: 1, H0580: 1, H0729: 1, H0722: 1, |
| | | | | H0728: 1, S0046: 1, H0749: 1, S0300: 1, L0717: 1, L3388: 1, H0586: 1, H0333: 1, H0486: 1, H0706: 1, H0036: 1, T0048: 1, H0318: 1, |
| | | | | H0251: 1, H0309: 1, H0121: 1, H0544: 1, S0050: 1, H0375: 1, H0266: 1, S0003: 1, S0214: 1, H0252: 1, H0031: 1, H0644: 1, H0708: 1, |
| | | | | H0400: 1, H0063: 1, H0264: 1, S0038: 1, H0280: 1, H0334: 1, H0625: 1, S0440: 1, H0509: 1, H0132: 1, S0210: 1, L0803: 1, L0525: 1, |
| | | | | L0555: 1, L0529: 1, L0367: 1, L0532: 1, S0052: 1, S0428: 1, S0216: 1, H0547: 1, H0519: 1, S0126: 1, H0134: 1, S0406: 1, H0727: 1, |
| | | | | H0345: 1, S0037: 1, L0740: 1, L0749: 1, S0031: 1, H0445: 1, H0707: 1, L0605: 1, L0604: 1, L0601: 1 and H0543: 1. |
| 54 | HDPIE44 | 899328 | 64 | AR263: 6, AR265: 3, AR184: 3, AR183: 3, AR096: 3, AR313: 3, AR269: 3, AR039: 3, AR104: 2, AR312: 2, AR270: 2, AR268: 2, |
| | | | | AR298: 2, AR296: 2, AR292: 2, AR060: 2, AR052: 2, AR282: 2, AR291: 2, AR198: 2, AR316: 2, AR192: 2, AR299: 2, AR286: 2, |
| | | | | AR267: 2, AR218: 2, AR055: 2, AR295: 2, AR290: 2, AR283: 2, AR089: 2, AR289: 1, AR231: 1, AR213: 1, AR247: 1, AR284: 1, |
| | | | | AR293: 1, AR053: 1, AR033: 1, AR238: 1, AR258: 1, AR182: 1, AR177: 1, AR277: 1, AR185: 1, AR310: 1, L3811: 7, L0439: 7, |
| | | | | L0759: 5, L0591: 5, L0803: 4, H0547: 4, L0748: 4, L0755: 4, L0596: 4, H0171: 3, S0376: 3, S0007: 3, H0024: 3, H0355: 3, H0615: 3, |
| | | | | H0428: 3, H0090: 3, H0623: 3, S0422: 3, L0794: 3, L0766: 3, L0659: 3, H0144: 3, H0658: 3, S0406: 3, L0749: 3, L0758: 3, S0436: 3, |
| | | | | H0624: 2, H0717: 2, S0358: 2, S0360: 2, H0486: 2, H0427: 2, S0010: 2, H0052: 2, H0251: 2, H0687: 2, H0622: 2, H0553: 2, H0644: 2, |
| | | | | H0591: 2, S0438: 2, L0769: 2, L0662: 2, L0805: 2, S0374: 2, S0126: 2, H0689: 2, H0670: 2, H0521: 2, S0028: 2, L0744: 2, L0740: 2, |
| | | | | L0754: 2, L0752: 2, L0593: 2, S0192: 2, H0506: 2, H0265: 1, H0294: 1, H0656: 1, S0212: 1, L0481: 1, S0418: 1, L0005: 1, S0356: 1, |
| | | | | S0442: 1, S0408: 1, H0733: 1, H0208: 1, S0045: 1, H0619: 1, L0717: 1, S0222: 1, H0455: 1, L3653: 1, H0013: 1, H0599: 1, S0474: 1, |
| | | | | H0196: 1, H0263: 1, H0046: 1, H0172: 1, H0050: 1, L0471: 1, H0012: 1, H0620: 1, H0014: 1, H0051: 1, H0356: 1, H0375: 1, S0316: 1, |
| | | | | H0328: 1, H0688: 1, L0483: 1, S0364: 1, S0366: 1, H0135: 1, H0163: 1, H0038: 1, H0040: 1, H0634: 1, H0551: 1, H0488: 1, T0042: 1, |
| | | | | H0494: 1, S0016: 1, H0625: 1, H0561: 1, S0440: 1, L2270: 1, S0344: 1, L3818: 1, H0538: 1, L0598: 1, L0770: 1, L0638: 1, L0641: 1, |
| | | | | L0626: 1, L0804: 1, L0375: 1, L0784: 1, L0523: 1, L0806: 1, L0776: 1, L0526: 1, L0809: 1, L5622: 1, L0789: 1, L0793: 1, L4559: 1, |
| | | | | L0663: 1, L4560: 1, L3826: 1, L3828: 1, H0683: 1, H0672: 1, H0651: 1, S0330: 1, H0539: 1, H0555: 1, S0390: 1, S0206: 1, L0747: 1, |
| | | | | L0779: 1, S0308: 1, L0604: 1 and H0423: 1. |
| 55 | HDPIU94 | 813352 | 65 | AR055: 17, AR277: 13, AR060: 12, AR316: 9, AR219: 8, AR240: 8, AR089: 8, AR300: 8, AR218: 8, AR039: 7, AR283: 7, AR096: 6, |
| | | | | AR282: 5, AR104: 5, AR185: 4, AR299: 4, AR313: 2, L0748: 6, L0666: 5, L0665: 5, L0768: 4, L0777: 4, L0595: 4, H0352: 4, S0045: 3, |
| | | | | H0124: 3, L0774: 3, S0028: 3, L0439: 3, L0756: 3, L0592: 3, S0376: 2, S0360: 2, H0619: 2, S0222: 2, L3816: 2, H0635: 2, H0036: 2, |
| | | | | H0052: 2, H0046: 2, L0041: 2, S0312: 2, H0551: 2, L3815: 2, L0764: 2, L0663: 2, H0144: 2, L3825: 2, L0751: 2, L0754: 2, L0745: 2, |
| | | | | L0731: 2, L0589: 2, H0653: 2, H0136: 2, H0216: 2, H0624: 1, S6024: 1, S0430: 1, H0656: 1, H0255: 1, S0046: 1, H0747: 1, H0645: 1, |
| | | | | L2759: 1, H0013: 1, H0156: 1, H0575: 1, H0050: 1, S0050: 1, H0373: 1, H0687: 1, S0314: 1, S0250: 1, H0031: 1, H0135: 1, H0634: 1, |
| | | | | H0616: 1, H0380: 1, H0264: 1, H0433: 1, H0059: 1, L0351: 1, S0422: 1, L0800: 1, L0662: 1, L0626: 1, L0766: 1, L0803: 1, L0375: 1, |
| | | | | L0655: 1, L0659: 1, L0783: 1, L0809: 1, L0664: 1, L2263: 1, L2258: 1, L2259: 1, H0726: 1, L3826: 1, L3827: 1, H0648: 1, S0152: 1, |
| | | | | L3833: 1, H0521: 1, S0390: 1, S3014: 1, S0027: 1, L0749: 1, L0750: 1, L0780: 1, L0758: 1, L0759: 1, S0260: 1 and L0366: 1. |
| 56 | HDPIY31 | 886159 | 66 | AR214: 26, AR263: 25, AR224: 21, AR222: 20, AR264: 20, AR223: 19, AR169: 18, AR221: 18, AR217: 18, AR171: 17, AR172: 17, |
| | | | | AR195: 17, AR207: 16, AR170: 16, AR311: 16, AR235: 16, AR215: 16, AR225: 16, AR168: 15, AR216: 15, AR165: 14, AR197: 14, |
| | | | | AR164: 14, AR162: 14, AR308: 13, AR089: 13, AR161: 13, AR166: 13, AR212: 13, AR192: 13, AR193: 13, AR163: 13, AR213: 12, |
| | | | | AR033: 12, AR309: 12, AR242: 12, AR053: 11, AR245: 11, AR312: 11, AR210: 10, AR282: 10, AR253: 10, AR261: 10, AR254: 10, |
| | | | | AR277: 10, AR198: 10, AR104: 10, AR295: 10, AR288: 9, AR240: 9, AR316: 9, AR299: 9, AR219: 9, AR196: 9, AR205: 9, AR271: 9, |
| | | | | AR252: 9, AR285: 9, AR250: 9, AR297: 9, AR272: 8, AR060: 8, AR096: 8, AR177: 8, AR269: 8, AR274: 8, AR246: 8, AR313: 8, |
| | | | | AR236: 8, AR211: 8, AR185: 8, AR286: 8, AR039: 7, AR291: 7, AR287: 7, AR275: 7, AR200: 7, AR300: 7, AR055: 7, AR229: 7, |
| | | | | AR181: 7, AR283: 7, AR189: 7, AR218: 7, AR175: 7, AR174: 7, AR247: 7, AR238: 7, AR199: 6, AR289: 6, AR188: 6, AR293: 6, |
| | | | | AR243: 6, AR191: 6, AR173: 6, AR266: 6, AR262: 6, AR204: 6, AR270: 6, AR226: 6, AR258: 6, AR201: 6, AR176: 6, AR268: 5, |
| | | | | AR296: 5, AR257: 5, AR183: 5, AR182: 5, AR234: 5, AR231: 5, AR180: 5, AR255: 5, AR230: 5, AR178: 5, AR256: 5, AR290: 5, |
| | | | | AR190: 5, AR239: 5, AR232: 5, AR260: 4, AR227: 4, AR203: 4, AR294: 4, AR267: 4, AR061: 4, AR179: 4, AR237: 4, AR233: 3, |
| | | | | AR228: 3, L0439: 56, L0438: 20, H0556: 7, H0052: 7, L0776: 5, S0222: 4, H0438: 4, S0418: 3, S0278: 3, L0770: 3, L0771: 3, L0743: 3, |
| | | | | L0366: 3, H0265: 2, S0040: 2, L0415: 2, S0045: 2, H0619: 2, H0492: 2, H0486: 2, H0581: 2, H0620: 2, H0266: 2, H0604: 2, H0031: 2, |
| | | | | H0100: 2, L0351: 2, H0144: 2, L0352: 2, H0672: 2, H0521: 2, L0756: 2, L0777: 2, L0731: 2, H0624: 1, H0140: 1, H0583: 1, H0255: 1, |
| | | | | H0402: 1, H0305: 1, H0458: 1, S0420: 1, S0354: 1, S0358: 1, H0645: 1, S6022: 1, H0392: 1, H0643: 1, H0559: 1, H0013: 1, H0069: 1, |
| | | | | H0156: 1, H0590: 1, S0346: 1, H0085: 1, H0544: 1, H0545: 1, H0439: 1, H0150: 1, H0041: 1, S0388: 1, S0051: 1, T0010: 1, H0271: 1, |
| | | | | H0416: 1, H0188: 1, H0288: 1, S0022: 1, T0006: 1, H0213: 1, H0628: 1, H0617: 1, H0135: 1, H0087: 1, H0551: 1, H0477: 1, H0059: 1, |
| | | | | S0038: 1, L0435: 1, T0042: 1, H0494: 1, S0344: 1, S0426: 1, L0640: 1, L0769: 1, L0638: 1, L0761: 1, L0642: 1, L0764: 1, L0768: 1, |
| | | | | L0794: 1, L0803: 1, L0375: 1, L0806: 1, L0805: 1, L0655: 1, L0659: 1, L0809: 1, L0789: 1, L0665: 1, H0519: 1, S0126: 1, H0690: 1, |
| | | | | H0682: 1, S0330: 1, H0539: 1, H0522: 1, S0037: 1, L0751: 1, L0754: 1, L0746: 1, L0749: 1, L0786: 1, L0779: 1, H0445: 1, L0596: 1, |
| | | | | H0542: 1 and H0543: 1. |
| 57 | HDPOC24 | 777493 | 67 | H0585: 26, H0141: 12, L0666: 9, L0754: 9, L0755: 9, S0212: 6, L0663: 5, L0743: 5, S0356: 4, H0587: 4, H0553: 4, L0657: 4, |
| | | | | L0382: 4, L0740: 4, L0747: 4, S0045: 3, S0046: 3, H0024: 3, L0771: 3, L0648: 3, L0662: 3, L0659: 3, L0664: 3, S0126: 3, H0522: 3, |
| | | | | L0748: 3, L0777: 3, L0757: 3, S0192: 3, S0040: 2, S0420: 2, S0442: 2, S0358: 2, S0476: 2, H0550: 2, H0497: 2, H0250: 2, H0575: 2, |
| | | | | H0052: 2, H0546: 2, H0266: 2, H0100: 2, H0646: 2, S0002: 2, L0763: 2, L0649: 2, L0803: 2, L0775: 2, L0653: 2, L0517: 2, L0809: 2, |
| | | | | L0790: 2, L0665: 2, H0660: 2, S0380: 2, H0521: 2, S3014: 2, S0028: 2, L0751: 2, S0436: 2, H0665: 2, S0430: 1, H0341: 1, S0282: 1, |
| | | | | H0664: 1, S0418: 1, S0354: 1, S0444: 1, H0549: 1, S0222: 1, H0600: 1, H0333: 1, H0618: 1, H0253: 1, S0474: 1, H0581: 1, H0235: 1, |
| | | | | H0597: 1, H0545: 1, H0009: 1, H0081: 1, H0620: 1, H0023: 1, H0687: 1, S0250: 1, L0483: 1, T0006: 1, L0055: 1, H0087: 1, H0551: 1, |
| | | | | H0379: 1, H0264: 1, H0494: 1, H0625: 1, S0352: 1, H0641: 1, H0529: 1, L0371: 1, L0769: 1, L5575: 1, L3905: 1, L5566: 1, L0772: 1, |
| | | | | L0800: 1, L0764: 1, L0773: 1, L0794: 1, L0386: 1, L0378: 1, L0806: 1, L0807: 1, L0792: 1, L0565: 1, S0310: 1, H0519: 1, H0682: 1, |
| | | | | H0684: 1, H0670: 1, H0672: 1, S0328: 1, S0330: 1, S0332: 1, H0478: 1, S0432: 1, S3012: 1, S0390: 1, S0206: 1, L0742: 1, L0756: 1, |
| | | | | L0779: 1, H0707: 1, S0434: 1, L0596: 1, H0668: 1, S0242: 1, H0506: 1 and H0008: 1. |
| 58 | HDPPD93 | 637588 | 68 | AR202: 68, AR194: 68, AR281: 64, AR244: 59, AR315: 56, AR205: 52, AR246: 50, AR280: 49, AR283: 45, AR314: 39, AR271: 38, |
| | | | | AR232: 37, AR243: 37, AR241: 35, AR316: 34, AR282: 33, AR204: 33, AR263: 32, AR089: 32, AR192: 32, AR265: 31, AR277: 31, |
| | | | | AR206: 30, AR219: 29, AR310: 29, AR033: 29, AR096: 29, AR313: 28, AR299: 28, AR240: 26, AR247: 26, AR273: 24, AR300: 24, |
| | | | | AR198: 24, AR295: 24, AR274: 24, AR218: 24, AR039: 23, AR275: 23, AR055: 23, AR213: 23, AR104: 22, AR251: 22, AR238: 20, |
| | | | | AR177: 20, AR312: 20, AR060: 19, AR226: 19, AR052: 19, AR231: 18, AR053: 18, AR309: 18, AR234: 18, AR227: 18, AR185: 17, |
| | | | | AR292: 17, AR237: 17, AR229: 16, AR258: 16, AR183: 16, AR175: 15, AR294: 14, AR256: 13, AR259: 13, AR233: 13, AR293: 11, |
| | | | | AR186: 11, AR253: 10, AR061: 10, AR266: 10, AR267: 9, AR285: 8, AR248: 8, AR270: 8, AR296: 8, AR284: 7, AR179: 7, AR289: 7, |
| | | | | AR249: 7, AR268: 6, AR269: 6, AR291: 6, AR184: 6, AR298: 5, AR286: 5, AR182: 5, AR290: 4, L0794: 6, L0748: 6, H0556: 5, |
| | | | | L0771: 5, H0052: 4, L0756: 4, L0596: 4, H0265: 3, H0341: 3, H0587: 3, L0662: 3, L0803: 3, L0790: 3, S0152: 3, L0750: 3, S0114: 2, |
| | | | | S0360: 2, H0318: 2, L0471: 2, L0369: 2, L0763: 2, L0770: 2, L0764: 2, L0766: 2, L0774: 2, L0378: 2, L0789: 2, L0666: 2, L3825: 2, |
| | | | | H0547: 2, L0747: 2, L0777: 2, L0581: 2, H0543: 2, H0422: 2, S0218: 1, H0255: 1, S0418: 1, S0354: 1, S0376: 1, S0408: 1, L3649: 1, |
| | | | | S0045: 1, H0747: 1, H0619: 1, L0717: 1, S0222: 1, H0431: 1, H0586: 1, H0013: 1, H0069: 1, S0049: 1, H0009: 1, H0071: 1, H0083: 1, |
| | | | | H0428: 1, T0006: 1, H0424: 1, H0213: 1, H0644: 1, H0628: 1, H0135: 1, H0163: 1, H0616: 1, H0413: 1, H0059: 1, H0561: 1, S0448: 1, |
| | | | | H0647: 1, L3818: 1, S0002: 1, L0769: 1, L0800: 1, L0363: 1, L0767: 1, L0768: 1, L0649: 1, L0804: 1, L0806: 1, L0657: 1, L0512: 1, |
| | | | | L0659: 1, L0384: 1, L0647: 1, L5622: 1, L5623: 1, L0664: 1, L0665: 1, S0374: 1, L3828: 1, S0126: 1, H0711: 1, H0658: 1, H0666: 1, |
| | | | | H0539: 1, H0753: 1, H0521: 1, H0522: 1, S0406: 1, H0555: 1, H0436: 1, L0439: 1, L0749: 1, S0031: 1, L0595: 1, H0136: 1, H0542: 1, |
| | | | | H0423: 1, S0424: 1 and H0352: 1. |
| 59 | HDPPQ30 | 684292 | 69 | H0542: 4, S0250: 3, H0521: 3, H0522: 3, H0485: 2, H0486: 1, H0494: 1 and H0543: 1. |
| 60 | HDQHM36 | 852328 | 70 | AR313: 50, AR039: 48, AR277: 28, AR089: 26, AR096: 26, AR300: 25, AR185: 23, AR299: 22, AR240: 17, AR316: 17, AR104: 15, |
| | | | | AR219: 12, AR282: 12, AR218: 12, AR060: 10, AR055: 6, AR283: 5, H0521: 2 |
| 61 | HDTLM18 | 836057 | 71 | AR313: 9, AR089: 5, AR299: 5, AR185: 4, AR300: 3, AR060: 3, AR096: 3, AR282: 3, AR039: 2, AR316: 2, AR055: 2, AR104: 2, |
| | | | | AR240: 1, AR277: 1, AR283: 1, H0486: 1 and L0599: 1. |
| 62 | HE2CM39 | 553651 | 72 | AR277: 46, AR283: 32, AR219: 30, AR313: 29, AR218: 25, AR316: 25, AR089: 24, AR299: 23, AR104: 23, AR282: 23, AR055: 21, |
| | | | | AR300: 20, AR185: 18, AR039: 18, AR096: 17, AR240: 17, AR060: 13, L0759: 4, L0657: 3, L0789: 3, L0439: 3, L0752: 3, L0758: 3, |
| | | | | S0360: 2, L0805: 2, L0438: 2, L0750: 2, L0777: 2, H0423: 2, H0171: 1, H0638: 1, H0351: 1, H0178: 1, H0606: 1, L0625: 1, L0769: 1, |
| | | | | L0771: 1, L0662: 1, L0794: 1, L0803: 1, L0804: 1, L0650: 1, L0774: 1, L0659: 1, L0809: 1, L0663: 1, H0436: 1, L0748: 1, L0740: 1, |
| | | | | H0445: 1, L0604: 1 and H0422: 1. |
| 63 | HE6CS65 | 762960 | 73 | AR219: 61, AR277: 59, AR218: 48, AR283: 47, AR282: 43, AR316: 39, AR089: 38, AR313: 36, AR299: 34, AR240: 33, AR104: 29, |
| | | | | AR055: 29, AR096: 29, AR039: 27, AR185: 26, AR300: 22, AR060: 21, L0777: 16, L0748: 12, L0757: 11, L0776: 8, L0439: 7, |
| | | | | H0692: 6, H0046: 6, L0769: 5, L0666: 5, S0242: 5, L0770: 4, L0771: 4, L0438: 4, L0743: 4, L0754: 4, L0749: 4, L0758: 4, S0444: 3, |
| | | | | H0051: 3, L0662: 3, L0766: 3, S0378: 3, L0751: 3, L0747: 3, S0436: 3, S0212: 2, H0637: 2, H0497: 2, H0545: 2, H0050: 2, H0031: 2, |
| | | | | H0090: 2, H0100: 2, L0768: 2, L0561: 2, L0774: 2, L0775: 2, L0657: 2, H0670: 2, S3014: 2, L0744: 2, L0752: 2, L0581: 2, H0624: 1, |
| | | | | H0170: 1, H0713: 1, H0717: 1, S6024: 1, T0049: 1, H0255: 1, S0356: 1, S0442: 1, S0358: 1, S0376: 1, S0360: 1, H0619: 1, L3651: 1, |
| | | | | L0717: 1, S0278: 1, H0391: 1, H0333: 1, H0013: 1, H0053: 1, H0575: 1, S0346: 1, H0052: 1, H0263: 1, H0596: 1, L0738: 1, H0572: 1, |
| | | | | H0510: 1, H0266: 1, H0688: 1, H0039: 1, H0622: 1, H0111: 1, H0181: 1, H0617: 1, H0032: 1, H0169: 1, H0634: 1, H0087: 1, H0412: 1, |
| | | | | S0450: 1, S0440: 1, L0639: 1, L0637: 1, L0372: 1, L0646: 1, L0651: 1, L0806: 1, L0659: 1, L0792: 1, L0664: 1, L0665: 1, S0216: 1, |
| | | | | H0144: 1, H0697: 1, S0374: 1, L3812: 1, H0520: 1, H0547: 1, H0658: 1, H0660: 1, H0648: 1, H0521: 1, H0696: 1, S0027: 1, S0028: 1, |
| | | | | L0741: 1, L0740: 1, L0779: 1, L0731: 1, L0759: 1, S0260: 1, H0445: 1, S0434: 1, L0362: 1 and L0366: 1. |
| 64 | HE6FU11 | 827236 | 74 | AR089: 8, AR104: 6, AR039: 6, AR096: 5, AR060: 5, AR313: 5, AR185: 5, AR055: 4, AR284: 4, AR266: 4, AR316: 4, AR282: 4, |
| | | | | AR292: 4, AR299: 4, AR202: 4, AR218: 3, AR289: 3, AR283: 3, AR298: 3, AR277: 3, AR182: 3, AR184: 3, AR280: 3, AR250: 3, |
| | | | | AR219: 3, AR315: 3, AR281: 3, AR300: 3, AR169: 3, AR294: 3, AR240: 3, AR291: 3, AR268: 2, AR172: 2, AR033: 2, AR270: 2, |
| | | | | AR248: 2, AR310: 2, AR175: 2, AR238: 2, AR241: 2, AR265: 2, AR232: 2, AR285: 2, AR183: 2, AR177: 2, AR227: 2, AR269: 2, |
| | | | | AR263: 2, AR290: 2, AR288: 2, AR293: 2, AR229: 2, AR267: 2, AR061: 2, AR176: 2, AR257: 2, AR271: 2, AR296: 2, AR286: 2, |
| | | | | AR272: 2, AR259: 1, AR206: 1, AR256: 1, AR214: 1, AR231: 1, AR247: 1, AR295: 1, AR204: 1, AR237: 1, AR226: 1, AR234: 1, |
| | | | | AR308: 1, AR253: 1, AR053: 1, AR311: 1, AR205: 1, AR243: 1, AR233: 1, AR173: 1, AR312: 1, AR251: 1, AR314: 1, L0759: 2, |
| | | | | H0706: 1, H0123: 1, H0024: 1, H0100: 1, L0794: 1 and L0789: 1. |
| 65 | HE6FV29 | 588454 | 75 | AR219: 37, AR218: 36, AR315: 34, AR280: 34, AR271: 33, AR244: 29, AR089: 29, AR314: 29, AR243: 28, AR281: 26, AR282: 25, |
| | | | | AR273: 25, AR205: 24, AR192: 22, AR206: 22, AR198: 19, AR247: 19, AR316: 19, AR039: 19, AR231: 18, AR269: 17, AR246: 17, |
| | | | | AR204: 16, AR234: 16, AR299: 16, AR313: 15, AR194: 15, AR055: 14, AR186: 14, AR237: 14, AR060: 14, AR241: 13, AR270: 13, |
| | | | | AR293: 12, AR240: 12, AR232: 11, AR238: 11, AR251: 10, AR300: 10, AR061: 10, AR233: 10, AR227: 10, AR291: 9, AR185: 9, |
| | | | | AR202: 9, AR266: 9, AR226: 9, AR229: 9, AR184: 8, AR179: 8, AR182: 8, AR175: 8, AR312: 8, AR268: 8, AR289: 7, AR284: 7, |
| | | | | AR249: 7, AR183: 7, AR310: 7, AR267: 7, AR052: 7, AR033: 7, AR296: 7, AR290: 7, AR265: 7, AR177: 7, AR309: 7, AR292: 6, |
| | | | | AR298: 6, AR275: 6, AR277: 6, AR285: 6, AR294: 5, AR248: 5, AR053: 5, AR253: 5, AR295: 5, AR286: 5, AR259: 5, AR274: 4, |
| | | | | AR258: 4, AR213: 4, AR096: 4, AR256: 4, AR104: 4, AR283: 3, AR263: 2, S0440: 32, S0476: 22, H0494: 20, L0754: 17, S0372: 16, |
| | | | | S0132: 13, L0666: 13, S0330: 13, H0046: 12, H0586: 11, H0587: 11, S0328: 11, S0360: 10, S0436: 9, S0356: 8, H0622: 8, S0003: 7, |
| | | | | L0806: 7, H0648: 7, L0747: 7, L0752: 7, H0674: 6, L0777: 6, L0362: 6, L0662: 5, L0659: 5, L0601: 5, S0430: 4, S0358: 4, S0408: 4, |
| | | | | H0592: 4, S0214: 4, H0039: 4, H0031: 4, H0551: 4, H0264: 4, H0560: 4, L0763: 4, L0653: 4, L5623: 4, L0663: 4, S0376: 3, S0444: 3, |
| | | | | S0410: 3, H0370: 3, H0600: 3, H0644: 3, L0646: 3, L0649: 3, L0776: 3, L0783: 3, L0809: 3, L0665: 3, H0696: 3, S0406: 3, S3014: 3, |
| | | | | L0755: 3, S0434: 3, L0591: 3, H0170: 2, S0134: 2, H0662: 2, S0442: 2, H0393: 2, H0596: 2, H0597: 2, H0688: 2, H0553: 2, H0032: 2, |
| | | | | H0169: 2, H0598: 2, H0090: 2, H0379: 2, H0380: 2, L0770: 2, L0372: 2, L0549: 2, L0376: 2, L0517: 2, L0518: 2, L5622: 2, H0658: 2, |
| | | | | H0670: 2, S0380: 2, S0152: 2, S0350: 2, S0027: 2, L0744: 2, L0779: 2, L0759: 2, L0599: 2, S0196: 2, S0456: 2, H0171: 1, H0556: 1, |
| | | | | T0002: 1, H0713: 1, H0483: 1, H0663: 1, L0005: 1, S0354: 1, T0008: 1, H0742: 1, H0741: 1, H0411: 1, H0549: 1, T0039: 1, H0013: 1, |
| | | | | L0021: 1, H0349: 1, S0010: 1, H0204: 1, L0738: 1, H0545: 1, H0014: 1, H0015: 1, H0373: 1, H0355: 1, H0510: 1, H0615: 1, L0483: 1, |
| | | | | L0142: 1, L0143: 1, H0166: 1, H0673: 1, H0708: 1, H0591: 1, H0038: 1, H0040: 1, H0634: 1, T0067: 1, H0272: 1, H0487: 1, H0412: 1, |
| | | | | H0623: 1, H0059: 1, H0100: 1, S0352: 1, S0382: 1, S0448: 1, S0306: 1, S0438: 1, S0472: 1, H0646: 1, L0503: 1, L0640: 1, L0637: 1, |
| | | | | L0761: 1, L0772: 1, L0764: 1, L0771: 1, L0648: 1, L0794: 1, L5564: 1, L0551: 1, L0805: 1, L0382: 1, L0519: 1, L0789: 1, L0532: 1, |
| | | | | L0664: 1, H0144: 1, H0520: 1, H0547: 1, S0126: 1, H0689: 1, H0711: 1, H0435: 1, H0659: 1, H0666: 1, S0378: 1, H0704: 1, S0044: 1, |
| | | | | H0555: 1, S0392: 1, S0322: 1, L0748: 1, L0740: 1, L0745: 1, L0749: 1, L0756: 1, L0757: 1 and S0242: 1. |
| 66 | HE8BQ49 | 589443 | 76 | H0013: 2 |
| 67 | HE8SG96 | 862016 | 77 | AR052: 43, AR184: 40, AR248: 40, AR249: 35, AR253: 33, AR312: 30, AR053: 28, AR313: 25, AR265: 24, AR213: 24, AR310: 23, |
| | | | | AR096: 22, AR173: 22, AR263: 21, AR165: 20, AR309: 20, AR164: 19, AR247: 18, AR183: 18, AR166: 18, AR257: 17, AR299: 17, |
| | | | | AR290: 17, AR269: 17, AR270: 17, AR175: 17, AR218: 16, AR268: 16, AR258: 16, AR238: 15, AR229: 15, AR292: 15, AR162: 15, |
| | | | | AR161: 15, AR293: 14, AR300: 14, AR262: 14, AR163: 14, AR284: 14, AR259: 13, A2R251: 13, AR219: 13, AR039: 13, AR226: 13, |
| | | | | AR267: 12, AR296: 12, AR182: 12, AR231: 12, AR240: 11, AR177: 11, AR285: 11, AR298: 11, AR179: 11, AR191: 11, AR237: 10, |
| | | | | AR281: 10, AR236: 10, AR291: 10, AR286: 10, AR316: 10, AR260: 10, AR089: 10, AR294: 10, AR228: 9, AR234: 9, AR255: 9, |
| | | | | AR280: 9, AR315: 9, AR199: 9, AR282: 8, AR239: 8, AR314: 8, AR185: 8, AR256: 8, AR196: 8, AR033: 8, AR295: 8, AR289: 8, |
| | | | | AR055: 8, AR287: 7, AR235: 7, AR288: 7, AR212: 7, AR232: 7, AR266: 7, AR203: 7, AR180: 7, AR178: 6, AR242: 6, AR061: 6, |
| | | | | AR261: 6, AR297: 6, AR200: 6, AR277: 6, AR197: 6, AR230: 6, AR189: 6, AR233: 6, AR250: 6, AR227: 6, AR264: 6, AR192: 5, |
| | | | | AR207: 5, AR172: 5, AR308: 5, AR245: 5, AR193: 5, AR181: 5, AR060: 5, AR170: 5, AR168: 5, AR188: 5, AR171: 4, AR311: 4, |
| | | | | AR214: 4, AR283: 4, AR216: 4, AR241: 4, AR210: 4, AR223: 4, AR190: 4, AR104: 4, AR195: 4, AR201: 4, AR224: 4, AR254: 3, |
| | | | | AR222: 3, AR275: 3, AR217: 3, AR274: 3, AR169: 3, AR225: 3, AR272: 3, AR211: 3, AR204: 3, AR186: 2, AR271: 2, AR205: 2, |
| | | | | AR198: 2, AR176: 2, AR243: 2, AR174: 2, AR215: 1, H0244: 1 and S0106: 1. |
| 68 | HE9EA10 | 827796 | 78 | L0794: 12, H0620: 3, L0756: 2, L0759: 2, S0408: 1, S0049: 1, H0544: 1, H0012: 1, H0615: 1, H0040: 1, L0764: 1, L0803: 1, L0806: 1, |
| | | | | L0789: 1, H0144: 1, H0547: 1, L0779: 1, L0597: 1 and L0595: 1. |
| 69 | HE9GG20 | 633719 | 79 | AR104: 15, AR055: 10, AR089: 10, AR060: 9, AR277: 7, AR185: 7, AR300: 7, AR218: 6, AR299: 6, AR313: 6, AR096: 6, AR282: 5, |
| | | | | AR316: 5, AR219: 5, AR283: 5, AR039: 5, AR240: 5, L0748: 6, H0144: 3, S0010: 2, S0474: 2, L0439: 2, L0749: 2, H0717: 1, H0662: 1, |
| | | | | H0734: 1, S6022: 1, S0222: 1, S0280: 1, L0109: 1, H0163: 1, L0639: 1, L0659: 1, L0744: 1, L0745: 1, L0747: 1, L0756: 1, L0596: 1 and |
| | | | | S0276: 1. |
| 70 | HEAAW94 | 847340 | 80 | AR282: 3, AR218: 3, AR299: 2, AR039: 2, AR277: 2, AR096: 1, AR316: 1, AR055: 1, AR300: 1, L0439: 26, L0438: 20, L0748: 17, |
| | | | | L0766: 16, L0754: 16, L0731: 16, H0556: 9, L0740: 8, S0222: 7, H0090: 7, L0774: 7, H0144: 6, L0745: 6, L0779: 6, L0777: 6, |
| | | | | L0758: 6, S0003: 5, L0662: 5, L0794: 5, S0418: 4, H0575: 4, L0776: 4, L0751: 4, L0749: 4, L0756: 4, L0780: 4, L0752: 4, L0591: 4, |
| | | | | H0423: 4, H0341: 3, S0360: 3, H0369: 3, H0156: 3, L0435: 3, L0769: 3, L0775: 3, L0809: 3, L0666: 3, H0547: 3, S0328: 3, H0521: 3, |
| | | | | L0747: 3, L0750: 3, H0543: 3, H0171: 2, S0442: 2, S0354: 2, S0358: 2, S0132: 2, S0278: 2, H0497: 2, T0039: 2, H0706: 2, H0036: 2, |
| | | | | S0474: 2, H0596: 2, H0009: 2, H0375: 2, S6028: 2, H0266: 2, S0214: 2, H0328: 2, H0622: 2, H0644: 2, H0591: 2, H0413: 2, T0041: 2, |
| | | | | L0770: 2, L0796: 2, L0363: 2, L0806: 2, L0659: 2, L0542: 2, L0783: 2, L0791: 2, L0665: 2, L3811: 2, H0518: 2, S3014: 2, S0028: 2, |
| | | | | H0595: 2, S0434: 2, S0436: 2, L0589: 2, L0604: 2, L0601: 2, H0542: 2, S0424: 2, L0411: 1, H0624: 1, H0170: 1, L0615: 1, H0265: 1, |
| | | | | S0342: 1, S6024: 1, S0134: 1, H0657: 1, S0212: 1, H0450: 1, S0420: 1, L0005: 1, S0444: 1, H0580: 1, H0741: 1, S0045: 1, S0476: 1, |
| | | | | H0393: 1, H0550: 1, H0441: 1, H0370: 1, H0600: 1, H0586: 1, H0587: 1, H0486: 1, H0250: 1, H0635: 1, L0021: 1, S0182: 1, L0563: 1, |
| | | | | H0052: 1, H0309: 1, H0046: 1, L0157: 1, H0566: 1, H0081: 1, H0050: 1, H0057: 1, S0051: 1, S0318: 1, S0316: 1, H0687: 1, S0250: 1, |
| | | | | H0615: 1, H0428: 1, H0039: 1, L0483: 1, H0553: 1, L0055: 1, H0032: 1, H0673: 1, S0366: 1, H0038: 1, H0634: 1, H0380: 1, H0488: 1, |
| | | | | H0623: 1, H0059: 1, S0112: 1, L0351: 1, H0641: 1, H0646: 1, S0344: 1, S0002: 1, S0426: 1, L0638: 1, L4747: 1, L0761: 1, L0627: 1, |
| | | | | L0372: 1, L0646: 1, L0374: 1, L0644: 1, L0771: 1, L0767: 1, L0768: 1, L0549: 1, L0550: 1, L0533: 1, L0804: 1, L0650: 1, L0375: 1, |
| | | | | L0651: 1, L0523: 1, L0655: 1, L0782: 1, L0790: 1, L0663: 1, L0664: 1, S0148: 1, L0352: 1, H0520: 1, H0519: 1, S0126: 1, H0672: 1, |
| | | | | H0754: 1, S0152: 1, H0522: 1, H0696: 1, S0044: 1, S0406: 1, L0612: 1, S3012: 1, L0746: 1, L0786: 1, L0759: 1, H0445: 1, L0684: 1, |
| | | | | L0608: 1, H0667: 1, S0276: 1 and H0422: 1. |
| 71 | HEBCI18 | 831464 | 81 | AR055: 8, AR060: 7, AR240: 7, AR185: 6, AR104: 6, AR283: 5, AR089: 5, AR300: 5, AR218: 4, AR299: 4, AR313: 4, AR316: 4, |
| | | | | AR096: 3, AR277: 3, AR219: 2, AR039: 2, AR282: 2 |
| 72 | HEBCY54 | 600355 | 82 | AR104: 9, AR277: 6, AR283: 5, AR055: 4, AR096: 4, AR060: 4, AR240: 4, AR282: 2, AR316: 2, AR185: 2, AR300: 2, AR299: 2, |
| | | | | AR089: 2, AR039: 2, AR313: 1, AR218: 1, L0438: 3, L0748: 3, T0010: 2, L0351: 2, L0769: 2, H0521: 2, L0439: 2, L0747: 2, S0116: 1, |
| | | | | S0354: 1, S0007: 1, H0619: 1, H0253: 1, H0565: 1, H0135: 1, L0641: 1, L0521: 1, L0774: 1, L0809: 1, L0789: 1, H0520: 1, L0755: 1, |
| | | | | L0758: 1 and H0445: 1. |
| 73 | HEBDQ91 | 840288 | 83 | AR218: 18, AR219: 15, AR104: 14, AR185: 11, AR055: 10, AR060: 9, AR313: 9, AR299: 8, AR096: 7, AR089: 7, AR282: 7, |
| | | | | AR316: 6, AR240: 6, AR277: 6, AR283: 6, AR039: 5, AR300: 5, S0007: 5, L0805: 3, S6026: 1, L0769: 1, L0438: 1, L0741: 1, L0748: 1 |
| | | | | and L0758: 1. |
| 74 | HEBFR46 | 847064 | 84 | AR313: 58, AR039: 47, AR300: 30, AR096: 29, AR299: 29, AR277: 28, AR089: 27, AR185: 27, AR316: 22, AR219: 22, AR104: 21, |
| | | | | AR218: 20, AR240: 20, AR282: 15, AR060: 15, AR055: 11, AR283: 7, H0457: 10, H0550: 5, H0436: 5, H0549: 4, H0616: 4, L0519: 4, |
| | | | | H0556: 3, H0580: 3, S0007: 3, S0046: 3, L0809: 3, L0747: 3, L0777: 3, S0436: 3, H0295: 2, T0040: 2, H0266: 2, L0761: 2, L0783: 2, |
| | | | | L0789: 2, H0658: 2, H0521: 2, L0753: 2, L0731: 2, L0596: 2, H0543: 2, S0040: 1, S0116: 1, S0282: 1, H0662: 1, H0402: 1, H0125: 1, |
| | | | | L0534: 1, L0562: 1, S0356: 1, S0358: 1, H0749: 1, L3816: 1, H0559: 1, H0069: 1, H0599: 1, H0618: 1, H0253: 1, H0581: 1, H0546: 1, |
| | | | | H0123: 1, S0051: 1, H0083: 1, H0687: 1, H0284: 1, H0124: 1, H0038: 1, H0551: 1, H0623: 1, S0038: 1, T0041: 1, S0440: 1, S0150: 1, |
| | | | | L3818: 1, S0002: 1, L0763: 1, L0769: 1, L5575: 1, L0627: 1, L0800: 1, L0662: 1, L0803: 1, L0793: 1, L0666: 1, L2264: 1, L3825: 1, |
| | | | | L3827: 1, L3828: 1, H0547: 1, H0519: 1, H0539: 1, S0037: 1, S0206: 1, L0748: 1, L0749: 1, H0595: 1, L0593: 1, S0194: 1 and S0276: 1. |
| 75 | HEBGE07 | 798096 | 85 | S0007: 1 |
| 76 | HEBGE23 | 836129 | 86 | AR282: 4, AR313: 4, AR316: 3, AR089: 3, AR060: 3, AR055: 3, AR185: 3, AR104: 2, AR240: 2, AR218: 2, AR219: 2, AR096: 2, |
| | | | | AR299: 2, AR039: 2, AR277: 1, L0809: 7, L0758: 7, S0007: 4, L0662: 4, L0794: 4, L0665: 4, L0439: 4, L0754: 4, H0333: 3, L0769: 3, |
| | | | | L0761: 3, L0803: 3, H0395: 2, S0222: 2, H0052: 2, H0124: 2, S0036: 2, L0535: 2, L0666: 2, H0658: 2, L0751: 2, L0747: 2, L0592: 2, |
| | | | | L0485: 2, H0716: 1, H0295: 1, H0402: 1, H0125: 1, S0418: 1, S0442: 1, H0733: 1, H0734: 1, H0619: 1, H0586: 1, L0623: 1, H0486: 1, |
| | | | | S0280: 1, L0021: 1, H0618: 1, H0318: 1, S0474: 1, H0251: 1, H0123: 1, H0050: 1, S0051: 1, H0179: 1, H0615: 1, T0006: 1, H0673: 1, |
| | | | | H0087: 1, H0264: 1, H0100: 1, L0763: 1, L5565: 1, L0667: 1, L0772: 1, L0644: 1, L0768: 1, L0775: 1, L0805: 1, L0655: 1, L0659: 1, |
| | | | | L0526: 1, L5623: 1, L0663: 1, S0052: 1, H0682: 1, H0660: 1, L0602: 1, L0743: 1, L0750: 1, L0756: 1, L0779: 1, L0777: 1, H0136: 1 |
| | | | | and S0424: 1. |
| 77 | HEGAU15 | 834379 | 87 | AR299: 9, AR039: 8, AR300: 8, AR055: 7, AR240: 7, AR060: 7, AR313: 6, AR282: 6, AR277: 6, AR104: 5, AR089: 5, AR096: 5, |
| | | | | AR185: 5, AR316: 4, AR283: 4, AR218: 4, AR219: 3, H0550: 2, L0749: 2, H0318: 1 and H0555: 1. |
| 78 | HFCEI04 | 692438 | 88 | AR055: 7, AR060: 7, AR104: 6, AR240: 6, AR282: 6, AR218: 5, AR185: 5, AR283: 5, AR089: 4, AR300: 4, AR313: 3, AR299: 3, |
| | | | | AR316: 3, AR096: 3, AR039: 3, AR277: 3, AR219: 2, H0009: 3 |
| 79 | HFEAY59 | 658685 | 89 | AR055: 5, AR277: 5, AR283: 5, AR060: 4, AR282: 4, AR104: 4, AR300: 3, AR240: 3, AR316: 2, AR039: 2, AR089: 2, AR096: 2, |
| | | | | AR218: 2, AR185: 2, AR219: 1, AR299: 1, H0081: 2 and H0586: 1. |
| 80 | HFEBO17 | 852218 | 90 | AR089: 12, AR218: 11, AR060: 10, AR299: 10, AR219: 10, AR313: 9, AR055: 9, AR316: 9, AR240: 8, AR282: 8, AR096: 8, |
| | | | | AR185: 8, AR104: 7, AR039: 7, AR277: 7, AR300: 6, AR283: 4, L0803: 4, L0438: 4, L0766: 2, L0526: 2, H0659: 2, S0444: 1, S0408: 1, |
| | | | | H0421: 1, H0081: 1, H0050: 1, S0370: 1, L0770: 1, L0637: 1, L0646: 1, L0800: 1, L0662: 1, L0804: 1, L0607: 1, L0659: 1, L0790: 1, |
| | | | | L0665: 1, L0352: 1, H0648: 1, H0651: 1, S0328: 1, H0436: 1, L0749: 1, L0750: 1, L0777: 1, L0752: 1, L0599: 1, S0242: 1 and |
| | | | | H0422: 1. |
| 81 | HFIJA68 | 847074 | 91 | AR241: 47, AR313: 34, AR039: 26, AR089: 24, AR198: 24, AR192: 23, AR204: 18, AR183: 17, AR299: 16, AR229: 16, AR218: 16, |
| | | | | AR096: 15, AR185: 15, AR300: 14, AR271: 14, AR275: 14, AR240: 13, AR247: 13, AR243: 12, AR238: 12, AR194: 12, AR316: 12, |
| | | | | AR258: 12, AR226: 12, AR219: 11, AR177: 11, AR293: 11, AR274: 10, AR175: 10, AR273: 10, AR277: 10, AR233: 9, AR312: 9, |
| | | | | AR280: 9, AR234: 9, AR104: 9, AR315: 9, AR292: 8, AR269: 8, AR231: 8, AR205: 8, AR314: 7, AR060: 7, AR295: 7, AR265: 7, |
| | | | | AR237: 7, AR053: 7, AR179: 7, AR186: 7, AR270: 7, AR281: 7, AR052: 7, AR267: 6, AR268: 6, AR227: 6, AR294: 6, AR249: 6, |
| | | | | AR202: 6, AR033: 6, AR182: 6, AR184: 6, AR246: 6, AR259: 6, AR256: 5, AR213: 5, AR282: 5, AR232: 4, AR206: 4, AR309: 4, |
| | | | | AR253: 4, AR310: 4, AR296: 4, AR251: 4, AR055: 3, AR290: 3, AR248: 3, AR291: 3, AR286: 3, AR285: 2, AR298: 2, AR263: 2, |
| | | | | AR289: 2, AR061: 2, AR244: 2, AR284: 2, AR283: 2, AR266: 1, S0194: 1 |
| 82 | HFKES05 | 827572 | 92 | L0777: 7, S0358: 5, L0439: 5, L0751: 5, H0135: 4, H0265: 3, H0556: 3, L0770: 3, L0769: 3, L0662: 3, L0768: 3, L0731: 3, H0305: 2, |
| | | | | H0083: 2, L0142: 2, S0208: 2, S0002: 2, L0663: 2, L0665: 2, H0521: 2, L0741: 2, L0747: 2, L0779: 2, H0543: 2, H0149: 1, H0657: 1, |
| | | | | S0116: 1, S0001: 1, H0663: 1, S0356: 1, S0354: 1, H0580: 1, S0045: 1, H0549: 1, S6014: 1, H0309: 1, H0085: 1, H0234: 1, H0597: 1, |
| | | | | H0544: 1, H0546: 1, H0123: 1, H0012: 1, H0024: 1, H0356: 1, H05941, T0006: 1, H0424: 1, H0644: 1, H0182: 1, H0617: 1, L0055: 1, |
| | | | | H0673: 1, H0169: 1, H0038: 1, H0040: 1, H0100: 1, L0351: 1, T0041: 1, H0561: 1, H0132: 1, L0763: 1, L0638: 1, L0637: 1, L0372: 1, |
| | | | | L0765: 1, L0648: 1, L0649: 1, L0774: 1, L0375: 1, L0807: 1, L0545: 1, L0529: 1, L0788: 1, L0666: 1, L0664: 1, S0374: 1, H0691: 1, |
| | | | | H0658: 1, H0670: 1, H0666: 1, S0044: 1, S0028: 1, L0744: 1, L0749: 1, L0755: 1, L0758: 1, H0445: 1, S0436: 1, L0593: 1 and |
| | | | | H0352: 1. |
| 83 | HFKFX64 | 566835 | 93 | AR273: 15, AR244: 9, AR274: 9, AR192: 9, AR184: 8, AR186: 8, AR204: 8, AR052: 7, AR243: 7, AR202: 7, AR269: 7, AR271: 6, |
| | | | | AR198: 6, AR206: 6, AR312: 6, AR246: 6, AR247: 6, AR241: 5, AR213: 5, AR275: 5, AR309: 5, AR253: 5, AR061: 5, AR055: 5, |
| | | | | AR267: 5, AR182: 5, AR060: 5, AR268: 4, AR053: 4, AR282: 4, AR205: 4, AR194: 4, AR185: 4, AR033: 3, AR183: 3, AR277: 3, |
| | | | | AR270: 3, AR240: 3, AR266: 3, AR310: 3, AR104: 3, AR291: 3, AR313: 3, AR248: 3, AR219: 3, AR249: 3, AR265: 3, AR251: 3, |
| | | | | AR300: 3, AR295: 2, AR229: 2, AR237: 2, AR294: 2, AR299: 2, AR218: 2, AR293: 2, AR233: 2, AR238: 2, AR283: 2, AR292: 2, |
| | | | | AR175: 2, AR226: 2, AR316: 2, AR039: 2, AR089: 2, AR227: 2, AR296: 2, AR231: 2, AR234: 2, AR289: 2, AR096: 2, AR298: 2, |
| | | | | AR177: 2, AR286: 1, AR259: 1, AR256: 1, AR179: 1, AR263: 1, H0012: 3 and L0809: 1. |
| 84 | HFPCZ55 | 840840 | 94 | L0756: 6, L0439: 4, L0777: 4, L0662: 3, H0672: 3, S0358: 2, L0659: 2, L0666: 2, S0031: 2, S0360: 1, H0411: 1, H0369: 1, S0222: 1, |
| | | | | S0220: 1, S0005: 1, H0575: 1, T0082: 1, H0050: 1, S6028: 1, H0169: 1, H0100: 1, L0769: 1, L0774: 1, L0776: 1, L0647: 1, L0663: 1, |
| | | | | H0660: 1, H0651: 1, S0146: 1, L0743: 1, L0757: 1, L0361: 1 and L0462: 1. |
| 85 | HFTAS49 | 847386 | 95 | L0750: 10, L0779: 7, L0777: 7, L0731: 7, L0805: 6, L0766: 5, L0770: 4, L0769: 4, L0761: 4, L0776: 4, L0752: 4, L0794: 3, L0751: 3, |
| | | | | L0754: 3, H0140: 2, L0803: 2, L0747: 2, L0755: 2, L0759: 2, S0218: 1, H0657: 1, S0282: 1, S0376: 1, H0580: 1, H0734: 1, S0046: 1, |
| | | | | H0747: 1, H0392: 1, H0497: 1, H0635: 1, H0575: 1, S0346: 1, S0474: 1, S0049: 1, H0123: 1, L0471: 1, H0024: 1, L0051: 1, H0031: 1, |
| | | | | H0412: 1, H0560: 1, S0002: 1, S0426: 1, H0743: 1, L0763: 1, L0772: 1, L0374: 1, L0375: 1, L0806: 1, L0382: 1, L0809: 1, S0126: 1, |
| | | | | H0659: 1, S0044: 1, S0190: 1, L0439: 1, L0745: 1, L0756: 1, L0753: 1, L0608: 1 and L0604: 1. |
| 86 | HFVHW43 | 570948 | 96 | H0393: 1 |
| 87 | HGBER72 | 826710 | 97 | AR313: 68, AR039: 56, AR299: 36, AR185: 31, AR096: 30, AR300: 28, AR277: 27, AR089: 27, AR219: 25, AR316: 22, AR218: 21, |
| | | | | AR104: 20, AR282: 17, AR060: 15, AR240: 14, AR055: 11, AR283: 7, L0766: 12, H0436: 9, H0543: 8, L0769: 6, L0749: 6, L0731: 6, |
| | | | | H0556: 5, L0655: 5, S0434: 5, L0439: 4, L0758: 4, S0114: 3, H0255: 3, L3904: 3, L0794: 3, L0776: 3, L0659: 3, L0783: 3, L0809: 3, |
| | | | | L0751: 3, H0423: 3, S0358: 2, S0360: 2, S0007: 2, H0549: 2, H0550: 2, H0486: 2, H0014: 2, S0388: 2, H0424: 2, H0031: 2, H0628: 2, |
| | | | | L05575: 2, L0771: 2, L0662: 2, L0791: 2, L0793: 2, L2265: 2, L0438: 2, S0328: 2, L0740: 2, L0756: 2, H0265: 1, H0686: 1, S0134: 1, |
| | | | | H0657: 1, H0656: 1, S0001: 1, S0418: 1, L0619: 1, S0442: 1, S0408: 1, H0730: 1, H0749: 1, H0619: 1, H0351: 1, S0222: 1, H0592: 1, |
| | | | | H0586: 1, T0060: 1, H0250: 1, H0618: 1, H0318: 1, H0052: 1, H0251: 1, H0545: 1, H0569: 1, H0012: 1, H0201: 1, S6028: 1, H0288: 1, |
| | | | | H0622: 1, T0023: 1, L0483: 1, H0604: 1, S0036: 1, H0135: 1, H0040: 1, H0264: 1, S0039: 1, L0640: 1, L0763: 1, L0770: 1, L0761: 1, |
| | | | | L0648: 1, L0521: 1, L0533: 1, L0774: 1, L0775: 1, L0376: 1, L0378: 1, L0629: 1, L5623: 1, L0666: 1, L0664: 1, S0310: 1, L3811: 1, |
| | | | | H0689: 1, H0659: 1, H0660: 1, H0648: 1, H0696: 1, H0576: 1, S0028: 1, L0742: 1, L0750: 1, L0779: 1, L0777: 1, L0752: 1, L0591: 1, |
| | | | | L0601: 1, H0542: 1 and H0506: 1. |
| 88 | HGBHP91 | 693011 | 98 | AR313: 32, AR039: 24, AR299: 22, AR089: 21, AR185: 17, AR096: 16, AR060: 15, AR316: 13, AR300: 13, AR277: 13, AR240: 12, |
| | | | | AR218: 11, AR055: 11, AR104: 11, AR282: 9, AR219: 9, AR283: 5, H0014: 1 |
| 89 | HGLBG15 | 701990 | 99 | AR055: 14, AR162: 7, AR161: 7, AR163: 7, AR104: 6, AR060: 6, AR218: 6, AR191: 6, AR089: 6, AR197: 6, AR261: 6, AR269: 5, |
| | | | | AR170: 5, AR176: 5, AR165: 5, AR185: 5, AR188: 5, AR164: 5, AR189: 5, AR291: 5, AR166: 5, AR246: 5, AR190: 5, AR096: 5, |
| | | | | AR257: 4, AR240: 4, AR243: 4, AR288: 4, AR309: 4, AR272: 4, AR316: 4, AR275: 4, AR270: 4, AR175: 4, AR290: 4, AR274: 4, |
| | | | | AR053: 4, AR219: 4, AR289: 4, AR264: 4, AR255: 4, AR199: 4, AR268: 4, AR204: 4, AR286: 4, AR271: 4, AR039: 4, AR205: 3, |
| | | | | AR173: 3, AR196: 3, AR233: 3, AR287: 3, AR262: 3, AR215: 3, AR267: 3, AR300: 3, AR200: 3, AR177: 3, AR296: 3, AR181: 3, |
| | | | | AR283: 3, AR299: 3, AR295: 3, AR239: 3, AR311: 3, AR282: 3, AR297: 3, AR174: 3, AR285: 3, AR294: 3, AR293: 3, AR168: 3, |
| | | | | AR201: 3, AR238: 3, AR235: 3, AR217: 3, AR313: 3, AR198: 3, AR312: 3, AR258: 3, AR203: 3, AR178: 3, AR254: 3, AR211: 2, |
| | | | | AR263: 2, AR247: 2, AR193: 2, AR237: 2, AR266: 2, AR277: 2, AR256: 2, AR182: 2, AR171: 2, AR210: 2, AR250: 2, AR260: 2, |
| | | | | AR195: 2, AR172: 2, AR207: 2, AR236: 2, AR232: 2, AR221: 2, AR226: 2, AR224: 2, AR216: 1, AR179: 1, AR033: 1, AR061: 1, |
| | | | | AR252: 1, L0803: 19, S0474: 17, L0748: 13, S0408: 11, H0351: 11, L2669: 11, L2504: 10, L0770: 10, L0805: 9, L0439: 9, L0754: 9, |
| | | | | S0422: 8, L0809: 8, L0794: 6, L0755: 6, L0731: 6, L0758: 6, S0360: 5, H0265: 4, S0414: 4, H0581: 4, H0271: 4, L0771: 4, L0804: 4, |
| | | | | L0776: 4, L0659: 4, L0666: 4, L0749: 4, L0591: 4, H0327: 3, L0806: 3, L0655: 3, L0636: 3, L0565: 3, H0436: 3, L0777: 3, S0434: 3, |
| | | | | S0436: 3, S0412: 3, S0116: 2, S0212: 2, H0661: 2, S0358: 2, S0132: 2, L3388: 2, S0222: 2, H0123: 2, H0266: 2, S0003: 2, H0031: 2, |
| | | | | H0551: 2, L0598: 2, L0638: 2, L0662: 2, L0766: 2, L0650: 2, L0664: 2, L0665: 2, S0374: 2, H0547: 2, H0435: 2, H0660: 2, S0378: 2, |
| | | | | L0740: 2, L0750: 2, L0756: 2, L0752: 2, H0624: 1, H0556: 1, S0040: 1, H0295: 1, S0114: 1, H0656: 1, L2904: 1, S0001: 1, H0671: 1, |
| | | | | S0356: 1, S0442: 1, S0376: 1, S0444: 1, H0675: 1, H0730: 1, H0741: 1, H0208: 1, S0045: 1, S0476: 1, H0393: 1, H0550: 1, H0431: 1, |
| | | | | H0586: 1, H0642: 1, L3499: 1, H0013: 1, H0069: 1, H0635: 1, H0427: 1, H0156: 1, L0021: 1, H0042: 1, T0082: 1, H0590: 1, S0010: 1, |
| | | | | S0318: 1, H0251: 1, H0596: 1, L0040: 1, H0545: 1, H0457: 1, H0009: 1, N0006: 1, L0471: 1, H0024: 1, H0051: 1, H0083: 1, H0061: 1, |
| | | | | S0316: 1, H0687: 1, H0688: 1, H0644: 1, H0617: 1, H0591: 1, H0038: 1, H0040: 1, H0616: 1, H0264: 1, H0100: 1, H0561: 1, S0440: 1, |
| | | | | L2270: 1, S0426: 1, H0529: 1, L0763: 1, L0637: 1, L0761: 1, L0373: 1, L0646: 1, L0800: 1, L0764: 1, L0626: 1, L0653: 1, L0606: 1, |
| | | | | L0661: 1, L0515: 1, L5622: 1, L0789: 1, L0792: 1, L0793: 1, L0663: 1, L2653: 1, L2257: 1, L2259: 1, L2261: 1, L2654: 1, H0144: 1, |
| | | | | L0438: 1, H0520: 1, H0519: 1, H0659: 1, H0658: 1, S0328: 1, S0330: 1, S0380: 1, H0710: 1, H0521: 1, H0522: 1, H0696: 1, S0044: 1, |
| | | | | S0406: 1, S0027: 1, L0742: 1, L0744: 1, L0751: 1, L0745: 1, L0747: 1, L0779: 1, L0780: 1, L0757: 1, L0759: 1, S0031: 1, S0260: 1, L0596: 1, |
| | | | | L0605: 1, L0595: 1, S0026: 1, S0192: 1, S0242: 1, H0542: 1, H0543: 1, S0042: 1 and S0462: 1. |
| 90 | HHEAK45 | 765278 | 100 | AR277: 12, AR283: 11, AR313: 11, AR316: 9, AR282: 9, AR089: 7, AR240: 7, AR104: 7, AR299: 7, AR039: 7, AR218: 6, AR096: 6, |
| | | | | AR055: 6, AR300: 6, AR185: 6, AR060: 4, AR219: 3, L0758: 9, L0748: 6, L0747: 6, L0779: 5, L0750: 4, H0556: 3, S0440: 3, H0658: 3, |
| | | | | H0656: 2, L0770: 2, L0769: 2, L0804: 2, L0774: 2, H0144: 2, H0648: 2, L0439: 2, L0749: 2, L0596: 2, H0265: 1, S0444: 1, H0318: 1, |
| | | | | H0597: 1, H0050: 1, H0024: 1, H0135: 1, H0090: 1, H0038: 1, H0616: 1, H0494: 1, L0065: 1, S0422: 1, H0529: 1, L0637: 1, L0764: 1, |
| | | | | L0768: 1, L0794: 1, L0387: 1, L0803: 1, L0805: 1, L0809: 1, L0788: 1, L0790: 1, L0664: 1, L0438: 1, H0555: 1, L0780: 1, L0731: 1, |
| | | | | H0444: 1, H0542: 1, H0543: 1 and H0423: 1. |
| 91 | HHEOW19 | 886174 | 101 | AR169: 30, AR089: 25, AR207: 25, AR308: 25, AR214: 24, AR263: 24, AR165: 24, AR264: 24, AR164: 23, AR161: 23, AR168: 23, |
| | | | | AR222: 23, AR171: 22, AR283: 22, AR166: 22, AR162: 22, AR311: 21, AR163: 21, AR096: 21, AR223: 21, AR213: 19, AR104: 19, |
| | | | | AR316: 19, AR219: 19, AR218: 18, AR217: 18, AR312: 18, AR212: 18, AR225: 17, AR309: 17, AR282: 17, AR313: 17, AR039: 17, |
| | | | | AR272: 17, AR299: 16, AR216: 16, AR060: 15, AR172: 15, AR274: 15, AR053: 15, AR170: 15, AR240: 14, AR055: 14, AR185: 14, |
| | | | | AR195: 13, AR277: 13, AR197: 13, AR235: 13, AR295: 12, AR192: 12, AR224: 12, AR296: 11, AR297: 11, AR246: 11, AR285: 10, |
| | | | | AR198: 10, AR245: 10, AR293: 10, AR252: 10, AR288: 10, AR205: 10, AR300: 10, AR221: 9, AR242: 9, AR287: 9, AR201: 9, |
| | | | | AR247: 9, AR253: 9, AR033: 9, AR266: 9, AR215: 9, AR275: 8, AR291: 8, AR174: 8, AR261: 8, AR193: 8, AR243: 8, AR271: 8, |
| | | | | AR177: 8, AR270: 8, AR254: 8, AR289: 7, AR236: 7, AR286: 7, AR175: 6, AR204: 6, AR269: 6, AR189: 6, AR294: 6, AR180: 6, |
| | | | | AR178: 5, AR250: 5, AR183: 5, AR199: 5, AR257: 5, AR181: 5, AR179: 5, AR268: 5, AR262: 5, AR173: 5, AR290: 5, AR258: 5, |
| | | | | AR255: 4, AR061: 4, AR210: 4, AR191: 4, AR190: 4, AR229: 4, AR196: 4, AR176: 4, AR188: 3, AR226: 3, AR239: 3, AR182: 3, |
| | | | | AR200: 3, AR234: 3, AR238: 3, AR267: 3, AR232: 3, AR230: 3, AR203: 3, AR256: 3, AR231: 3, AR211: 3, AR237: 3, AR233: 2, |
| | | | | AR227: 2, AR260: 2, AR228: 1, L0748: 4, L0745: 4, L0775: 3, L0776: 3, L0758: 3, H0458: 2, H0050: 2, S0003: 2, H0529: 2, L0764: 2, |
| | | | | L0747: 2, L0599: 2, L0362: 2, H0556: 1, S0116: 1, S0282: 1, H0662: 1, H0305: 1, S0420: 1, S0444: 1, H0329: 1, H0351: 1, H0411: 1, |
| | | | | S0278: 1, H0438: 1, T0039: 1, H0635: 1, H0156: 1, H0235: 1, H0327: 1, L0471: 1, H0428: 1, H0031: 1, H0644: 1, H0032: 1, S0366: 1, |
| | | | | H0038: 1, H0616: 1, T0067: 1, H0477: 1, H0059: 1, H0560: 1, H0625: 1, S0422: 1, L0769: 1, L0761: 1, L0667: 1, L0771: 1, L0662: 1, |
| | | | | L0806: 1, L0655: 1, L0809: 1, L5622: 1, L0789: 1, L0790: 1, L0665: 1, S0052: 1, H0144: 1, H0520: 1, H0547: 1, H0519: 1, H0435: 1, |
| | | | | H0539: 1, S0044: 1, S0392: 1, L0754: 1, L0749: 1, L0750: 1, L0779: 1, L0755: 1, L0759: 1, S0434: 1, L0608: 1, H0543: 1 and S0452: 1. |
| 92 | HHFEB79 | 1300768 | 102 | AR215: 14, AR225: 11, AR316: 9, AR089: 9, AR217: 8, AR221: 8, AR235: 7, AR161: 7, AR162: 7, AR163: 7, AR170: 7, AR039: 7, |
| | | | | AR096: 7, AR172: 6, AR216: 6, AR168: 6, AR176: 6, AR183: 6, AR269: 6, AR171: 5, AR055: 5, AR182: 5, AR313: 5, AR299: 5, |
| | | | | AR224: 5, AR060: 5, AR233: 5, AR214: 5, AR296: 5, AR180: 4, AR266: 4, AR300: 4, AR282: 4, AR222: 4, AR181: 4, AR104: 4, |
| | | | | AR218: 4, AR228: 4, AR290: 4, AR263: 4, AR178: 4, AR173: 4, AR247: 4, AR257: 4, AR270: 4, AR255: 4, AR185: 4, AR237: 4, |
| | | | | AR229: 4, AR169: 4, AR165: 4, AR277: 4, AR177: 4, AR268: 4, AR264: 4, AR179: 4, AR311: 4, AR267: 4, AR166: 4, AR240: 4, |
| | | | | AR175: 4, AR309: 4, AR200: 3, AR164: 3, AR191: 3, AR061: 3, AR283: 3, AR219: 3, AR236: 3, AR293: 3, AR291: 3, AR231: 3, |
| | | | | AR261: 3, AR234: 3, AR288: 3, AR190: 3, AR223: 3, AR294: 3, AR211: 3, AR238: 3, AR262: 3, AR230: 3, AR210: 3, AR287: 3, |
| | | | | AR297: 3, AR250: 3, AR239: 3, AR289: 3, AR196: 2, AR203: 2, AR226: 2, AR285: 2, AR053: 2, AR272: 2, AR174: 2, AR286: 2, |
| | | | | AR227: 2, AR188: 2, AR254: 2, AR295: 2, AR258: 2, AR275: 2, AR232: 2, AR256: 2, AR189: 2, AR312: 2, AR308: 2, AR212: 2, |
| | | | | AR199: 2, AR205: 2, AR260: 2, AR198: 1, AR033: 1, AR274: 1, AR192: 1, H0494: 1 and H0768: 1. |
| | HHFEB79 | 863749 | 256 | |
| 93 | HHFEC39 | 609873 | 103 | AR055: 11, AR104: 8, AR060: 8, AR218: 7, AR277: 7, AR096: 6, AR300: 6, AR219: 6, AR299: 5, AR089: 5, AR283: 5, AR316: 5, |
| | | | | AR240: 5, AR039: 5, AR185: 4, AR282: 3, AR313: 3, L0805: 21, L0776: 19, L0751: 14, L0759: 13, L0770: 11, H0615: 8, L0803: 8, |
| | | | | L0438: 7, L0439: 7, L0758: 7, L0769: 6, L0521: 6, L0754: 6, H0624: 5, H0486: 5, L0500: 5, L0807: 5, L0740: 5, L0591: 5, H0716: 4, |
| | | | | H0351: 4, L0774: 4, H0144: 4, S0328: 4, L0748: 4, L0745: 4, L0604: 4, S0414: 3, H0013: 3, S0250: 3, H0428: 3, H0644: 3, H0591: 3, |
| | | | | L0659: 3, L0783: 3, L0809: 3, L0791: 3, L0793: 3, L0666: 3, H0670: 3, L0779: 3, L0777: 3, L0731: 3, H0583: 2, S0408: 2, L0717: 2, |
| | | | | S0280: 2, S0010: 2, H0052: 2, H0024: 2, T0010: 2, H0594: 2, H0266: 2, H0031: 2, H0032: 2, T0067: 2, L0796: 2, L0662: 2, L0794: 2, |
| | | | | L0806: 2, L0518: 2, L0792: 2, L3643: 1, S0342: 1, L0002: 1, H0657: 1, H0255: 1, H0305: 1, H0728: 1, H0733: 1, H0734: 1, S0007: 1, |
| | | | | H0645: 1, H0640: 1, H0369: 1, H0261: 1, H0549: 1, H0550: 1, S0222: 1, H0586: 1, T0040: 1, L3655: 1, L0021: 1, L0022: 1, L0105: 1, |
| | | | | T0071: 1, L0109: 1, H0194: 1, H0263: 1, H0566: 1, H0050: 1, L0471: 1, H0051: 1, S0051: 1, S0024: 1, H0355: 1, H0510: 1, H0271: 1, |
| | | | | H0328: 1, H0039: 1, H0622: 1, L0483: 1, H0124: 1, S0036: 1, H0038: 1, H0616: 1, H0412: 1, H0059: 1, H0100: 1, H0646: 1, S0422: 1, |
| | | | | S0002: 1, H0743: 1, H0529: 1, L0520: 1, L0640: 1, L0763: 1, L0773: 1, L0364: 1, L0649: 1, L0497: 1, L0526: 1, L0788: 1, L0789: 1, |
| | | | | L0663: 1, L0665: 1, S0374: 1, H0780: 1, H0547: 1, S0126: 1, H0689: 1, H0648: 1, S0330: 1, S0378: 1, H0522: 1, S0037: 1, L0747: 1, |
| | | | | L0750: 1, L0780: 1, L0752: 1, H0595: 1, S0434: 1, L0608: 1, L0594: 1, L0361: 1, L0603: 1, S0026: 1, S0192: 1, S0194: 1, H0423: 1, |
| | | | | S0398: 1, S0460: 1, H0506: 1, H0008: 1 and H0352: 1. |
| 94 | HHFFS40 | 824059 | 104 | AR219: 22, AR277: 18, AR283: 17, AR218: 16, AR039: 15, AR282: 15, AR089: 14, AR316: 13, AR313: 13, AR096: 12, AR299: 12, |
| | | | | AR104: 12, AR240: 10, AR055: 10, AR300: 10, AR185: 9, AR060: 8, S0422: 7, L0748: 6, L0591: 6, L0766: 5, L0754: 5, H0423: 5, |
| | | | | S0408: 4, H0069: 4, L0803: 4, L0602: 4, H0657: 3, S0442: 3, S0046: 3, H0596: 3, S0003: 3, H0032: 3, H0169: 3, H0674: 3, L0662: 3, |
| | | | | L0794: 3, L0526: 3, H0670: 3, L0740: 3, L0759: 3, S0134: 2, S0212: 2, H0661: 2, S0444: 2, H0046: 2, L0471: 2, H0355: 2, H0038: 2, |
| | | | | H0100: 2, L0564: 2, S0440: 2, H0529: 2, L0770: 2, L0769: 2, L0667: 2, L0771: 2, L0521: 2, L0804: 2, L0805: 2, L0384: 2, L0809: 2, |
| | | | | L0665: 2, H0659: 2, L0743: 2, L0750: 2, L0731: 2, S0436: 2, L0592: 2, L0599: 2, L0608: 2, L0362: 2, H0171: 1, H0556: 1, H0686: 1, |
| | | | | H0713: 1, H0717: 1, H0738: 1, H0740: 1, H0656: 1, H0663: 1, H0662: 1, H0402: 1, S0356: 1, H0742: 1, H0730: 1, H0747: 1, S0222: 1, |
| | | | | H0574: 1, H0632: 1, H0486: 1, H0013: 1, H0581: 1, S0049: 1, H0052: 1, H0194: 1, H0309: 1, H0263: 1, H0123: 1, H0050: 1, H0373: 1, |
| | | | | H0510: 1, S6028: 1, H0266: 1, H0615: 1, L0483: 1, H0644: 1, L0143: 1, H0708: 1, H0135: 1, H0163: 1, H0090: 1, H0616: 1, T0067: 1, |
| | | | | H0488: 1, H0412: 1, H0059: 1, H0494: 1, S0382: 1, S0306: 1, S0450: 1, H0509: 1, H0641: 1, H0647: 1, H0646: 1, L0520: 1, L0763: 1, |
| | | | | L0637: 1, L0373: 1, L0363: 1, L5564: 1, L0775: 1, L0375: 1, L0651: 1, L0655: 1, L0661: 1, L0527: 1, L0656: 1, L0659: 1, L0518: 1, |
| | | | | L0532: 1, L0663: 1, L0664: 1, S0374: 1, H0682: 1, H0658: 1, H0660: 1, H0672: 1, H0539: 1, H0521: 1, S0044: 1, S0406: 1, H0478: 1, |
| | | | | L0744: 1, L0439: 1, L0747: 1, L0779: 1, L0777: 1, L0758: 1, L0480: 1, L0595: 1, H0667: 1, S0192: 1, S0194: 1, S0196: 1, H0422: 1 and |
| | | | | S0424: 1. |
| 95 | HHGCS78 | 634605 | 105 | AR277: 76, AR283: 71, AR219: 57, AR218: 56, AR316: 56, AR089: 52, AR313: 52, AR240: 51, AR055: 45, AR282: 45, AR299: 44, |
| | | | | AR104: 41, AR096: 41, AR185: 34, AR039: 33, AR060: 31, AR300: 30, L0770: 7, H0333: 3, L0783: 2, L0731: 2, H0445: 2, S0418: 1, |
| | | | | H0741: 1, S0002: 1, L0369: 1, L0643: 1, L0764: 1, L0794: 1, L0803: 1, L0775: 1, L0375: 1, L0378: 1, L0655: 1, L0809: 1, L0666: 1, |
| | | | | L0664: 1, L0754: 1, L0747: 1, L0749: 1, L0752: 1 and L0591: 1. |
| 96 | HHPFP26 | 753269 | 106 | AR219: 14, AR218: 13, AR313: 11, AR299: 8, AR089: 8, AR185: 7, AR316: 7, AR039: 6, AR096: 6, AR300: 6, AR055: 6, AR060: 4, |
| | | | | AR104: 4, AR282: 3, AR240: 2, AR283: 2, AR277: 2, L0766: 4, H0441: 3, S0422: 3, L0750: 3, L0752: 3, L0755: 3, H0624: 2, S0360: 2, |
| | | | | L0771: 2, L0662: 2, L0794: 2, L0803: 2, L0804: 2, L0776: 2, L0791: 2, L0666: 2, S0406: 2, L0439: 2, L0731: 2, L0758: 2, S0194: 2, |
| | | | | H0170: 1, L3388: 1, H0411: 1, H0486: 1, L0163: 1, H0051: 1, H0551: 1, H0625: 1, L0381: 1, L0650: 1, L0659: 1, L0518: 1, L0790: 1, |
| | | | | L0793: 1, H0519: 1, H0659: 1, S0380: 1, S0013: 1, L0747: 1, L0777: 1, L0591: 1, L0608: 1 and H0422: 1. |
| 97 | HHPFU28 | 824573 | 107 | AR218: 11, AR039: 9, AR219: 9, AR104: 8, AR300: 8, AR185: 7, AR055: 6, AR299: 6, AR089: 6, AR096: 6, AR240: 6, AR060: 5, |
| | | | | AR282: 5, AR316: 5, AR313: 4, AR277: 3, AR283: 3, L0622: 2, L0518: 2, L0382: 2, L0663: 2, L0750: 2, L0752: 2, L0362: 2, S0114: 1, |
| | | | | S0420: 1, S0354: 1, S0444: 1, S0222: 1, S0010: 1, H0046: 1, H0051: 1, L0483: 1, H0644: 1, H0412: 1, H0529: 1, L0794: 1, L0561: 1, |
| | | | | L0666: 1, S0330: 1, S0028: 1, L0779: 1, L0777: 1, L0758: 1, S0031: 1, H0444: 1 and L0592: 1. |
| 98 | HHSBI06 | 639097 | 108 | AR218: 14, AR060: 11, AR282: 11, AR055: 11, AR089: 10, AR219: 10, AR185: 10, AR277: 10, AR039: 9, AR104: 9, AR299: 8, |
| | | | | AR316: 8, AR300: 8, AR313: 8, AR283: 7, AR096: 7, AR240: 5, L0766: 12, L0794: 7, L0439: 7, L0749: 7, L0803: 6, L0740: 6, |
| | | | | L0745: 6, H0052: 5, L0754: 5, L3181: 4, L0770: 4, L0666: 4, L0748: 4, H0553: 3, L0790: 3, L0589: 3, H0543: 3, S0114: 2, S0134: 2, |
| | | | | H0650: 2, S0354: 2, S0444: 2, H0747: 2, S0476: 2, H0393: 2, H0549: 2, H0586: 2, H0013: 2, H0599: 2, H0014: 2, S0051: 2, S0003: 2, |
| | | | | H0032: 2, H0674: 2, H0135: 2, S0142: 2, L0372: 2, L0800: 2, L0764: 2, L0805: 2, L0655: 2, L0657: 2, L0659: 2, L0809: 2, L0789: 2, |
| | | | | L0792: 2, H0144: 2, L0438: 2, H0684: 2, H0658: 2, H0539: 2, H0521: 2, S0406: 2, S0028: 2, L0750: 2, L0779: 2, L0777: 2, L0752: 2, |
| | | | | L0731: 2, L0758: 2, S0436: 2, H0653: 2, H0542: 2, H0556: 1, H0716: 1, H0381: 1, S0116: 1, H0661: 1, S0356: 1, S0442: 1, S0360: 1, |
| | | | | H0675: 1, H0734: 1, L2255: 1, L3726: 1, H0261: 1, S0222: 1, L3499: 1, T0114: 1, H0706: 1, H0036: 1, H0318: 1, H0581: 1, L0738: 1, |
| | | | | H0123: 1, H0620: 1, S0050: 1, H0015: 1, H0051: 1, H0355: 1, H0416: 1, H0286: 1, H0328: 1, H0428: 1, H0622: 1, T0006: 1, H0030: 1, |
| | | | | H0031: 1, H0644: 1, H0617: 1, L0055: 1, H0124: 1, H0163: 1, H0038: 1, H0040: 1, H0616: 1, H0551: 1, H0264: 1, H0102: 1, S0112: 1, |
| | | | | L0564: 1, H0280: 1, H0494: 1, H0561: 1, S0440: 1, H0633: 1, L3815: 1, S0002: 1, L0763: 1, L0769: 1, L0761: 1, L0646: 1, L0642: 1, |
| | | | | L0644: 1, L0645: 1, L0648: 1, L0662: 1, L0363: 1, L0775: 1, L0375: 1, L0651: 1, L0784: 1, L0806: 1, L0653: 1, L0807: 1, L0658: 1, |
| | | | | L0540: 1, L5622: 1, L0368: 1, L0665: 1, L2655: 1, L2257: 1, L2263: 1, L2258: 1, L2262: 1, S0374: 1, H0723: 1, L3811: 1, L2670: 1, |
| | | | | H0547: 1, L3215: 1, H0648: 1, H0672: 1, S0328: 1, H0753: 1, H0522: 1, H0436: 1, S0392: 1, H0626: 1, L0759: 1, S0031: 1, H0445: 1, |
| | | | | S0434: 1, L0596: 1, L0588: 1, S0192: 1, H0423: 1, S0424: 1 and H0352: 1. |
| 99 | HHSBI65 | 801910 | 109 | AR176: 10, AR216: 9, AR217: 8, AR168: 8, AR169: 8, AR182: 8, AR161: 8, AR196: 8, AR162: 8, AR214: 8, AR228: 8, AR269: 8, |
| | | | | AR231: 8, AR233: 7, AR171: 7, AR207: 7, AR229: 7, AR181: 7, AR223: 7, AR163: 7, AR198: 7, AR165: 7, AR172: 7, AR225: 7, |
| | | | | AR267: 7, AR224: 7, AR266: 6, AR268: 6, AR170: 6, AR164: 6, AR237: 6, AR221: 6, AR222: 6, AR177: 6, AR179: 6, AR235: 6, |
| | | | | AR270: 6, AR183: 6, AR204: 6, AR288: 6, AR053: 6, AR239: 6, AR193: 5, AR236: 5, AR250: 5, AR191: 5, AR264: 5, AR293: 5, |
| | | | | AR296: 5, AR055: 5, AR238: 5, AR247: 5, AR309: 5, AR300: 5, AR178: 5, AR295: 5, AR290: 5, AR294: 5, AR060: 5, AR061: 5, |
| | | | | AR287: 5, AR257: 5, AR201: 5, AR282: 5, AR291: 5, AR175: 5, AR311: 4, AR261: 4, AR234: 4, AR289: 4, AR275: 4, AR262: 4, |
| | | | | AR252: 4, AR242: 4, AR213: 4, AR253: 4, AR297: 4, AR203: 4, AR277: 4, AR180: 4, AR212: 4, AR200: 4, AR316: 4, AR286: 4, |
| | | | | AR274: 4, AR255: 4, AR312: 4, AR240: 4, AR174: 4, AR215: 4, AR039: 4, AR192: 4, AR263: 4, AR205: 4, AR283: 3, AR232: 3, |
| | | | | AR271: 3, AR285: 3, AR190: 3, AR226: 3, AR185: 3, AR033: 3, AR246: 3, AR230: 3, AR188: 3, AR308: 3, AR227: 3, AR096: 3, |
| | | | | AR173: 3, AR313: 3, AR089: 3, AR195: 3, AR272: 3, AR199: 3, AR189: 3, AR260: 3, AR197: 3, AR299: 3, AR104: 2, AR210: 2, |
| | | | | AR258: 2, AR211: 2, AR256: 2, AR243: 2, AR218: 2, AR219: 2, L0439: 7, L0794: 5, L0766: 5, S0354: 2, H0549: 2, S0051: 2, S0142: 2, |
| | | | | L0372: 2, L0809: 2, L0438: 2, H0658: 2, H0650: 1, H0381: 1, S0116: 1, S0356: 1, S0360: 1, H0261: 1, H0586: 1, H0486: 1, H0036: 1, |
| | | | | H0052: 1, L0738: 1, H0457: 1, H0014: 1, H0051: 1, H0617: 1, H0032: 1, H0561: 1, S0440: 1, H0633: 1, L0763: 1, L0761: 1, L0800: 1, |
| | | | | L0644: 1, L0645: 1, L0764: 1, L0648: 1, L0655: 1, L0657: 1, L0658: 1, L0368: 1, L0665: 1, L3811: 1, S0044: 1, S0406: 1, H0626: 1, |
| | | | | L0731: 1, S0434: 1, S0436: 1, H0653: 1 and H0423: 1. |
| 100 | HISAT67 | 843549 | 110 | AR283: 20, AR282: 15, AR277: 11, AR089: 11, AR219: 11, AR299: 10, AR218: 10, AR316: 9, AR313: 8, AR096: 8, AR185: 8, |
| | | | | AR104: 7, AR240: 7, AR055: 6, AR060: 6, AR039: 6, AR300: 6, L0751: 8, L0754: 6, L0731: 6, H0556: 5, L0766: 5, L0439: 5, |
| | | | | L0750: 5, L0770: 4, L0666: 4, H0521: 4, S0356: 3, H0052: 3, H0424: 3, L0776: 3, S0406: 3, S0418: 2, S0442: 2, H0580: 2, H0733: 2, |
| | | | | H0486: 2, H0575: 2, S0438: 2, L0769: 2, L3905: 2, L0659: 2, L0663: 2, L0665: 2, L0748: 2, L0749: 2, S0436: 2, T0002: 1, H0159: 1, |
| | | | | S6024: 1, S0134: 1, H0656: 1, H0484: 1, S0358: 1, S0360: 1, H0742: 1, S0046: 1, H0393: 1, S0278: 1, H0607: 1, H0586: 1, H0642: 1, |
| | | | | H0632: 1, H0427: 1, L0021: 1, H0599: 1, H0318: 1, H0746: 1, H0194: 1, L0738: 1, H0178: 1, H0566: 1, H0051: 1, T0010: 1, H0408: 1, |
| | | | | H0290: 1, H0328: 1, H0401: 1, H0417: 1, H0553: 1, H0617: 1, H0040: 1, H0264: 1, H0623: 1, H0059: 1, T0041: 1, H0494: 1, H0561: 1, |
| | | | | H0509: 1, S0144: 1, L0763: 1, L0638: 1, L5565: 1, L0772: 1, L0373: 1, L0764: 1, L0662: 1, L0626: 1, L0363: 1, L0649: 1, L0650: 1, |
| | | | | L0774: 1, L0806: 1, L0654: 1, L0789: 1, L0664: 1, L3822: 1, H0699: 1, S0374: 1, L3828: 1, H0547: 1, H0689: 1, H0659: 1, H0658: 1, |
| | | | | H0670: 1, H0672: 1, H0539: 1, L0740: 1, L0746: 1, L0752: 1, L0755: 1, L0757: 1, L0584: 1, L0596: 1, L0608: 1 and H0352: 1. |
| 101 | HISBA38 | 561711 | 111 | AR277: 1, L0766: 3, H0318: 1 and H0539: 1. |
| 102 | HJBCU75 | 638329 | 112 | AR162: 12, AR161: 12, AR163: 11, AR186: 10, AR244: 10, AR273: 8, AR222: 8, AR225: 8, AR221: 8, AR214: 8, AR216: 8, |
| | | | | AR224: 7, AR223: 7, AR282: 7, AR215: 7, AR052: 7, AR202: 7, AR200: 6, AR206: 6, AR176: 6, AR269: 6, AR235: 6, AR272: 6, |
| | | | | AR217: 6, AR055: 6, AR182: 6, AR264: 6, AR275: 6, AR061: 6, AR183: 5, AR168: 5, AR171: 5, AR309: 5, AR270: 5, AR228: 5, |
| | | | | AR290: 5, AR268: 5, AR310: 5, AR181: 5, AR257: 5, AR060: 5, AR255: 5, AR165: 5, AR191: 5, AR164: 5, AR274: 5, AR247: 5, |
| | | | | AR246: 4, AR166: 4, AR178: 4, AR311: 4, AR291: 4, AR312: 4, AR236: 4, AR173: 4, AR249: 4, AR233: 4, AR240: 4, AR288: 4, |
| | | | | AR174: 4, AR267: 4, AR239: 4, AR204: 4, AR185: 4, AR287: 4, AR172: 4, AR192: 4, AR297: 4, AR213: 4, AR194: 4, AR177: 4, |
| | | | | AR294: 4, AR261: 4, AR184: 4, AR190: 4, AR170: 3, AR284: 3, AR262: 3, AR210: 3, AR188: 3, AR089: 3, AR313: 3, AR196: 3, |
| | | | | AR298: 3, AR266: 3, AR175: 3, AR033: 3, AR260: 3, AR285: 3, AR189: 3, AR316: 3, AR231: 3, AR251: 3, AR293: 3, AR296: 3, |
| | | | | AR237: 3, AR286: 3, AR265: 3, AR243: 3, AR277: 3, AR300: 3, AR039: 3, AR289: 3, AR315: 3, AR179: 3, AR271: 3, AR234: 3, |
| | | | | AR263: 3, AR199: 3, AR283: 3, AR203: 3, AR096: 3, AR299: 3, AR295: 3, AR229: 3, AR230: 3, AR292: 3, AR180: 3, AR104: 2, |
| | | | | AR198: 2, AR308: 2, AR219: 2, AR053: 2, AR218: 2, AR211: 2, AR205: 2, AR238: 2, AR241: 2, AR258: 2, AR256: 2, AR226: 2, |
| | | | | AR232: 2, AR280: 2, AR169: 1, AR227: 1, AR259: 1, AR201: 1, L0805: 3, H0556: 2, H0046: 2, S0022: 2, L0764: 2, L0662: 2, |
| | | | | L0748: 2, H0013: 1, H0050: 1, H0039: 1, H0040: 1, H0087: 1, T0042: 1, L0643: 1, L0794: 1, L0803: 1, L0804: 1, L0807: 1, L0809: 1, L0666: 1, |
| | | | | H0144: 1, L0749: 1, L0779: 1 and L0758: 1. |
| 103 | HJMAA03 | 824062 | 113 | AR207: 12, AR309: 11, AR192: 11, AR252: 10, AR053: 9, AR212: 9, AR242: 9, AR235: 9, AR213: 8, AR215: 8, AR198: 8, AR170: 8, |
| | | | | AR169: 8, AR161: 8, AR162: 8, AR253: 8, AR223: 8, AR165: 8, AR166: 8, AR263: 7, AR163: 7, AR164: 7, AR274: 7, AR224: 7, |
| | | | | AR245: 7, AR264: 7, AR214: 7, AR195: 7, AR217: 7, AR174: 7, AR197: 7, AR261: 7, AR311: 7, AR221: 7, AR282: 6, AR308: 6, |
| | | | | AR222: 6, AR240: 6, AR312: 6, AR205: 6, AR171: 6, AR168: 6, AR193: 6, AR313: 6, AR246: 6, AR177: 6, AR173: 6, AR277: 6, |
| | | | | AR216: 6, AR247: 6, AR180: 6, AR225: 6, AR283: 5, AR269: 5, AR300: 5, AR089: 5, AR201: 5, AR272: 5, AR297: 5, AR189: 5, |
| | | | | AR204: 5, AR183: 5, AR299: 5, AR175: 5, AR288: 5, AR176: 5, AR295: 5, AR271: 5, AR250: 5, AR096: 5, AR275: 5, AR270: 4, |
| | | | | AR316: 4, AR196: 4, AR191: 4, AR286: 4, AR178: 4, AR290: 4, AR185: 4, AR268: 4, AR296: 4, AR291: 4, AR257: 4, AR033: 4, |
| | | | | AR199: 4, AR181: 4, AR039: 4, AR236: 4, AR229: 4, AR243: 4, AR285: 4, AR254: 4, AR289: 4, AR238: 3, AR172: 3, AR293: 3, |
| | | | | AR262: 3, AR190: 3, AR287: 3, AR179: 3, AR200: 3, AR055: 3, AR104: 3, AR060: 3, AR188: 3, AR239: 3, AR182: 3, AR233: 3, |
| | | | | AR258: 3, AR294: 3, AR061: 3, AR237: 3, AR231: 3, AR234: 3, AR226: 3, AR203: 3, AR255: 3, AR232: 3, AR230: 2, AR211: 2, |
| | | | | AR227: 2, AR228: 2, AR267: 2, AR210: 2, AR266: 2, AR219: 2, AR260: 1, AR218: 1, AR256: 1, L0749: 8, L0803: 5, L0748: 5, |
| | | | | L0777: 5, L0794: 4, L0766: 4, L0804: 4, H0135: 3, H0551: 3, L0754: 3, L0599: 3, H0542: 3, H0556: 2, H0545: 2, H0674: 2, L0764: 2, |
| | | | | L0774: 2, L0776: 2, L0655: 2, H0521: 2, L0439: 2, L0752: 2, L0731: 2, L0596: 2, H0395: 1, H0713: 1, H0483: 1, H0663: 1, S0358: 1, |
| | | | | H0580: 1, H0329: 1, S0045: 1, H0453: 1, H0427: 1, H0599: 1, H0706: 1, H0150: 1, H0123: 1, L0471: 1, L0163: 1, H0051: 1, H0275: 1, |
| | | | | S0003: 1, S0214: 1, H0628: 1, H0090: 1, H0040: 1, H0087: 1, T0067: 1, H0412: 1, H0494: 1, H0509: 1, H0633: 1, H0647: 1, S0344: 1, |
| | | | | L0769: 1, L0637: 1, L0761: 1, L0772: 1, L0800: 1, L0374: 1, L0771: 1, L0363: 1, L0768: 1, L0806: 1, L0659: 1, L0382: 1, L0809: 1, |
| | | | | L0545: 1, L0789: 1, L0666: 1, H0519: 1, H0659: 1, S0152: 1, S0404: 1, L0751: 1, L0747: 1, L0750: 1, L0779: 1, S0436: 1, L0608: 1, |
| | | | | S0276: 1, H0543: 1, H0506: 1 and H0352: 1. |
| 104 | HJPCH08 | 840365 | 114 | AR277: 9, AR055: 9, AR218: 8, AR060: 6, AR219: 6, AR283: 5, AR300: 5, AR104: 5, AR240: 5, AR316: 5, AR185: 5, AR313: 5, |
| | | | | AR299: 4, AR089: 3, AR096: 3, AR039: 3, AR282: 2, L0758: 9, L0777: 8, H0618: 6, L0794: 6, L0749: 6, L0774: 4, L0748: 4, L0750: 4, |
| | | | | S0418: 3, S0358: 3, H0266: 3, L0770: 3, L0766: 3, L0759: 3, S0360: 2, H0150: 2, H0087: 2, L0369: 2, L0769: 2, L0771: 2, L0789: 2, |
| | | | | L0663: 2, L0665: 2, H0422: 2, H0556: 1, H0295: 1, H0370: 1, H0331: 1, H0013: 1, L0021: 1, L0022: 1, H0253: 1, H0052: 1, H0204: 1, |
| | | | | H0544: 1, H0012: 1, H0620: 1, H0024: 1, H0083: 1, H0510: 1, H0416: 1, H0252: 1, H0424: 1, H0617: 1, L0564: 1, H0494: 1, S0144: 1, |
| | | | | L0372: 1, L0646: 1, L0800: 1, L0641: 1, L0764: 1, L0649: 1, L0803: 1, L0650: 1, L0775: 1, L0776: 1, L0655: 1, L0659: 1, L0809: 1, |
| | | | | L0666: 1, L0664: 1, H0144: 1, H0521: 1, H0436: 1, S3012: 1, L0747: 1, L0786: 1, L0757: 1, L0608: 1 and L0595: 1. |
| 105 | HKABU43 | 838573 | 115 | AR219: 2, AR282: 1, AR300: 1, AR316: 1, L0794: 7, L0803: 3, H0052: 2, S0250: 2, H0032: 2, H0494: 2, H0529: 2, L0666: 2, L0663: 2, |
| | | | | L0747: 2, L0759: 2, H0657: 1, H0664: 1, H0662: 1, S0442: 1, H0741: 1, H0735: 1, H0733: 1, S0046: 1, H0640: 1, H0331: 1, H0559: 1, |
| | | | | T0039: 1, H0013: 1, S0280: 1, H0318: 1, T0110: 1, H0024: 1, S0364: 1, H0591: 1, H0038: 1, H0040: 1, S0142: 1, L0640: 1, L0667: 1, |
| | | | | L0764: 1, L0662: 1, L0804: 1, L0659: 1, L0517: 1, L0789: 1, L4559: 1, L0664: 1, S0126: 1, H0435: 1, H0539: 1, S0152: 1, H0521: 1, |
| | | | | H0522: 1, S0027: 1, L0779: 1, L0758: 1, L0485: 1, L0601: 1, S0026: 1, H0667: 1, S0192: 1, H0542: 1 and H0506: 1. |
| 106 | HKIXC44 | 716213 | 116 | AR104: 28, AR055: 19, AR240: 15, AR219: 11, AR218: 11, AR185: 10, AR060: 9, AR299: 7, AR089: 7, AR283: 7, AR282: 6, |
| | | | | AR096: 5, AR316: 5, AR300: 5, AR313: 5, AR039: 4, AR277: 3, L0770: 7, L0742: 5, L0439: 4, L0776: 3, S0358: 2, H0619: 2, S0222: 2, |
| | | | | L0769: 2, L0638: 2, L0796: 2, L0805: 2, H0593: 2, L0753: 2, L0485: 2, L0608: 2, H0329: 1, H0351: 1, H0441: 1, H0611: 1, H0370: 1, |
| | | | | H0013: 1, H0196: 1, H0052: 1, H0251: 1, H0041: 1, H0024: 1, H0622: 1, S0366: 1, H0623: 1, L0648: 1, L0523: 1, L0806: 1, L0788: 1, |
| | | | | L0666: 1, L0663: 1, H0648: 1, H0539: 1, S0152: 1, L0612: 1, L0777: 1, L0599: 1 and S0242: 1. |
| 107 | HKTAB41 | 695732 | 117 | AR277: 83, AR283: 74, AR219: 65, AR313: 56, AR316: 50, AR089: 49, AR218: 47, AR282: 46, AR104: 45, AR055: 42, AR185: 41, |
| | | | | AR299: 40, AR096: 35, AR039: 31, AR240: 31, AR060: 26, AR300: 25, L0794: 5, H0574: 1 and H0239: 1. |
| 108 | HLDBG17 | 855953 | 118 | AR313: 205, AR096: 153, AR240: 136, AR282: 133, AR219: 128, AR218: 116, AR299: 111, AR316: 101, AR277: 94, AR089: 89, |
| | | | | AR039: 84, AR300: 83, AR283: 82, AR185: 77, AR060: 59, AR104: 50, AR055: 37, L0581: 185, H0509: 97, H0510: 36, H0014: 25, |
| | | | | H0355: 18, H0393: 14, L0748: 13, H0574: 12, H0331: 9, H0057: 5, H0144: 5, H0015: 3, L0605: 3, H0357: 2, H0427: 2, L0663: 2, |
| | | | | L0749: 2, L0756: 2, H0662: 1, H0351: 1, H0349: 1, H0047: 1, H0038: 1, L0521: 1, L0518: 1, L0809: 1, L0787: 1, L0438: 1, L0439: 1, |
| | | | | L0747: 1, L0759: 1 and S0412: 1. |
| 109 | HLDQU79 | 740755 | 119 | AR253: 8, AR171: 7, AR245: 6, AR243: 5, AR183: 5, AR263: 5, AR264: 4, AR250: 4, AR269: 4, AR060: 4, AR180: 4, AR270: 4, |
| | | | | AR309: 4, AR162: 4, AR268: 4, AR161: 4, AR165: 4, AR192: 4, AR176: 4, AR164: 4, AR055: 4, AR163: 4, AR213: 4, AR195: 4, |
| | | | | AR271: 4, AR166: 3, AR275: 3, AR240: 3, AR282: 3, AR312: 3, AR246: 3, AR178: 3, AR181: 3, AR311: 3, AR168: 3, AR289: 3, |
| | | | | AR182: 3, AR193: 3, AR217: 3, AR179: 3, AR212: 3, AR237: 3, AR238: 3, AR299: 3, AR199: 3, AR252: 3, AR229: 3, AR242: 2, |
| | | | | AR185: 2, AR300: 2, AR277: 2, AR175: 2, AR293: 2, AR257: 2, AR308: 2, AR177: 2, AR198: 2, AR061: 2, AR214: 2, AR174: 2, |
| | | | | AR104: 2, AR231: 2, AR316: 2, AR201: 2, AR233: 2, AR230: 2, AR224: 2, AR236: 2, AR239: 2, AR228: 2, AR188: 2, AR223: 2, |
| | | | | AR189: 2, AR247: 2, AR294: 2, AR226: 2, AR266: 2, AR221: 2, AR285: 2, AR191: 2, AR089: 2, AR216: 2, AR200: 2, AR207: 2, |
| | | | | AR272: 2, AR232: 2, AR190: 2, AR290: 2, AR283: 2, AR096: 2, AR222: 2, AR296: 2, AR039: 2, AR267: 2, AR205: 2, AR211: 1, |
| | | | | AR196: 1, AR173: 1, AR033: 1, AR218: 1, AR295: 1, AR255: 1, AR262: 1, AR215: 1, AR227: 1, AR254: 1, AR234: 1, AR313: 1, |
| | | | | AR203: 1, AR256: 1, AR169: 1, AR225: 1, AR210: 1, AR170: 1, L0748: 9, L0731: 7, L0771: 6, L0759: 6, H0013: 5, L0764: 4, |
| | | | | L0747: 4, L0758: 4, H0265: 3, H0039: 3, H0038: 3, L0769: 3, L0766: 3, L0775: 3, H0144: 3, L0755: 3, S0444: 2, S0476: 2, H0318: 2, |
| | | | | H0050: 2, L0471: 2, H0266: 2, L0374: 2, L0649: 2, L0805: 2, L0663: 2, L0664: 2, H0547: 2, S0126: 2, H0670: 2, L0740: 2, L0754: 2, |
| | | | | L0750: 2, L0593: 2, H0667: 2, H0170: 1, H0171: 1, H0685: 1, H0662: 1, S0354: 1, S0360: 1, H0580: 1, H0728: 1, H0151: 1, H0747: 1, |
| | | | | L3388: 1, H0357: 1, H0586: 1, H0331: 1, H0574: 1, H0635: 1, H0575: 1, H0263: 1, H0596: 1, H0545: 1, H0012: 1, H0620: 1, H0350: 1, |
| | | | | H0355: 1, H0510: 1, H0428: 1, H0604: 1, H0031: 1, H0553: 1, S0366: 1, H0040: 1, H0063: 1, H0059: 1, H0560: 1, H0561: 1, S0440: 1, |
| | | | | S0422: 1, H0529: 1, L0640: 1, L0637: 1, L0761: 1, L0772: 1, L0646: 1, L4556: 1, L0774: 1, L0375: 1, L0653: 1, L0382: 1, L5622: 1, |
| | | | | L0793: 1, L4501: 1, H0723: 1, L0352: 1, S0152: 1, S0350: 1, H0521: 1, H0696: 1, S0044: 1, H0627: 1, S0027: 1, L0749: 1, L0752: 1, |
| | | | | H0595: 1, S0436: 1, L0591: 1, L0595: 1, L0361: 1, S0011: 1, S0194: 1, S0276: 1 and H0423: 1. |
| | HLDQU79 | 837599 | 257 | |
| 110 | HLHAP05 | 638476 | 120 | L0005: 3, H0024: 2, H0209: 1 and H0445: 1. |
| 111 | HLHBS54 | 837503 | 121 | AR313: 24, AR039: 20, AR219: 18, AR277: 17, AR089: 17, AR185: 16, AR218: 16, AR096: 15, AR299: 14, AR240: 12, AR104: 11, |
| | | | | AR316: 10, AR300: 10, AR282: 9, AR060: 9, AR055: 8, AR283: 7, L0751: 11, L0757: 9, L0595: 8, H0024: 6, S0002: 6, H0545: 5, |
| | | | | L0740: 5, S0434: 5, H0620: 4, H0135: 4, S0426: 4, L0776: 4, L0659: 4, L0747: 4, L0750: 4, S0436: 4, H0333: 3, H0046: 3, H0012: 3, |
| | | | | H0622: 3, H0087: 3, S0144: 3, L0770: 3, L0809: 3, S0152: 3, S0037: 3, L0754: 3, L0752: 3, S0001: 2, S0360: 2, S0007: 2, H0549: 2, |
| | | | | S0222: 2, H0587: 2, H0632: 2, H0618: 2, H0309: 2, H0050: 2, H0266: 2, H0124: 2, H0413: 2, S0344: 2, L0769: 2, L3905: 2, L0772: 2, |
| | | | | L0648: 2, L0662: 2, L0517: 2, L0666: 2, L0664: 2, H0689: 2, H0521: 2, H0522: 2, H0696: 2, S0406: 2, L0743: 2, L0744: 2, L0749: 2, |
| | | | | L0731: 2, L0589: 2, L0592: 2, L0593: 2, H0149: 1, H0717: 1, S0116: 1, H0484: 1, H0255: 1, H0661: 1, H0662: 1, S0410: 1, H0729: 1, |
| | | | | H0728: 1, S0045: 1, S0046: 1, H0619: 1, S0278: 1, H0437: 1, H0550: 1, H0441: 1, H0249: 1, L3653: 1, H0427: 1, H0253: 1, H0052: 1, |
| | | | | H0251: 1, H0597: 1, H0544: 1, H0546: 1, L0041: 1, H0041: 1, H0009: 1, H0172: 1, H0566: 1, H0399: 1, H0239: 1, H0687: 1, H0288: 1, |
| | | | | H0292: 1, T0023: 1, H0424: 1, H0213: 1, H0617: 1, H0673: 1, H0169: 1, H0376: 1, H0623: 1, S0210: 1, L0369: 1, L0762: 1, L0763: 1, |
| | | | | L5565: 1, L0767: 1, L0803: 1, L0775: 1, L0523:, L0806: 1, L0655: 1, L0518: 1, L0783: 1, L0519: 1, L0790: 1, L0663: 1, S0148: 1, |
| | | | | S0310: 1, L3811: 1, H0547: 1, H0659: 1, H0651: 1, H0626: 1, S3014: 1, S0027: 1, L0748: 1, L0439: 1, L0777: 1, L0755: 1, L0758: 1, |
| | | | | L0759: 1, L0603: 1, H0668: 1, S0196: 1, S0424: 1 and H0352: 1. |
| 112 | HLHCS23 | 560663 | 122 | AR055: 5, AR060: 4, AR185: 3, AR218: 3, AR240: 3, AR300: 3, AR282: 3, AR299: 2, AR039: 2, AR283: 2, AR089: 2, AR219: 2, |
| | | | | AR316: 2, AR104: 2, AR096: 1, AR277: 1, H0024: 1 |
| 113 | HLICE88 | 840321 | 123 | AR185: 21, AR240: 19, AR104: 13, AR039: 13, AR060: 13, AR089: 13, AR300: 12, AR282: 11, AR096: 11, AR055: 10, AR316: 10, |
| | | | | AR219: 10, AR218: 9, AR299: 7, AR283: 7, AR313: 7, AR277: 4, H0014: 72, L3388: 60, H0509: 49, L0581: 44, H0355: 43, |
| | | | | H0574: 32, H0393: 30, H0632: 21, H0510: 18, S0438: 18, H0098: 15, H0144: 14, H0331: 13, H0015: 8, L0748: 8, H0722: 7, L3387: 7, |
| | | | | H0741: 5, H0013: 5, H0147: 4, T0078: 4, L0615: 3, H0357: 3, S0440: 3, H0730: 2, H0349: 2, H0350: 2, H0057: 2, H0644: 2, H0647: 2, |
| | | | | L0605: 2, L0599: 2, H0170: 1, L0448: 1, H0149: 1, L0393: 1, S0444: 1, L3645: 1, H0749: 1, L2255: 1, H0351: 1, H0642: 1, H0427: 1, |
| | | | | H0003: 1, H0575: 1, H0199: 1, H0040: 1, H0745: 1, L0787: 1, L0747: 1 and S0436: 1. |
| 114 | HLQAS12 | 886180 | 124 | AR240: 8, AR218: 5, AR316: 4, AR060: 4, AR104: 4, AR055: 3, AR300: 3, AR282: 2, AR185: 2, AR039: 2, AR283: 2, AR299: 2, |
| | | | | AR089: 1, AR277: 1, AR313: 1, AR096: 1, H0521: 109, H0271: 18, L0659: 17, L0757: 16, H0494: 15, H0522: 14, S0027: 14, |
| | | | | L0740: 12, L0754: 12, L0747: 12, H0556: 11, H0638: 9, S0045: 8, H0250: 8, H0599: 8, S0126: 8, H0265: 7, S0360: 7, S0140: 7, |
| | | | | T0040: 7, H0581: 7, S0002: 7, L0666: 7, S0028: 7, S0358: 6, H0635: 6, H0545: 6, H0056: 6, L0663: 6, H0539: 6, L0731: 6, S0132: 5, |
| | | | | H0190: 5, H0052: 5, H0266: 5, L0770: 5, S3014: 5, L0590: 5, H0294: 4, S0354: 4, S0278: 4, H0433: 4, H0413: 4, H0100: 4, L0764: 4, |
| | | | | L0662: 4, L0776: 4, L0758: 4, H0222: 3, H0295: 3, S0212: 3, H0427: 3, H0575: 3, H0590: 3, S0049: 3, H0544: 3, H0051: 3, S0250: 3, |
| | | | | H0622: 3, H0163: 3, H0634: 3, H0412: 3, H0641: 3, S0142: 3, S0344: 3, S0426: 3, L0769: 3, L0771: 3, L0794: 3, L0804: 3, L0655: 3, |
| | | | | H0672: 3, L0602: 3, H0555: 3, H0436: 3, S0390: 3, L0751: 3, L0756: 3, S0192: 3, H0506: 3, L0600: 3, H0341: 2, S0418: 2, S0420: 2, |
| | | | | S0376: 2, S0468: 2, H0208: 2, S0046: 2, H0392: 2, T0039: 2, T0060: 2, H0191: 2, H0156: 2, H0546: 2, H0247: 2, H0416: 2, H0615: 2, |
| | | | | H0039: 2, L0483: 2, H0628: 2, H0032: 2, H0211: 2, H0124: 2, H0087: 2, H0623: 2, S0144: 2, L0598: 2, L0763: 2, L0646: 2, L0773: 2, |
| | | | | L0774: 2, L0775: 2, L0806: 2, S0428: 2, S0328: 2, S0037: 2, S0032: 2, L0741: 2, L0743: 2, L0752: 2, L0591: 2, L0608: 2, L0601: 2, |
| | | | | L0603: 2, S0194: 2, H0542: 2, H0170: 1, H0171: 1, L3644: 1, H0650: 1, S0116: 1, H0255: 1, H0661: 1, H0580: 1, H0411: 1, S0220: 1, |
| | | | | H0331: 1, H0486: 1, L3655: 1, H0069: 1, H0075: 1, L0021: 1, H0002: 1, H0036: 1, H0253: 1, T0048: 1, H0505: 1, H0318: 1, H0023: 1, |
| | | | | H0083: 1, S6028: 1, L0669: 1, S0314: 1, H0417: 1, H0316: 1, H0598: 1, H0135: 1, H0063: 1, H0551: 1, H0379: 1, H0268: 1, H0059: 1, |
| | | | | T0004: 1, H0561: 1, S0450: 1, H0509: 1, H0649: 1, H0538: 1, S0210: 1, L0761: 1, L0667: 1, L0372: 1, L0648: 1, L0363: 1, L0768: 1, |
| | | | | L0381: 1, L0388: 1, L0522: 1, L0784: 1, L0632: 1, L0378: 1, L0656: 1, L0783: 1, L0382: 1, L0532: 1, L0664: 1, L0665: 1, S0052: 1, |
| | | | | L0565: 1, H0547: 1, H0519: 1, H0689: 1, H0682: 1, H0670: 1, H0518: 1, S0044: 1, H0576: 1, L0439: 1, L0746: 1, L0755: 1, H0595: 1, |
| | | | | S0436: 1, L0581: 1, H0667: 1 and H0352: 1. |
| 115 | HLYAR30 | 781249 | 125 | AR277: 25, AR313: 24, AR283: 17, AR316: 15, AR089: 14, AR299: 14, AR282: 13, AR104: 12, AR096: 11, AR219: 11, AR218: 10, |
| | | | | AR039: 10, AR185: 10, AR240: 10, AR300: 10, AR055: 9, AR060: 7, L0759: 4, L0657: 3, L0789: 3, L0439: 3, L0752: 3, L0758: 3, |
| | | | | S0360: 2, L0805: 2, L0438: 2, L0750: 2, L0777: 2, H0423: 2, H0171: 1, H0638: 1, H0351: 1, H0178: 1, H0606: 1, L0625: 1, L0769: 1, |
| | | | | L0771: 1, L0662: 1, L0794: 1, L0803: 1, L0804: 1, L0650: 1, L0774: 1, L0659: 1, L0809: 1, L0663: 1, H0436: 1, L0748: 1, L0740: 1, |
| | | | | H0445: 1, L0604: 1 and H0422: 1. |
| 116 | HLYDF73 | 566869 | 126 | AR277: 12, AR283: 9, AR282: 6, AR316: 6, AR300: 5, AR055: 5, AR089: 5, AR104: 4, AR299: 4, AR185: 4, AR096: 4, AR218: 4, |
| | | | | AR313: 4, AR240: 4, AR039: 3, AR219: 3, AR060: 2, H0445: 1 |
| 117 | HLYDO73 | 584787 | 127 | H0445: 1 |
| 118 | HLYGY91 | 658703 | 128 | AR313: 6, AR316: 5, AR218: 3, AR300: 3, AR299: 3, AR055: 3, AR185: 2, AR039: 2, AR096: 2, AR277: 2, AR219: 1, AR089: 1 |
| | | | | H0692: 10, L0777: 10, L0805: 5, L0803: 3, L2497: 2, H0328: 2, L0662: 2, L0794: 2, L0809: 2, L3832: 2, L0748: 2, L0752: 2, L0599: 2, |
| | | | | H0170: 1, H0402: 1, S0444: 1, S0360: 1, H0747: 1, L2486: 1, L3503: 1, H0427: 1, H0644: 1, H0038: 1, L0800: 1, L0648: 1, L0804: 1, |
| | | | | H0670: 1, H0478: 1, L0731: 1, L0758: 1, H0445: 1, S0434: 1, L0591: 1 and L0362: 1. |
| 119 | HMDAB29 | 584789 | 129 | AR313: 127, AR039: 86, AR299: 64, AR089: 56, AR185: 51, AR096: 50, AR277: 50, AR300: 42, AR316: 37, AR240: 33, AR218: 27, |
| | | | | AR219: 25, AR104: 22, AR060: 22, AR282: 20, AR055: 16, AR283: 9, H0346: 1, H0598: 1 and S0330: 1. |
| 120 | HMDAD44 | 566854 | 130 | AR277: 44, AR283: 35, AR219: 28, AR316: 26, AR089: 24, AR218: 23, AR313: 22, AR282: 22, AR055: 22, AR104: 21, AR299: 20, |
| | | | | AR185: 19, AR240: 19, AR096: 17, AR039: 16, AR060: 14, AR300: 14, L0749: 3, H0346: 1, H0370: 1, H0427: 1 and L0439: 1 |
| 121 | HMEDE24 | 837027 | 131 | AR219: 112, AR218: 102, AR268: 66, AR299: 42, AR210: 37, AR173: 37, AR269: 36, AR270: 33, AR039: 33, AR290: 29, |
| | | | | AR275: 28, AR300: 28, AR096: 28, AR188: 27, AR183: 26, AR175: 25, AR053: 25, AR191: 25, AR189: 25, AR198: 23, AR267: 23, |
| | | | | AR211: 23, AR196: 22, AR192: 22, AR162: 22, AR174: 22, AR163: 21, AR161: 21, AR180: 21, AR313: 21, AR274: 20, AR165: 20, |
| | | | | AR231: 20, AR271: 20, AR243: 20, AR181: 20, AR247: 20, AR182: 19, AR164: 19, AR089: 19, AR166: 19, AR178: 19, AR199: 18, |
| | | | | AR200: 18, AR282: 18, AR238: 18, AR213: 18, AR242: 18, AR240: 17, AR177: 17, AR205: 17, AR195: 17, AR316: 16, AR309: 16, |
| | | | | AR246: 16, AR203: 16, AR190: 16, AR212: 15, AR176: 15, AR197: 15, AR308: 15, AR312: 15, AR234: 15, AR272: 14, AR311: 14, |
| | | | | AR201: 14, AR245: 14, AR193: 14, AR207: 13, AR179: 13, AR264: 13, AR296: 13, AR185: 13, AR226: 13, AR239: 13, AR263: 13, |
| | | | | AR291: 13, AR254: 12, AR233: 12, AR257: 12, AR258: 12, AR255: 12, AR262: 12, AR060: 12, AR285: 12, AR256: 12, AR229: 11, |
| | | | | AR232: 11, AR261: 11, AR230: 11, AR293: 11, AR266: 11, AR237: 11, AR236: 11, AR104: 10, AR289: 10, AR253: 9, AR297: 9, |
| | | | | AR288: 9, AR287: 9, AR277: 9, AR252: 9, AR260: 9, AR250: 9, AR061: 8, AR204: 8, AR294: 8, AR295: 8, AR283: 8, AR228: 8, |
| | | | | AR227: 8, AR033: 7, AR286: 7, AR171: 7, AR235: 7, AR215: 7, AR225: 7, AR170: 6, AR223: 6, AR217: 6, AR221: 5, AR055: 5, |
| | | | | AR216: 5, AR169: 5, AR214: 4, AR172: 4, AR168: 4, AR222: 4, AR224: 4, H0266: 1 |
| 122 | HMEDI90 | 840077 | 132 | AR104: 7, AR316: 6, AR055: 5, AR060: 5, AR300: 4, AR185: 4, AR218: 4, AR282: 3, AR283: 3, AR240: 3, AR089: 3, AR219: 2, |
| | | | | AR299: 2, AR039: 1, AR313: 1, AR096: 1, AR277: 1, L0439: 8, S6028: 2, H0266: 2, L0438: 2, L0745: 2, L0717: 1, S0222: 1, H0052: 1, |
| | | | | H0194: 1, H0009: 1, T0010: 1, S0036: 1, L0776: 1, L0789: 1, S0028: 1, L0756: 1 and L0779: 1. |
| 123 | HMIBD93 | 634227 | 133 | AR277: 111, AR283: 78, AR219: 72, AR316: 65, AR104: 61, AR055: 58, AR089: 55, AR218: 54, AR313: 49, AR282: 48, AR299: 47, |
| | | | | AR039: 44, AR185: 41, AR096: 39, AR240: 36, AR060: 33, AR300: 31, L0439: 6, L0751: 5, L0770: 3, L0769: 3, L0764: 3, H0617: 2, |
| | | | | L0766: 2, L0752: 2, H0445: 2, S6024: 1, H0351: 1, S0222: 1, H0586: 1, S0010: 1, S6028: 1, L0768: 1, L0794: 1, L0438: 1, L0747: 1, |
| | | | | L0753: 1 and L0758: 1. |
| 124 | HMIBF07 | 603528 | 134 | AR055: 5, AR060: 4, AR240: 4, AR300: 3, AR299: 3, AR104: 3, AR283: 3, AR219: 2, AR218: 2, AR185: 2, AR039: 2, AR089: 2, |
| | | | | AR277: 2, AR096: 2, AR316: 2, AR282: 1, AR313: 1, S6028: 1 |
| 125 | HMJAK70 | 610099 | 135 | AR251: 4, AR052: 3, AR263: 3, AR269: 3, AR265: 2, AR282: 2, AR253: 2, AR309: 2, AR238: 2, AR271: 2, AR186: 2, AR247: 2, |
| | | | | AR270: 2, AR266: 1, AR277: 1, AR312: 1, AR053: 1, AR295: 1, AR241: 1, AR237: 1, AR310: 1, AR213: 1, AR182: 1, AR175: 1, |
| | | | | AR313: 1, AR268: 1, AR226: 1, AR096: 1, H0391: 1 |
| 126 | HMQAI38 | 589964 | 136 | AR277: 1, L0794: 3, H0634: 2, H0220: 1, S0476: 1, H0250: 1 and H0635: 1. |
| 127 | HMSHY25 | 886183 | 137 | AR055: 5, AR060: 4, AR282: 4, AR104: 3, AR283: 3, AR300: 3, AR185: 3, AR277: 2, AR039: 2, AR316: 2, AR096: 2, AR089: 2, |
| | | | | AR299: 2, AR218: 2, AR219: 2, AR240: 1, S0002: 1 and S0426: 1. |
| 128 | HMUAN45 | 833072 | 138 | AR236: 442, AR228: 429, AR211: 336, AR230: 331, AR287: 325, AR191: 311, AR239: 297, AR174: 289, AR233: 252, AR232: 252, |
| | | | | AR190: 238, AR288: 237, AR176: 228, AR203: 222, AR262: 218, AR260: 210, AR199: 209, AR181: 193, AR173: 191, AR163: 186, |
| | | | | AR178: 181, AR200: 175, AR162: 165, AR189: 164, AR297: 164, AR166: 154, AR161: 154, AR164: 149, AR188: 148, AR227: 147, |
| | | | | AR234: 145, AR261: 144, AR311: 142, AR257: 141, AR210: 140, AR179: 139, AR165: 137, AR272: 136, AR295: 134, AR226: 134, |
| | | | | AR255: 130, AR231: 129, AR180: 129, AR285: 127, AR196: 127, AR308: 126, AR275: 123, AR286: 123, AR177: 118, AR238: 117, |
| | | | | AR258: 116, AR235: 114, AR237: 104, AR294: 100, AR175: 99, AR264: 98, AR182: 96, AR212: 96, AR293: 93, AR185: 92, |
| | | | | AR291: 90, AR267: 79, AR229: 78, AR061: 75, AR240: 74, AR060: 74, AR256: 73, AR269: 65, AR104: 64, AR247: 63, AR274: 60, |
| | | | | AR201: 60, AR300: 59, AR033: 56, AR263: 53, AR289: 51, AR183: 49, AR193: 48, AR290: 43, AR195: 41, AR316: 40, AR270: 40, |
| | | | | AR296: 37, AR282: 36, AR312: 34, AR197: 33, AR218: 33, AR277: 29, AR299: 29, AR055: 28, AR089: 28, AR250: 27, AR268: 27, |
| | | | | AR207: 26, AR309: 25, AR053: 25, AR252: 24, AR266: 21, AR213: 20, AR242: 19, AR224: 19, AR219: 19, AR313: 18, AR223: 18, |
| | | | | AR169: 18, AR222: 17, AR171: 17, AR168: 16, AR172: 16, AR205: 15, AR217: 14, AR096: 14, AR245: 14, AR214: 14, AR204: 12, |
| | | | | AR225: 12, AR170: 11, AR246: 11, AR254: 11, AR198: 11, AR283: 10, AR192: 10, AR216: 10, AR271: 9, AR253: 9, AR215: 8, |
| | | | | AR221: 7, AR039: 5, AR243: 4, AR184: 1, AR310: 1, H0271: 5, H0083: 3, L0794: 3, H0656: 2, H0457: 2, H0179: 2, L0791: 2, |
| | | | | H0521: 2, L0744: 2, H0707: 2, H0265: 1, H0556: 1, H0657: 1, H0449: 1, H0580: 1, S0046: 1, H0411: 1, H0437: 1, H0333: 1, H0486: 1, |
| | | | | H0250: 1, S6028: 1, H0615: 1, H0628: 1, L0055: 1, H0040: 1, H0634: 1, S0144: 1, H0529: 1, L0769: 1, L0768: 1, L0766: 1, L0803: 1, |
| | | | | L0653: 1, L0793: 1, L0666: 1, S0052: 1, H0689: 1, H0522: 1, H0436: 1, L0743: 1, L0749: 1, L0779: 1, H0445: 1 and H0542: 1. |
| 129 | HMVBC31 | 825598 | 139 | AR055: 5, AR316: 4, AR218: 3, AR282: 3, AR104: 2, AR283: 2, AR185: 2, AR096: 2, AR313: 2, AR240: 2, AR060: 2, AR300: 2, |
| | | | | AR299: 1, AR277: 1, AR089: 1, AR039: 1, L0748: 10, H0556: 5, S0442: 5, L0438: 4, L0439: 4, L0754: 4, H0050: 3, H0040: 3, |
| | | | | L0769: 3, L0806: 3, L0757: 3, L0759: 3, L0601: 3, T0002: 2, S0418: 2, S0358: 2, S0360: 2, H0580: 2, S0476: 2, H0549: 2, H0644: 2, |
| | | | | H0529: 2, L0773: 2, L0768: 2, L0766: 2, L0805: 2, L0776: 2, L0663: 2, L0740: 2, L0747: 2, L0749: 2, S0436: 2, H0717: 1, S0212: 1, |
| | | | | H0484: 1, H0661: 1, S0376: 1, H0729: 1, H0733: 1, S0007: 1, H0643: 1, L0622: 1, L3653: 1, H0013: 1, H0042: 1, H0052: 1, L0157: 1, |
| | | | | L0471: 1, H0373: 1, H0083: 1, H0266: 1, T0006: 1, H0090: 1, H0268: 1, H0494: 1, H0509: 1, H0633: 1, H0646: 1, S0422: 1, S0002: 1, |
| | | | | L0761: 1, L0772: 1, L0643: 1, L0644: 1, L0794: 1, L0803: 1, L0555: 1, L0659: 1, L0783: 1, L0809: 1, L5622: 1, H0690: 1, H0658: 1, |
| | | | | S0328: 1, S0330: 1, S0152: 1, H0521: 1, H0696: 1, S0044: 1, S0027: 1, L0780: 1, L0752: 1, L0753: 1, L0755: 1, S0434: 1, L0485: 1, |
| | | | | H0667: 1, S0276: 1 and S0456: 1. |
| 130 | HMWBL03 | 822861 | 140 | AR313: 27, AR299: 16, AR219: 16, AR218: 14, AR316: 12, AR300: 6, AR039: 5, AR089: 5, AR055: 5, AR060: 4, AR240: 4, |
| | | | | AR096: 4, AR282: 4, AR283: 3, AR277: 3, AR185: 3, AR104: 2, S0422: 18, L0766: 7, H0341: 5, S0356: 5, H0543: 5, H0591: 4, |
| | | | | H0656: 3, S0354: 3, H0013: 3, T0042: 3, H0659: 3, L0748: 3, L0750: 3, L0777: 3, S0418: 2, S0442: 2, S0444: 2, S0410: 2, L0471: 2, |
| | | | | H0040: 2, H0063: 2, H0494: 2, L0646: 2, L0626: 2, L0806: 2, L0655: 2, L0663: 2, S0374: 2, H0547: 2, S0206: 2, L0756: 2, S0436: 2, |
| | | | | L0588: 2, H0624: 1, H0171: 1, S0342: 1, H0650: 1, S0360: 1, T0008: 1, H0733: 1, S0046: 1, H0257: 1, H0263: 1, L0738: 1, H0046: 1, |
| | | | | L0157: 1, H0039: 1, H0068: 1, H0135: 1, H0090: 1, T0041: 1, H0560: 1, S0440: 1, H0529: 1, L0640: 1, L0771: 1, L0768: 1, L0634: 1, |
| | | | | L0529: 1, L5623: 1, L0666: 1, L0665: 1, H0520: 1, H0519: 1, S0328: 1, S0152: 1, S0406: 1, L0751: 1, L0747: 1, L0759: 1, L0591: 1, |
| | | | | L0608: 1, H0542: 1, H0423: 1 and H0721: 1. |
| 131 | HMWCG28 | 847413 | 141 | L0439: 19, L0740: 16, L0748: 15, L0766: 12, H0052: 7, L0761: 7, L0741: 7, L0747: 7, H0135: 6, L0769: 6, L0438: 6, S0036: 4, |
| | | | | L0770: 4, L0806: 4, L0752: 4, L0731: 4, H0327: 3, H0012: 3, T0010: 3, L0794: 3, L0803: 3, L0783: 3, L0809: 3, L0744: 3, L0758: 3, |
| | | | | L0601: 3, H0341: 2, H0550: 2, H0333: 2, L0622: 2, H0599: 2, H0618: 2, H0318: 2, H0051: 2, S0388: 2, S0051: 2, H0100: 2, L0772: 2, |
| | | | | L0774: 2, L0664: 2, S0380: 2, L0751: 2, L0745: 2, L0779: 2, L0777: 2, L0753: 2, L0485: 2, H0265: 1, H0381: 1, H0483: 1, S0418: 1, |
| | | | | S0354: 1, S0444: 1, S0360: 1, S0046: 1, S0278: 1, H0261: 1, H0455: 1, H0438: 1, H0574: 1, H0559: 1, L0623: 1, H0706: 1, T0048: 1, |
| | | | | H0581: 1, H0251: 1, H0597: 1, H0544: 1, H0046: 1, H0457: 1, H0009: 1, H0081: 1, H0620: 1, H0200: 1, H0095: 1, H0275: 1, H0083: 1, |
| | | | | H0354: 1, H0266: 1, H0328: 1, H0428: 1, H0070: 1, T0023: 1, H0673: 1, H0124: 1, H0038: 1, H0087: 1, L0351: 1, L0564: 1, H0560: 1, |
| | | | | H0130: 1, S0344: 1, L0369: 1, L0763: 1, L0637: 1, L5575: 1, L5565: 1, L3905: 1, L0667: 1, L0641: 1, L0645: 1, L0764: 1, L0775: 1, |
| | | | | L0376: 1, L0776: 1, L0606: 1, L0659: 1, L0789: 1, L0666: 1, L0663: 1, L0665: 1, H0693: 1, H0547: 1, H0660: 1, H0539: 1, S0044: 1, |
| | | | | H0436: 1, L0742: 1, L0749: 1, L0755: 1, L0759: 1, S0031: 1, S0260: 1, H0445: 1, H0707: 1, S0434: 1, L0581: 1, L0593: 1, S0194: 1, |
| | | | | H0543: 1, H0423: 1 and H0506: 1. |
| 132 | HNECW49 | 639117 | 142 | AR055: 8, AR060: 7, AR240: 6, AR185: 5, AR300: 5, AR218: 5, AR104: 5, AR283: 5, AR089: 4, AR299: 4, AR282: 4, AR316: 3, |
| | | | | AR039: 3, AR313: 3, AR096: 3, AR277: 2, AR219: 2, H0179: 2 and H0402: 1. |
| 133 | HNFCY57 | 877653 | 143 | H0271: 3, H0575: 2, H0416: 2, H0518: 2, L0748: 2, S6022: 1, L0021: 1, H0024: 1, H0179: 1, S0002: 1, L0794: 1, S0053: 1 and |
| | | | | S0216: 1. |
| 134 | HNFGR08 | 825417 | 144 | AR055: 5, AR060: 4, AR185: 3, AR240: 3, AR300: 2, AR104: 2, AR282: 2, AR089: 2, AR283: 2, AR219: 2, AR218: 2, AR316: 1, |
| | | | | AR039: 1, AR096: 1, H0271: 1 |
| 135 | HNGAK51 | 603910 | 145 | AR313: 60, AR039: 47, AR299: 29, AR277: 29, AR089: 26, AR185: 24, AR096: 23, AR240: 20, AR300: 19, AR316: 17, AR218: 14, |
| | | | | AR060: 14, AR219: 14, AR104: 14, AR055: 11, AR282: 10, AR283: 6, S0052: 1 |
| 136 | HNGDX18 | 1145071 | 146 | AR228: 8, AR176: 7, AR161: 6, AR162: 6, AR163: 6, AR251: 5, AR223: 5, AR181: 5, AR171: 5, AR225: 4, AR060: 4, AR267: 4; |
| | | | | AR055: 4, AR216: 4, AR261: 4, AR235: 4, AR236: 4, AR268: 4, AR230: 4, AR269: 4, AR288: 4, AR191: 4, AR052: 4, AR182: 4, |
| | | | | AR221: 4, AR239: 4, AR254: 3, AR242: 3, AR255: 3, AR312: 3, AR233: 3, AR287: 3, AR272: 3, AR262: 3, AR165: 3, AR271: 3, |
| | | | | AR244: 3, AR178: 3, AR229: 3, AR164: 3, AR173: 3, AR257: 3, AR290: 3, AR274: 3, AR266: 3, AR061: 3, AR297: 3, AR166: 3, |
| | | | | AR282: 3, AR198: 3, AR053: 3, AR231: 3, AR199: 3, AR291: 3, AR177: 3, AR201: 3, AR214: 3, AR264: 3, AR247: 3, AR196: 3, |
| | | | | AR224: 3, AR190: 3, AR174: 3, AR270: 3, AR296: 2, AR286: 2, AR300: 2, AR309: 2, AR203: 2, AR089: 2, AR200: 2, AR294: 2, |
| | | | | AR289: 2, AR249: 2, AR311: 2, AR240: 2, AR168: 2, AR293: 2, AR238: 2, AR188: 2, AR217: 2, AR175: 2, AR285: 2, AR179: 2, |
| | | | | AR234: 2, AR310: 2, AR185: 2, AR033: 2, AR298: 2, AR260: 2, AR226: 2, AR316: 2, AR227: 2, AR222: 2, AR313: 2, AR265: 2, |
| | | | | AR197: 2, AR277: 2, AR237: 2, AR189: 2, AR295: 2, AR299: 2, AR193: 2, AR283: 2, AR172: 2, AR183: 2, AR275: 2, AR232: 2, |
| | | | | AR211: 2, AR253: 2, AR210: 2, AR104: 2, AR096: 2, AR213: 1, AR258: 1, AR292: 1, AR308: 1, AR273: 1, AR194: 1, AR180: 1, |
| | | | | AR184: 1, AR284: 1, AR252: 1, AR205: 1, H0457: 4, S0052: 4, H0271: 3, L0766: 3, H0543: 3, H0255: 2, H0402: 2, H0253: 2, |
| | | | | L0805: 2, L0754: 2, H0422: 2, H0583: 1, H0650: 1, H0656: 1, H0484: 1, H0483: 1, H0254: 1, L3659: 1, S0442: 1, S0360: 1, H0580: 1, |
| | | | | S0140: 1, H0747: 1, H0393: 1, H0486: 1, H0250: 1, H0618: 1, H0050: 1, H0630: 1, H0719: 1, H0182: 1, H0063: 1, H0087: 1, H0264: 1, |
| | | | | H0488: 1, H0487: 1, L0351: 1, T0042: 1, S0448: 1, S0002: 1, L0761: 1, L0378: 1, L0655: 1, L4501: 1, H0539: 1, S0188: 1, S0146: 1, |
| | | | | H0707: 1, L0599: 1, H0136: 1, H0423: 1 and H0677: 1. |
| | HNGDX18 | 866177 | 258 | |
| 137 | HNGFR54 | 695748 | 147 | S0052: 2 |
| 138 | HNGGA68 | 638116 | 148 | AR055: 6, AR060: 6, AR218: 6, AR300: 4, AR185: 4, AR240: 4, AR299: 3, AR104: 3, AR219: 3, AR089: 3, AR282: 3, AR283: 3, |
| | | | | AR316: 3, AR096: 2, AR039: 2, AR313: 2, AR277: 2, H0419: 1, H0305: 1 and S0052: 1. |
| 139 | HNGHK37 | 609889 | 149 | AR055: 5, AR060: 5, AR218: 4, AR300: 3, AR185: 3, AR283: 2, AR299: 2, AR240: 2, AR089: 2, AR282: 2, AR104: 2, AR316: 2, |
| | | | | AR096: 1, AR313: 1, AR277: 1, AR039: 1, S0052: 1 |
| 140 | HNGIV64 | 561572 | 150 | AR185: 8, AR039: 8, AR060: 8, AR313: 7, AR055: 7, AR096: 6, AR300: 6, AR089: 6, AR240: 6, AR218: 6, AR299: 6, AR277: 6, |
| | | | | AR316: 5, AR104: 5, AR283: 4, AR282: 3, AR219: 1, S0052: 1 |
| 141 | HNGJB41 | 852178 | 151 | AR055: 6, AR060: 6, AR282: 5, AR300: 4, AR277: 4, AR104: 4, AR316: 4, AR283: 4, AR218: 4, AR185: 3, AR299: 3, AR219: 3, |
| | | | | AR089: 3, AR313: 3, AR240: 3, AR096: 2, AR039: 2, S0052: 1 |
| 142 | HNGKT41 | 836061 | 152 | AR316: 11, AR055: 6, AR060: 6, AR277: 5, AR300: 5, AR282: 5, AR104: 4, AR240: 4, AR185: 4, AR218: 3, AR283: 3, AR313: 3, |
| | | | | AR039: 3, AR089: 3, AR219: 3, AR096: 2, AR299: 2, S0428: 1 |
| 143 | HNGMW45 | 838613 | 153 | AR316: 3, S0428: 1 |
| 144 | HNGNO53 | 836063 | 154 | AR055: 7, AR060: 6, AR240: 5, AR300: 5, AR218: 5, AR185: 4, AR283: 4, AR299: 4, AR277: 4, AR089: 4, AR104: 3, AR316: 3, |
| | | | | AR096: 3, AR219: 2, AR313: 2, AR039: 2, AR282: 1, S0428: 2 and L0439: 1. |
| 145 | HNGPJ25 | 834942 | 155 | AR060: 7, AR055: 7, AR218: 6, AR240: 6, AR282: 5, AR185: 5, AR277: 5, AR300: 5, AR299: 4, AR283: 3, AR089: 3, AR104: 3, |
| | | | | AR316: 3, AR096: 3, AR039: 2, AR313: 2, AR219: 2, H0251: 8, H0624: 4, L0752: 4, H0286: 1, L0598: 1, S0428: 1 and H0144: 1. |
| 146 | HNHCT47 | 634691 | 156 | AR313: 39, AR039: 38, AR219: 29, AR218: 24, AR299: 23, AR185: 22, AR096: 21, AR089: 20, AR300: 17, AR316: 15, AR060: 14, |
| | | | | AR277: 14, AR104: 13, AR055: 12, AR240: 11, AR282: 10, AR283: 8, S0053: 2 and S0046: 1. |
| 147 | HNHKI74 | 777856 | 157 | S0216: 1 |
| 148 | HNHKV56 | 800877 | 158 | S0216: 1 and L0746: 1. |
| 149 | HOACG07 | 792928 | 159 | AR202: 138, AR194: 120, AR315: 99, AR281: 99, AR198: 98, AR244: 88, AR246: 86, AR243: 85, AR205: 85, AR192: 82, |
| | | | | AR241: 80, AR280: 79, AR204: 73, AR265: 70, AR283: 66, AR206: 63, AR310: 59, AR263: 57, AR271: 57, AR314: 56, AR273: 54, |
| | | | | AR053: 50, AR052: 49, AR282: 49, AR033: 48, AR277: 47, AR275: 46, AR213: 45, AR274: 44, AR312: 43, AR316: 43, AR309: 42, |
| | | | | AR104: 40, AR240: 40, AR300: 40, AR289: 39, AR096: 39, AR266: 38, AR251: 37, AR247: 36, AR089: 36, AR299: 36, AR284: 35, |
| | | | | AR313: 35, AR186: 34, AR039: 33, AR055: 33, AR175: 32, AR219: 31, AR295: 31, AR291: 29, AR177: 28, AR218: 28, AR185: 27, |
| | | | | AR268: 26, AR285: 26, AR270: 25, AR286: 25, AR253: 24, AR183: 24, AR060: 24, AR232: 23, AR061: 23, AR292: 23, AR298: 23, |
| | | | | AR258: 22, AR256: 20, AR248: 20, AR296: 19, AR182: 19, AR238: 18, AR269: 18, AR290: 18, AR294: 18, AR267: 17, AR231: 17, |
| | | | | AR226: 17, AR259: 17, AR229: 16, AR227: 16, AR234: 16, AR293: 15, AR233: 15, AR237: 14, AR249: 13, AR184: 13, AR179: 11 |
| | | | | L0748: 4, L0749: 4, H0265: 3, S0442: 2, H0587: 2, H0427: 2, S0142: 2, L0769: 2, L0761: 2, L0800: 2, L0794: 2, L0657: 2, L0659: 2, |
| | | | | L0663: 2, L0665: 2, H0689: 2, L0731: 2, H0677: 2, H0713: 1, H0716: 1, H0657: 1, H0661: 1, H0638: 1, S0360: 1, H0722: 1, H0122: 1, |
| | | | | H0545: 1, H0009: 1, H0123: 1, S0388: 1, H0252: 1, T0023: 1, T0006: 1, H0135: 1, H0163: 1, H0412: 1, L0351: 1, S0440: 1, H0529: 1, |
| | | | | L0372: 1, L0646: 1, L0645: 1, L0764: 1, L0662: 1, L0767: 1, L0766: 1, L0649: 1, L0803: 1, L0776: 1, L0655: 1, L0382: 1, L0809: 1, |
| | | | | L0789: 1, H0672: 1, H0627: 1, L0751: 1, L0750: 1, L0753: 1, L0757: 1, L0758: 1 and L0759: 1. |
| 150 | HODBB70 | 520196 | 160 | AR055: 7, AR218: 6, AR060: 5, AR104: 5, AR240: 4, AR300: 4, AR299: 4, AR096: 4, AR219: 4, AR283: 4, AR039: 3, AR185: 3, |
| | | | | AR089: 3, AR316: 3, AR282: 3, AR277: 2, H0328: 1, L0789: 1, L0742: 1 and L0439: 1. |
| 151 | HOEBK60 | 789396 | 161 | AR219: 21, AR218: 19, AR316: 12, AR313: 10, AR039: 9, AR096: 8, AR089: 8, AR299: 7, AR240: 7, AR055: 7, AR300: 7, AR060: 7, |
| | | | | AR282: 6, AR185: 5, AR283: 5, AR104: 4, AR277: 4, L0439: 10, L0731: 7, L0605: 6, L0766: 5, L0803: 5, L0471: 4, L0655: 4, |
| | | | | L0659: 4, L0756: 4, S0408: 3, S0440: 3, H0648: 3, L0777: 3, H0170: 2, S0420: 2, L0021: 2, H0014: 2, T0010: 2, L0143: 2, H0090: 2, |
| | | | | H0591: 2, H0641: 2, L0638: 2, L0662: 2, L0794: 2, L0776: 2, L0657: 2, L0809: 2, L0666: 2, L0663: 2, H0547: 2, S0126: 2, H0518: 2, |
| | | | | L0751: 2, L0755: 2, L0758: 2, L0588: 2, H0543: 2, H0624: 1, H0740: 1, S0430: 1, H0657: 1, H0656: 1, S0212: 1, S0110: 1, H0661: 1, |
| | | | | H0663: 1, S0442: 1, S0358: 1, S0376: 1, S0360: 1, S0476: 1, L0717: 1, L0586: 1, T0114: 1, H0427: 1, L0105: 1, H0318: 1, S0474: 1, |
| | | | | H0581: 1, H0052: 1, H0309: 1, L0157: 1, H0024: 1, H0071: 1, H0275: 1, H0354: 1, S6028: 1, H0266: 1, S0003: 1, H0328: 1, H0615: 1, |
| | | | | H0428: 1, H0031: 1, H0169: 1, H0163: 1, H0038: 1, H0040: 1, H0551: 1, H0272: 1, T0041: 1, S0014: 1, S0438: 1, H0646: 1, S0142: 1, |
| | | | | S0210: 1, S0426: 1, H0529: 1, L0372: 1, L0645: 1, L0764: 1, L0651: 1, L0656: 1, L5623: 1, L0789: 1, L0665: 1, H0520: 1, H0689: 1, |
| | | | | H0682: 1, H0435: 1, H0659: 1, S0380: 1, H0696: 1, L0740: 1, L0754: 1, L0746: 1, L0750: 1, L0779: 1, L0752: 1, S0260: 1, S0434: 1, |
| | | | | S0436: 1, L0485: 1 and H0423: 1. |
| 152 | HOFMO16 | 596835 | 162 | AR281: 9, AR263: 7, AR265: 7, AR277: 7, AR183: 6, AR283: 6, AR204: 6, AR251: 6, AR243: 5, AR315: 5, AR282: 5, AR267: 4, |
| | | | | AR182: 4, AR240: 4, AR316: 4, AR269: 4, AR280: 4, AR247: 4, AR310: 4, AR299: 4, AR234: 4, AR300: 4, AR238: 4, AR060: 4, |
| | | | | AR096: 4, AR266: 4, AR268: 4, AR294: 4, AR055: 4, AR309: 4, AR184: 4, AR313: 3, AR270: 3, AR253: 3, AR312: 3, AR289: 3, |
| | | | | AR275: 3, AR033: 3, AR104: 3, AR292: 3, AR229: 3, AR226: 3, AR206: 3, AR053: 3, AR231: 3, AR284: 3, AR219: 3, AR202: 3, |
| | | | | AR205: 3, AR218: 3, AR295: 3, AR039: 3, AR089: 3, AR052: 3, AR232: 3, AR061: 3, AR296: 3, AR185: 3, AR186: 3, AR227: 3, |
| | | | | AR286: 3, AR285: 3, AR291: 3, AR246: 3, AR290: 3, AR233: 2, AR293: 2, AR271: 2, AR198: 2, AR237: 2, AR298: 2, AR213: 2, |
| | | | | AR175: 2, AR177: 2, AR256: 2, AR273: 2, AR258: 2, AR241: 1, AR314: 1, AR259: 1, AR248: 1, AR192: 1, H0415: 1 |
| 153 | HOFNB74 | 762821 | 163 | AR277: 18, AR283: 18, AR282: 14, AR313: 12, AR316: 11, AR055: 9, AR089: 9, AR240: 8, AR104: 8, AR218: 8, AR299: 8, |
| | | | | AR096: 8, AR219: 8, AR300: 7, AR185: 7, AR039: 6, AR060: 5, H0415: 1 |
| 154 | HOHBO66 | 853375 | 164 | L0766: 6, L0747: 5, S0408: 4, L0748: 4, L0663: 3, L0758: 3, H0556: 2, H0637: 2, H0486: 2, H0581: 2, H0052: 2, H0530: 2, H0560: 2, |
| | | | | H0641: 2, L0764: 2, L0783: 2, S0328: 2, L0751: 2, L0592: 2, H0543: 2, H0422: 2, H0650: 1, H0656: 1, H0663: 1, H0638: 1, S0418: 1, |
| | | | | S0420: 1, S0356: 1, S0376: 1, S0132: 1, S6026: 1, S0278: 1, S0222: 1, H0586: 1, H0632: 1, H0069: 1, H0427: 1, T0082: 1, H0457: 1, |
| | | | | H0083: 1, H0510: 1, H0188: 1, L0138: 1, S0250: 1, H0644: 1, L0143: 1, H0068: 1, H0551: 1, T0041: 1, L0769: 1, L0761: 1, L0800: 1, |
| | | | | L0644: 1, L0767: 1, L0768: 1, L0655: 1, L0659: 1, L0368: 1, H0144: 1, H0702: 1, H0547: 1, H0519: 1, H0711: 1, H0690: 1, H0435: 1, H0670: 1, |
| | | | | S3012: 1, L0755: 1, L0731: 1, S0031: 1, L0596: 1, H0653: 1 and H0506: 1. |
| 155 | HORBS82 | 638293 | 165 | H0706: 2, L0809: 2, S0360: 1, L0623: 1, H0122: 1, H0041: 1, H0095: 1, H0292: 1, H0424: 1, S0364: 1, L0794: 1, L0787: 1, L0663: 1, |
| | | | | H0780: 1, H0435: 1, L0743: 1, L0747: 1 and L0731: 1. |
| 156 | HORBV76 | 839270 | 166 | AR313: 8, AR218: 8, AR060: 7, AR055: 7, AR219: 6, AR240: 6, AR185: 6, AR282: 5, AR299: 5, AR039: 5, AR316: 5, AR089: 5, |
| | | | | AR300: 4, AR096: 4, AR283: 4, AR104: 4, AR277: 3, L0794: 2, L0608: 2, H0686: 1, S0278: 1, H0292: 1, H0031: 1, L0065: 1, S0344: 1, |
| | | | | L0638: 1, L0662: 1, L0803: 1, L0659: 1, L0665: 1, L0749: 1 and L0780: 1. |
| 157 | HOSDO75 | 862049 | 167 | AR060: 6, AR055: 6, AR218: 6, AR240: 5, AR277: 5, AR300: 4, AR185: 4, AR299: 4, AR283: 4, AR089: 4, AR282: 3, AR104: 3, |
| | | | | AR316: 3, AR096: 3, AR313: 2, AR039: 2, AR219: 2, L0766: 2, L0362: 2, S0358: 1, H0580: 1, S0046: 1, H0266: 1, S0003: 1, H0553: 1, |
| | | | | S0344: 1, L0761: 1, L0794: 1, S0152: 1, L0777: 1 and L0755: 1. |
| 158 | HOSEI81 | 562778 | 168 | AR055: 5, AR060: 5, AR104: 4, AR282: 4, AR300: 4, AR299: 3, AR185: 3, AR089: 3, AR240: 3, AR039: 3, AR283: 2, AR218: 2, |
| | | | | AR096: 2, AR316: 2, AR219: 2, AR313: 2, AR277: 2, L0777: 2, S0214: 1 and H0539: 1. |
| 159 | HOUDE92 | 580866 | 169 | H0052: 17, L0745: 11, L0748: 10, H0547: 7, L0439: 7, L0755: 6, L0771: 5, L0774: 5, L0662: 4, L0746: 4, L0777: 4, S0474: 3, |
| | | | | L0163: 3, H0059: 3, H0100: 3, L0775: 3, L0741: 3, H0261: 2, H0333: 2, H0194: 2, H0545: 2, H0012: 2, H0617: 2, H0135: 2, L0770: 2, |
| | | | | L0665: 2, L0438: 2, H0520: 2, L0747: 2, L0752: 2, L0753: 2, S0040: 1, L0717: 1, H0437: 1, H0550: 1, S6016: 1, H0497: 1, H0574: 1, |
| | | | | H0599: 1, H0575: 1, H0618: 1, H0253: 1, H0041: 1, H0620: 1, H0373: 1, H0188: 1, H0124: 1, H0068: 1, H0040: 1, H0561: 1, S0448: 1, |
| | | | | S0210: 1, L0763: 1, L0644: 1, L0767: 1, L0768: 1, L0375: 1, L0651: 1, L0659: 1, L0540: 1, L5622: 1, H0144: 1, H0593: 1, S0126: 1, |
| | | | | H0539: 1, S0152: 1, H0694: 1, S0390: 1, S0028: 1, L0749: 1, L0786: 1, L0780: 1, L0731: 1, L0757: 1, L0758: 1, S0436: 1, L0592: 1 and |
| | | | | S0276: 1. |
| 160 | HPCAL26 | 762822 | 170 | L0659: 11, S0126: 11, L0731: 11, S0192: 11, L0666: 9, L0777: 7, T0049: 5, S0358: 5, L0771: 5, L0757: 5, S0360: 4, S0440: 4, |
| | | | | L0740: 4, L0758: 4, S0212: 3, S0356: 3, S0046: 3, H0369: 3, H0545: 3, L0662: 3, L0774: 3, L0809: 3, H0519: 3, L0752: 3, S0011: 3, |
| | | | | H0295: 2, H0662: 2, S0468: 2, H0012: 2, H0024: 2, H0356: 2, H0616: 2, H0268: 2, H0412: 2, L0646: 2, L0803: 2, S0013: 2, L0754: 2, |
| | | | | L0747: 2, L0759: 2, S0040: 1, S0418: 1, S0442: 1, S0376: 1, H0676: 1, L0717: 1, H0550: 1, S0222: 1, H0574: 1, L0021: 1, H0575: 1, |
| | | | | H0036: 1, H0590: 1, H0618: 1, T0048: 1, H0309: 1, H0596: 1, T0110: 1, H0546: 1, H0046: 1, H0123: 1, H0014: 1, S0003: 1, S0022: 1, |
| | | | | H0428: 1, H0622: 1, H0031: 1, H0673: 1, L0455: 1, H0316: 1, H0598: 1, H0163: 1, H0038: 1, H0433: 1, H0413: 1, T0069: 1, S0438: 1, |
| | | | | H0633: 1, H0647: 1, S0210: 1, L0770: 1, L0769: 1, L0768: 1, L0794: 1, L0519: 1, L0789: 1, L0790: 1, L0664: 1, L0665: 1, H0144: 1, |
| | | | | S0330: 1, S0136: 1, H0696: 1, S3014: 1, S0206: 1, L0751: 1, L0749: 1, L0756: 1, L0779: 1, S0031: 1, S0242: 1, S0194: 1 and S0276: 1. |
| 161 | HPEAD23 | 773409 | 171 | AR277: 68, AR283: 65, AR219: 61, AR316: 49, AR218: 41, AR089: 41, AR104: 39, AR299: 38, AR055: 36, AR185: 36, AR039: 34, |
| | | | | AR282: 33, AR240: 31, AR096: 31, AR313: 31, AR060: 30, AR300: 25, H0585: 18, L0779: 3, L0775: 2, S0374: 2, H0341: 1, S0358: 1, |
| | | | | S0360: 1, S0408: 1, H0559: 1, T0039: 1, H0156: 1, H0253: 1, S0182: 1, H0318: 1, H0545: 1, H0083: 1, H0165: 1, L0768: 1, L0774: 1, |
| | | | | L0750: 1, L0752: 1 and S0031: 1. |
| 162 | HPEBA84 | 753957 | 172 | AR313: 5, AR240: 4, AR299: 4, AR185: 4, AR300: 4, AR060: 4, AR055: 3, AR089: 3, AR096: 2, AR282: 2, AR039: 2, AR218: 2, |
| | | | | AR316: 2, AR277: 1, AR219: 1, AR104: 1, L0591: 2, L3643: 1, S0420: 1, L3388: 1, H0057: 1, H0166: 1, L0648: 1, L0518: 1, L0809: 1, |
| | | | | L0519: 1, L0754: 1 and L0599: 1. |
| 163 | HPFCI36 | 855966 | 173 | AR218: 18, AR219: 16, AR313: 14, AR089: 9, AR055: 7, AR282: 6, AR060: 6, AR316: 6, AR185: 6, AR299: 5, AR240: 5, AR039: 5, |
| | | | | AR300: 4, AR104: 4, AR283: 4, AR096: 4, AR277: 2, L0591: 4, L0754: 3, H0450: 2, H0486: 2, H0046: 2, S0003: 2, H0494: 2, |
| | | | | S0422: 2, L0659: 2, S0126: 2, H0659: 2, L0750: 2, L0601: 2, H0170: 1, H0556: 1, H0657: 1, S0420: 1, S0354: 1, H0734: 1, H0749: 1, |
| | | | | H0455: 1, H0403: 1, H0600: 1, H0013: 1, H0156: 1, H0599: 1, H0744: 1, H0082: 1, S0214: 1, H0622: 1, H0031: 1, H0673: 1, H0169: 1, |
| | | | | H0090: 1, H0038: 1, H0022: 1, H0560: 1, L0643: 1, L0771: 1, L0773: 1, L0655: 1, L0807: 1, L3872: 1, L0792: 1, L0665: 1, L3811: 1, |
| | | | | S0378: 1, H0518: 1, S0152: 1, H0521: 1, L0748: 1, L0749: 1, L0757: 1, L0759: 1, S0434: 1, L0596: 1, L0605: 1 and H0653: 1. |
| 164 | HPFDI37 | 862056 | 174 | AR055: 5, AR218: 5, AR060: 4, AR299: 3, AR300: 3, AR283: 3, AR104: 3, AR282: 3, AR240: 3, AR039: 2, AR219: 2, AR277: 2, |
| | | | | AR185: 2, AR316: 2, AR089: 2, AR313: 2, AR096: 1, L0771: 13, L0752: 12, L0748: 9, L0731: 7, S0360: 6, L0769: 6, S0358: 5, |
| | | | | H0318: 5, L0770: 5, L0747: 5, L0758: 5, L0599: 5, H0140: 4, H0545: 4, H0673: 4, L0774: 4, L0655: 4, L0659: 4, L0664: 4, L0665: 4, |
| | | | | H0659: 4, H0648: 4, L0740: 4, L0754: 4, L0588: 4, H0662: 3, H0169: 3, H0413: 3, L0638: 3, L0775: 3, L0783: 3, L0666: 3, L0663: 3, |
| | | | | H0660: 3, H0521: 3, L0749: 3, L0750: 3, L0757: 3, H0543: 3, H0170: 2, S0110: 2, H0574: 2, H0581: 2, H0535: 2, L0065: 2, H0647: 2, |
| | | | | S0344: 2, L0763: 2, L0764: 2, L0662: 2, L0767: 2, L0803: 2, L0806: 2, L0776: 2, S0374: 2, S0328: 2, S0380: 2, H0576: 2, S0028: 2, |
| | | | | L0591: 2, H0352: 2, H0265: 1, T0002: 1, H0686: 1, H0685: 1, H0295: 1, H0657: 1, L0760: 1, S0212: 1, H0484: 1, H0177: 1, H0638: 1, |
| | | | | L0617: 1, L0005: 1, S0442: 1, S0376: 1, H0637: 1, H0411: 1, H0370: 1, H0587: 1, H0632: 1, T0109: 1, H0156: 1, H0085: 1, H0327: 1, |
| | | | | H0530: 1, H0046: 1, H0041: 1, S0388: 1, H0630: 1, H0271: 1, H0644: 1, H0628: 1, H0181: 1, H0617: 1, H0674: 1, H0068: 1, H0040: 1, |
| | | | | H0488: 1, L0564: 1, T0041: 1, H0494: 1, H0633: 1, S0144: 1, S0210: 1, S0422: 1, L0369: 1, L0762: 1, L0372: 1, L0646: 1, L0765: 1, |
| | | | | L0363: 1, L0768: 1, L0651: 1, L0653: 1, L0629: 1, L0657: 1, L0526: 1, L0532: 1, S0053: 1, S0216: 1, H0144: 1, H0519: 1, S0126: 1, |
| | | | | H0689: 1, H0690: 1, H0684: 1, S0027: 1, L0742: 1, L0756: 1, L0780: 1, L0755: 1, H0444: 1, H0445: 1, L0596: 1, L0605: 1, L0592: 1, |
| | | | | L0593: 1, L0362: 1, L0603: 1 and H0136: 1. |
| 165 | HPIAA80 | 829972 | 175 | AR218: 13, AR219: 11, AR282: 9, AR089: 8, AR055: 8, AR240: 7, AR104: 6, AR060: 6, AR283: 6, AR277: 6, AR039: 6, AR316: 5, |
| | | | | AR299: 5, AR096: 4, AR185: 4, AR300: 4, AR313: 3, L0750: 3, H0672: 2, L0744: 2, H0587: 1, L0021: 1, S0010: 1, H0024: 1, |
| | | | | H0266: 1, S0364: 1, H0068: 1, H0038: 1, T0004: 1, H0625: 1, S0150: 1, L0769: 1, L0667: 1, L0649: 1, L0784: 1, L0526: 1, L0790: 1, |
| | | | | L0792: 1, L0793: 1, L0663: 1, H0696: 1, L0747: 1, L0608: 1 and S0276: 1. |
| 166 | HPJCW58 | 612866 | 176 | AR055: 8, AR060: 6, AR282: 6, AR218: 5, AR104: 4, AR300: 4, AR240: 4, AR283: 4, AR219: 4, AR299: 3, AR089: 3, AR185: 3, |
| | | | | AR316: 3, AR096: 3, AR039: 2, AR277: 2, AR313: 1, S0152: 1 |
| 167 | HPMCV30 | 612870 | 177 | L0526: 11, L0622: 8, H0670: 8, H0087: 7, S0360: 5, H0594: 5, H0188: 5, H0412: 5, S0206: 5, H0218: 4, S0418: 4, H0318: 4, |
| | | | | H0024: 4, H0617: 4, L0770: 4, L0783: 4, S0328: 4, S0027: 4, H0265: 3, H0663: 3, T0048: 3, H0597: 3, H0123: 3, H0673: 3, S0366: 3, |
| | | | | H0135: 3, H0616: 3, S0002: 3, L0775: 3, L0776: 3, L0518: 3, L0663: 3, H0144: 3, S0374: 3, S0126: 3, S0380: 3, S3014: 3, H0352: 3, |
| | | | | H0624: 2, H0556: 2, H0219: 2, S0114: 2, H0657: 2, H0341: 2, S0110: 2, H0661: 2, H0305: 2, H0351: 2, H0492: 2, T0039: 2, H0052: 2, |
| | | | | H0546: 2, H0178: 2, H0083: 2, H0688: 2, H0068: 2, H0038: 2, H0040: 2, H0509: 2, S0142: 2, S0426: 2, L0769: 2, L0521: 2, L0768: 2, |
| | | | | H0689: 2, L0750: 2, H0445: 2, H0170: 1, H0686: 1, H0344: 1, H0295: 1, H0294: 1, S0134: 1, S0218: 1, H0650: 1, L0760: 1, S0116: 1, |
| | | | | S0001: 1, H0483: 1, H0255: 1, H0662: 1, H0402: 1, S0358: 1, S0376: 1, H0675: 1, H0580: 1, S0046: 1, S0132: 1, S0278: 1, H0549: 1, |
| | | | | H0441: 1, H0370: 1, H0455: 1, H0333: 1, H0643: 1, L0623: 1, T0060: 1, H0250: 1, T0082: 1, S0010: 1, H0505: 1, H0421: 1, H0327: 1, |
| | | | | H0545: 1, H0150: 1, H0086: 1, H0012: 1, H0099: 1, H0109: 1, H0290: 1, T0023: 1, H0031: 1, H0181: 1, H0606: 1, H0166: 1, H0674: 1, |
| | | | | H0124: 1, H0163: 1, H0063: 1, H0551: 1, H0413: 1, H0102: 1, H0560: 1, S0372: 1, H0130: 1, S0144: 1, S0344: 1, S0422: 1, L0598: 1, |
| | | | | L0507: 1, L0639: 1, L0648: 1, L0662: 1, L0767: 1, L0524: 1, L0805: 1, L0659: 1, L0542: 1, L0809: 1, L0530: 1, L0789: 1, H0691: 1, |
| | | | | H0520: 1, H0519: 1, H0682: 1, H0684: 1, H0659: 1, H0658: 1, H0648: 1, H0672: 1, S0378: 1, S0152: 1, S0174: 1, H0576: 1, L0612: 1, |
| | | | | H0540: 1, L0748: 1, L0740: 1, L0752: 1, L0758: 1, S0436: 1, L0485: 1, L0599: 1, L0608: 1, L0595: 1, L0362: 1, L0366: 1, S0106: 1, |
| | | | | H0543: 1, S0446: 1, L0600: 1 and H0008: 1. |
| 168 | HPRBH85 | 695752 | 178 | AR284: 14, AR295: 10, AR271: 8, AR293: 7, AR246: 7, AR243: 7, AR291: 7, AR244: 6, AR286: 6, AR290: 6, AR241: 6, AR285: 6, |
| | | | | AR206: 6, AR310: 5, AR249: 5, AR273: 5, AR198: 5, AR280: 5, AR312: 5, AR186: 5, AR270: 5, AR294: 5, AR204: 5, AR269: 5, |
| | | | | AR251: 5, AR202: 5, AR292: 5, AR275: 4, AR033: 4, AR253: 4, AR053: 4, AR182: 4, AR314: 4, AR259: 4, AR315: 4, AR298: 4, |
| | | | | AR265: 4, AR309: 4, AR282: 4, AR274: 4, AR183: 4, AR061: 4, AR205: 4, AR296: 4, AR289: 4, AR052: 4, AR313: 4, AR175: 3, |
| | | | | AR213: 3, AR238: 3, AR268: 3, AR248: 3, AR055: 3, AR177: 3, AR247: 3, AR231: 3, AR104: 3, AR256: 3, AR226: 2, AR185: 2, |
| | | | | AR283: 2, AR277: 2, AR267: 2, AR227: 2, AR300: 2, AR096: 2, AR089: 2, AR258: 2, AR219: 2, AR263: 2, AR299: 2, AR237: 2, |
| | | | | AR240: 2, AR060: 2, AR316: 2, AR218: 2, AR281: 2, AR039: 2, AR233: 1, AR232: 1, AR184: 1, AR234: 1, AR266: 1, AR192: 1 |
| | | | | L0439: 5, L0740: 4, L0777: 4, L0755: 4, L0794: 2, L0803: 2, L0438: 2, L0602: 2, L0752: 2, L0599: 2, H0713: 1, H0583: 1, S0360: 1, |
| | | | | L3653: 1, L0471: 1, H0510: 1, H0032: 1, H0488: 1, H0413: 1, L0662: 1, L0804: 1, L0775: 1, L0805: 1, L0655: 1, L0809: 1, L0519: 1, |
| | | | | S0148: 1, H0547: 1, L0747: 1, L0686: 1 and H0665: 1. |
| 169 | HPRCD35 | 853551 | 179 | AR104: 14, AR089: 11, AR055: 11, AR185: 10, AR219: 10, AR299: 10, AR218: 10, AR313: 10, AR282: 10, AR240: 9, AR316: 9, |
| | | | | AR283: 9, AR096: 8, AR060: 7, AR039: 6, AR300: 5, AR277: 5, L0748: 5, L0754: 5, L0803: 4, L0805: 4, L0777: 4, L0662: 3, L0766: 3, |
| | | | | H0556: 2, H0013: 2, H0551: 2, H0264: 2, L0800: 2, L0806: 2, L0664: 2, L0439: 2, L0756: 2, L0758: 2, S0192: 2, H0657: 1, S0442: 1, |
| | | | | S0358: 1, S0045: 1, S0046: 1, H0747: 1, H0550: 1, H0392: 1, S0280: 1, H0575: 1, H0545: 1, H0046: 1, H0050: 1, H0644: 1, H0617: 1, |
| | | | | L0055: 1, H0032: 1, H0212: 1, H0038: 1, H0560: 1, S0438: 1, S0210: 1, L0769: 1, L0796: 1, L5575: 1, L0768: 1, L0794: 1, L0649: 1, |
| | | | | L0776: 1, L0659: 1, L0542: 1, L0526: 1, L0663: 1, H0144: 1, L0565: 1, L3811: 1, H0683: 1, H0659: 1, S0152: 1, H0521: 1, H0522: 1, |
| | | | | H0540: 1, S0118: 1, S0032: 1, L0731: 1, L0759: 1 and H0668: 1. |
| 170 | HPRCM72 | 813512 | 180 | AR104: 11, AR219: 9, AR218: 9, AR039: 8, AR055: 6, AR313: 6, AR096: 6, AR240: 6, AR060: 6, AR316: 5, AR300: 4, AR185: 4, |
| | | | | AR089: 4, AR299: 4, AR282: 3, AR277: 3, AR283: 3, L0766: 11, L0748: 10, L0731: 6, L0805: 5, L0776: 5, L0777: 5, L0752: 5, |
| | | | | L0759: 5, L0659: 4, L0666: 4, L0665: 4, L0754: 4, L0749: 4, L0757: 4, S0358: 3, H0580: 3, H0519: 3, L0740: 3, L0756: 3, H0624: 2, |
| | | | | H0716: 2, H0208: 2, H0574: 2, H0052: 2, S0003: 2, H0328: 2, L0649: 2, L0663: 2, L0439: 2, L0745: 2, L0747: 2, S0436: 2, L0605: 2, |
| | | | | L0362: 2, H0170: 1, H0686: 1, S0212: 1, H0483: 1, H0255: 1, L3658: 1, S0348: 1, S0418: 1, S0376: 1, S0360: 1, L3646: 1, L3649: 1, |
| | | | | S0007: 1, H0619: 1, S0222: 1, H0586: 1, H0486: 1, H0250: 1, S0010: 1, L0105: 1, S0474: 1, H0194: 1, H0327: 1, H0565: 1, H0123: 1, |
| | | | | H0050: 1, H0024: 1, H0015: 1, S0051: 1, S0318: 1, S0316: 1, S0214: 1, H0553: 1, H0030: 1, H0032: 1, H0068: 1, H0163: 1, H0413: 1, |
| | | | | S0038: 1, S0344: 1, S0422: 1, S0426: 1, L0763: 1, L0761: 1, L0642: 1, L0521: 1, L0662: 1, L0768: 1, L0794: 1, L0803: 1, L0774: 1, |
| | | | | L0775: 1, L0376: 1, L0806: 1, L0657: 1, L0517: 1, L0545: 1, L0529: 1, L0791: 1, L0664: 1, H0144: 1, L0438: 1, H0520: 1, H0689: 1, |
| | | | | H0684: 1, H0435: 1, H0660: 1, H0672: 1, H0539: 1, H0521: 1, L0750: 1, L0779: 1, L0755: 1, S0031: 1, L0608: 1, S0242: 1, S0276: 1, |
| | | | | H0542: 1, H0543: 1, H0423: 1 and H0506: 1. |
| 171 | HPTRE80 | 884167 | 181 | AR277: 53, AR283: 38, AR219: 37, AR316: 30, AR282: 30, AR218: 28, AR089: 28, AR299: 27, AR313: 27, AR104: 26, AR240: 25, |
| | | | | AR096: 24, AR185: 24, AR039: 24, AR300: 22, AR055: 21, AR060: 19, L0769: 5, L0759: 4, H0402: 3, S0376: 3, H0424: 3, L0806: 3, |
| | | | | L0749: 3, S0222: 2, L0535: 2, L0774: 2, L0384: 2, L0666: 2, H0423: 2, H0265: 1, S0218: 1, H0484: 1, S0354: 1, S0444: 1, S0360: 1, |
| | | | | S0007: 1, H0392: 1, H0559: 1, H0486: 1, T0039: 1, T0060: 1, L0021: 1, H0004: 1, H0581: 1, H0052: 1, H0194: 1, H0204: 1, L0471: 1, |
| | | | | H0024: 1, H0405: 1, H0617: 1, H0606: 1, H0090: 1, H0272: 1, H0494: 1, S0438: 1, S0422: 1, S0002: 1, L0763: 1, L0770: 1, L0772: 1, |
| | | | | L0372: 1, L0646: 1, L0800: 1, L0641: 1, L0645: 1, L0771: 1, L0768: 1, L0794: 1, L0381: 1, L0775: 1, L0789: 1, H0547: 1, H0519: 1, |
| | | | | H0659: 1, H0658: 1, H0672: 1, H0521: 1, S0406: 1, H0727: 1, L0744: 1, L0740: 1, L0747: 1, L0779: 1, L0731: 1, L0757: 1, L0758: 1, |
| | | | | H0445: 1 and H0422: 1. |
| 172 | HPTRI42 | 655362 | 182 | AR185: 34, AR060: 22, AR299: 19, AR104: 12, AR277: 10, AR282: 10, AR089: 9, AR055: 9, AR316: 8, AR219: 8, AR218: 8, |
| | | | | AR096: 8, AR283: 7, AR300: 7, AR240: 7, AR039: 5, AR313: 5, H0036: 3, H0618: 3, L3905: 3, H0619: 2, H0424: 2, L0776: 2, |
| | | | | H0136: 2, S0276: 2, H0717: 1, H0716: 1, H0742: 1, S0045: 1, H0261: 1, H0497: 1, H0250: 1, H0575: 1, H0310: 1, H0052: 1, H0123: 1, |
| | | | | H0024: 1, S0250: 1, H0401: 1, H0169: 1, H0616: 1, L0351: 1, H0561: 1, S0440: 1, S0150: 1, H0647: 1, H0646: 1, H0652: 1, L0768: 1, |
| | | | | L0766: 1, L0803: 1, L0659: 1, L0809: 1, L0666: 1, L0665: 1, S0126: 1, H0672: 1, H0539: 1, S0406: 1, H0576: 1, L0439: 1, L0779: 1, |
| | | | | L0777: 1 and H0423: 1. |
| 173 | HPTRM02 | 812879 | 183 | H0617: 7, H0087: 6, H0657: 5, S0410: 3, L0754: 3, S0356: 2, L0717: 2, H0150: 2, H0687: 2, H0424: 2, H0551: 2, L0769: 2, L0774: 2, |
| | | | | L0743: 2, L0758: 2, L0592: 2, H0556: 1, T0002: 1, H0686: 1, H0685: 1, T0049: 1, H0663: 1, S0442: 1, S0444: 1, S0360: 1, S0476: 1, |
| | | | | H0550: 1, H0486: 1, H0250: 1, L0021: 1, T0048: 1, S0474: 1, S0049: 1, H0052: 1, H0309: 1, H0597: 1, H0544: 1, H0014: 1, H0107: 1, |
| | | | | S6028: 1, H0622: 1, H0644: 1, H0102: 1, S0038: 1, L0351: 1, S0450: 1, S0344: 1, S0002: 1, L0764: 1, L0766: 1, L0805: 1, L0776: 1, |
| | | | | L0655: 1, L0661: 1, L0657: 1, L0809: 1, L0666: 1, L0665: 1, L2652: 1, L2260: 1, L2261: 1, H0689: 1, H0435: 1, H0521: 1, H0696: 1, |
| | | | | H0555: 1, L0744: 1, L0439: 1, L0749: 1, L0777: 1, L0755: 1, L0759: 1, S0436: 1, L0597: 1, L0599: 1, L0366: 1 and S0196: 1. |
| 174 | HPTRQ52 | 655363 | 184 | AR219: 43, AR277: 42, AR104: 34, AR283: 31, AR218: 30, AR316: 28, AR240: 27, AR096: 25, AR089: 24, AR185: 23, AR039: 23, |
| | | | | AR313: 21, AR055: 21, AR282: 20, AR299: 20, AR060: 19, AR300: 15, H0694: 12, L0748: 10, L0731: 7, L0754: 6, H0556: 5, |
| | | | | L0758: 5, H0265: 4, S0420: 4, S0408: 4, L0517: 4, H0657: 3, H0618: 3, H0052: 3, H0083: 3, H0553: 3, H0494: 3, L0763: 3, L0666: 3, |
| | | | | L0663: 3, S0126: 3, L0747: 3, H0295: 2, S0134: 2, S0418: 2, H0637: 2, S0046: 2, H0431: 2, H0545: 2, H0014: 2, H0271: 2, H0039: 2, |
| | | | | H0424: 2, H0124: 2, H0641: 2, L0764: 2, L0766: 2, L0774: 2, L0775: 2, L0776: 2, L0655: 2, L0783: 2, L0665: 2, H0519: 2, H0522: 2, |
| | | | | S0044: 2, L0755: 2, S0436: 2, L0595: 2, L0362: 2, H0543: 2, S0040: 1, H0740: 1, H0656: 1, S0212: 1, H0484: 1, H0661: 1, H0662: 1, |
| | | | | S0360: 1, H0733: 1, H0619: 1, S0222: 1, H0486: 1, H0156: 1, H0575: 1, H0706: 1, H0253: 1, S0010: 1, S0346: 1, H0318: 1, H0596: 1, |
| | | | | H0231: 1, H0046: 1, H0150: 1, H0081: 1, H0050: 1, H0012: 1, H0620: 1, L0163: 1, S0051: 1, T0010: 1, S6028: 1, H0266: 1, H0179: 1, |
| | | | | H0292: 1, H0031: 1, H0644: 1, H0182: 1, H0617: 1, H0606: 1, H0673: 1, L0455: 1, L0456: 1, H0598: 1, H0038: 1, H0040: 1, H0616: 1, |
| | | | | H0087: 1, T0067: 1, H0264: 1, T0041: 1, H0131: 1, H0647: 1, S0002: 1, L0772: 1, L0642: 1, L0662: 1, L0767: 1, L0657: 1, L0659: 1, |
| | | | | L0382: 1, L5623: 1, L0664: 1, S0374: 1, H0593: 1, H0690: 1, H0682: 1, H0659: 1, H0658: 1, H0666: 1, H0651: 1, H0539: 1, H0521: 1, |
| | | | | S0406: 1, H0576: 1, L0743: 1, L0740: 1, L0750: 1, L0779: 1 and H0445: 1. |
| 175 | HPTVI96 | 636064 | 185 | L0809: 5, L0779: 5, L0758: 5, L0769: 4, L0764: 4, L0777: 4, H0634: 3, L0748: 3, L0750: 3, L0731: 3, S0222: 2, L0163: 2, L0763: 2, |
| | | | | L0772: 2, L0775: 2, L0776: 2, H0651: 2, L0749: 2, L0759: 2, H0657: 1, S0376: 1, S0300: 1, L0622: 1, H0427: 1, H0009: 1, L0471: 1, |
| | | | | T0006: 1, H0424: 1, H0674: 1, H0708: 1, H0135: 1, H0413: 1, S0438: 1, L0771: 1, L0768: 1, L0794: 1, L0766: 1, L0774: 1, L0375: 1, |
| | | | | L0806: 1, L0789: 1, H0648: 1, H0521: 1, S0406: 1 and H0506: 1. |
| 176 | HPWBA29 | 561956 | 186 | AR313: 19, AR039: 14, AR218: 11, AR277: 11, AR089: 11, AR299: 10, AR096: 10, AR185: 10, AR300: 9, AR060: 8, AR219: 8, |
| | | | | AR316: 8, AR055: 8, AR240: 8, AR104: 7, AR282: 6, AR283: 4, S0044: 1 |
| 177 | HRDAI17 | 560720 | 187 | H0031: 2, L0758: 2, H0013: 1, H0124: 1, L0369: 1, L0792: 1, S0216: 1, L0745: 1 and L0753: 1. |
| 178 | HRDDQ39 | 840405 | 188 | AR313: 36, AR039: 33, AR185: 27, AR299: 20, AR089: 18, AR300: 17, AR096: 17, AR240: 16, AR218: 15, AR277: 14, AR316: 13, |
| | | | | AR060: 11, AR219: 10, AR104: 9, AR055: 8, AR282: 7, AR283: 7, S0001: 2, H0436: 2, S0134: 1, H0657: 1, H0441: 1, H0009: 1, |
| | | | | H0123: 1, H0050: 1, H0428: 1, H0124: 1, H0529: 1, H0521: 1 and H0352: 1. |
| 179 | HRDEX93 | 816046 | 189 | AR104: 30, AR218: 25, AR219: 24, AR240: 22, AR096: 21, AR185: 17, AR039: 16, AR316: 16, AR313: 16, AR055: 14, AR060: 14, |
| | | | | AR299: 13, AR089: 13, AR282: 9, AR277: 9, AR300: 9, AR283: 6, H0694: 12, L0748: 10, L0731: 7, L0754: 6, H0556: 5, L0758: 5, |
| | | | | H0265: 4, S0420: 4, S0408: 4, L0517: 4, H0657: 3, H0618: 3, H0052: 3, H0083: 3, H0553: 3, H0494: 3, L0763: 3, L0666: 3, L0663: 3, |
| | | | | S0126: 3, L0747: 3, H0295: 2, S0134: 2, S0418: 2, H0637: 2, S0046: 2, H0431: 2, H0545: 2, H0014: 2, H0271: 2, H0039: 2, H0424: 2, |
| | | | | H0124: 2, H0641: 2, L0764: 2, L0766: 2, L0774: 2, L0775: 2, L0776: 2, L0655: 2, L0783: 2, L0665: 2, H0519: 2, H0522: 2, S0044: 2, |
| | | | | L0755: 2, S0436: 2, L0595: 2, L0362: 2, H0543: 2, S0040: 1, H0740: 1, H0656: 1, S0212: 1, H0484: 1, H0661: 1, H0662: 1, S0360: 1, |
| | | | | H0733: 1, H0619: 1, S0222: 1, H0486: 1, H0156: 1, H0575: 1, H0706: 1, H0253: 1, S0010: 1, S0346: 1, H0318: 1, H0596: 1, H0231: 1, |
| | | | | H0046: 1, H0150: 1, H0081: 1, H0050: 1, H0012: 1, H0620: 1, L0163: 1, S0051: 1, T0010: 1, S6028: 1, H0266: 1, H0179: 1, H0292: 1, |
| | | | | H0031: 1, H0644: 1, H0182: 1, H0617: 1, H0606: 1, H0673: 1, L0455: 1, L0456: 1, H0598: 1, H0038: 1, H0040: 1, H0616: 1, H0087: 1, |
| | | | | T0067: 1, H0264: 1, T0041: 1, H0131: 1, H0647: 1, S0002: 1, L0772: 1, L0642: 1, L0662: 1, L0767: 1, L0657: 1, L0659: 1, L0382: 1, |
| | | | | L5623: 1, L0664: 1, S0374: 1, H0593: 1, H0690: 1, H0682: 1, H0659: 1, H0658: 1, H0666: 1, H0651: 1, H0539: 1, H0521: 1, S0406: 1, |
| | | | | H0576: 1, L0743: 1, L0740: 1, L0750: 1, L0779: 1 and H0445: 1. |
| 180 | HRTAP63 | 780698 | 190 | AR219: 53, AR218: 46, AR313: 33, AR104: 28, AR096: 26, AR089: 25, AR316: 24, AR039: 20, AR299: 19, AR185: 18, AR300: 17, |
| | | | | AR060: 17, AR282: 16, AR055: 15, AR240: 13, AR277: 10, AR283: 9, S0474: 28, H0521: 15, L0758: 14, L0752: 13, L0731: 13, |
| | | | | L0755: 10, H0641: 9, L0766: 8, H0179: 6, L0748: 6, L0439: 6, L0759: 6, H0638: 5, S0222: 5, H0581: 5, L0662: 5, L0655: 5, H0436: 5, |
| | | | | L0740: 5, L0777: 5, S0436: 5, H0457: 4, L0775: 4, L0809: 4, H0522: 4, L0742: 4, L0754: 4, L0747: 4, L0749: 4, L0750: 4, L0757: 4, |
| | | | | H0580: 3, H0619: 3, H0052: 3, S0003: 3, H0038: 3, H0623: 3, L0666: 3, L0663: 3, S0053: 3, S0126: 3, S0434: 3, S0026: 3, S0212: 2, |
| | | | | S0442: 2, S0408: 2, H0747: 2, S0476: 2, H0156: 2, L0021: 2, H0599: 2, S0010: 2, H0014: 2, S0214: 2, H0031: 2, H0644: 2, H0628: 2, |
| | | | | S0036: 2, H0090: 2, H0616: 2, S0144: 2, S0002: 2, L0598: 2, L0764: 2, L0768: 2, L0774: 2, L0806: 2, L0653: 2, L0657: 2, L0659: 2, |
| | | | | H0520: 2, H0547: 2, H0539: 2, H0710: 2, S0027: 2, L0779: 2, L0588: 2, L0592: 2, L0594: 2, L0366: 2, H0665: 2, H0739: 1, H0170: 1, |
| | | | | T0002: 1, S0342: 1, H0717: 1, H0740: 1, S0114: 1, S0218: 1, H0650: 1, H0657: 1, S0282: 1, L3659: 1, S0418: 1, S0420: 1, L0005: 1, |
| | | | | T0008: 1, H0742: 1, H0722: 1, H0735: 1, S0007: 1, S0046: 1, H0749: 1, L3388: 1, H0351: 1, H0406: 1, S0278: 1, H0461: 1, H0601: 1, |
| | | | | H0586: 1, H0497: 1, H0574: 1, T0039: 1, L3655: 1, H0013: 1, H0427: 1, H0575: 1, H0590: 1, H0421: 1, S0049: 1, H0327: 1, H0545: 1, |
| | | | | H0046: 1, H0572: 1, H0570: 1, H0050: 1, L0471: 1, H0373: 1, H0510: 1, H0375: 1, S6028: 1, H0266: 1, H0271: 1, H0719: 1, H0416: 1, |
| | | | | S0340: 1, S0312: 1, H0615: 1, L0483: 1, T0006: 1, H0169: 1, H0674: 1, H0163: 1, H0591: 1, H0551: 1, H0264: 1, H0412: 1, H0059: 1, |
| | | | | H0494: 1, S0015: 1, S0344: 1, UNKWN: 1, H0529: 1, L0520: 1, L0637: 1, L0761: 1, L0667: 1, L0772: 1, L0641: 1, L0648: 1, L0521: 1, |
| | | | | L0794: 1, L0649: 1, L0803: 1, L0805: 1, L0783: 1, L0384: 1, L5622: 1, L0793: 1, L0664: 1, L0665: 1, S0052: 1, S0428: 1, S0216: 1, |
| | | | | H0144: 1, L3811: 1, H0658: 1, H0670: 1, H0666: 1, H0672: 1, H0651: 1, L0355: 1, S0328: 1, S0152: 1, H0696: 1, S0406: 1, H0555: 1, |
| | | | | S0028: 1, S0032: 1, L0744: 1, L0745: 1, L0780: 1, L0362: 1, H0422: 1 and H0721: 1. |
| 181 | HSAVW42 | 637660 | 191 | AR277: 28, AR283: 24, AR219: 20, AR055: 17, AR218: 16, AR316: 16, AR282: 16, AR313: 15, AR089: 15, AR104: 13, AR299: 12, |
| | | | | AR185: 11, AR240: 11, AR096: 11, AR039: 10, AR300: 9, AR060: 8, H0412: 2, S0114: 1, S0222: 1, H0169: 1, L0520: 1, L0805: 1, |
| | | | | L0776: 1, L0750: 1 and L0777: 1. |
| 182 | HSAWN53 | 634697 | 192 | AR277: 14, AR313: 13, AR219: 10, AR299: 9, AR039: 9, AR089: 9, AR055: 9, AR185: 9, AR104: 8, AR218: 8, AR300: 8, AR283: 8, |
| | | | | AR316: 8, AR282: 8, AR060: 8, AR096: 7, AR240: 6, S0114: 1 |
| 183 | HSAWZ40 | 634000 | 193 | AR283: 11, AR039: 8, AR218: 8, AR060: 8, AR219: 8, AR313: 8, AR055: 7, AR089: 7, AR185: 7, AR096: 6, AR299: 6, AR316: 6, |
| | | | | AR240: 6, AR277: 5, AR282: 5, AR104: 5, AR300: 4, S0114: 1 |
| 184 | HSAYC41 | 688057 | 194 | S0114: 1, H0411: 1, H0179: 1, L0665: 1 and H0435: 1. |
| 185 | HSDBI90 | 853376 | 195 | AR055: 5, AR282: 4, AR060: 4, AR104: 3, AR240: 3, AR218: 3, AR283: 2, AR185: 2, AR277: 2, AR219: 2, AR300: 2, AR089: 2, |
| | | | | AR096: 2, AR039: 2, AR316: 1, AR299: 1, L0439: 5, L0438: 2, S6024: 1, H0052: 1, H0009: 1, H0051: 1, H0424: 1, S0352: 1, L0794: 1, |
| | | | | L0803: 1, L0790: 1 and S0106: 1. |
| 186 | HSHAX04 | 812178 | 196 | AR299: 18, AR219: 18, AR104: 17, AR218: 17, AR277: 17, AR313: 16, AR316: 15, AR283: 14, AR055: 13, AR096: 13, AR039: 12, |
| | | | | AR240: 12, AR060: 12, AR282: 11, AR089: 11, AR185: 10, AR300: 10, L0731: 6, H0265: 4, L0483: 4, H0424: 4, H0253: 3, H0318: 3, |
| | | | | L0769: 3, L0774: 3, L0776: 3, S0037: 3, L0742: 3, L0750: 3, L0755: 3, S0360: 2, H0581: 2, H0266: 2, H0213: 2, H0124: 2, H0413: 2, |
| | | | | L0766: 2, L0659: 2, L0809: 2, S3014: 2, L0749: 2, L0757: 2, L0758: 2, L0759: 2, L0596: 2, L0595: 2, H0543: 2, H0422: 2, H0686: 1, |
| | | | | H0685: 1, S0040: 1, H0295: 1, H0294: 1, S0430: 1, H0638: 1, S0418: 1, S0420: 1, S0354: 1, S0358: 1, S0376: 1, S0045: 1, H0586: 1, |
| | | | | H0497: 1, H0333: 1, H0486: 1, H0069: 1, H0575: 1, H0618: 1, H0052: 1, H0085: 1, H0009: 1, S0051: 1, H0083: 1, H0284: 1, H0428: 1, |
| | | | | H0417: 1, H0553: 1, H0628: 1, H0038: 1, H0280: 1, H0494: 1, H0625: 1, S0150: 1, S0426: 1, L0667: 1, L0646: 1, L0764: 1, L0773: 1, |
| | | | | L0648: 1, L0767: 1, L0768: 1, L0375: 1, L0806: 1, L0519: 1, L0666: 1, L0663: 1, H0698: 1, H0689: 1, H0539: 1, H0518: 1, S0027: 1, |
| | | | | S0028: 1, L0747: 1, L0752: 1, H0707: 1, L0597: 1, L0581: 1, L0361: 1, H0653: 1, H0542: 1 and H0506: 1. |
| 187 | HSKDR27 | 580874 | 197 | AR055: 9, AR104: 9, AR218: 7, AR060: 7, AR299: 6, AR185: 6, AR039: 6, AR240: 5, AR089: 5, AR219: 5, AR300: 5, AR283: 5, |
| | | | | AR316: 4, AR313: 4, AR096: 3, AR277: 3, AR282: 2, S0027: 95, S0192: 54, S3014: 53, S0126: 42, S0040: 35, H0424: 23, S0028: 22, |
| | | | | S0037: 19, S3012: 16, H0213: 13, T0006: 12, H0250: 11, S0032: 11, L0744: 11, T0040: 10, H0124: 10, H0429: 10, L0740: 10, |
| | | | | L0588: 10, L0754: 9, H0545: 8, H0280: 8, S0194: 8, S0196: 7, H0392: 6, T0039: 6, H0150: 6, H0039: 6, S0206: 6, L0743: 6, L0731: 6, |
| | | | | S0342: 5, S0212: 5, S0045: 5, H0486: 5, H0575: 5, H0014: 5, H0090: 5, H0551: 5, H0100: 5, S0044: 5, S0011: 5, H0255: 4, H0318: 4, |
| | | | | H0271: 4, S0022: 4, H0031: 4, H0181: 4, H0032: 4, H0038: 4, T0067: 4, S0124: 4, L0747: 4, L0749: 4, H0402: 3, H0309: 3, H0046: 3, |
| | | | | S0250: 3, H0068: 3, H0087: 3, H0059: 3, S0142: 3, S0053: 3, H0419: 2, S0116: 2, S0408: 2, S0132: 2, S0278: 2, S0222: 2, H0331: 2, |
| | | | | T0060: 2, H0069: 2, H0427: 2, H0599: 2, T0082: 2, H0253: 2, H0546: 2, H0086: 2, H0123: 2, H0024: 2, H0015: 2, H0510: 2, H0428: 2, |
| | | | | T0023: 2, H0163: 2, H0063: 2, H0509: 2, L0772: 2, L0805: 2, S0052: 2, H0547: 2, H0518: 2, L0748: 2, L0751: 2, L0745: 2, L0750: 2, |
| | | | | L0777: 2, L0755: 2, L0757: 2, H0445: 2, L0590: 2, L0599: 2, S0026: 2, S0242: 2, H0171: 1, H0265: 1, H0716: 1, H0294: 1, S0298: 1, |
| | | | | H0662: 1, H0450: 1, S0360: 1, H0329: 1, S0046: 1, H0411: 1, S6022: 1, H0431: 1, H0357: 1, H0455: 1, H0586: 1, H0587: 1, L0021: 1, |
| | | | | H0042: 1, T0048: 1, H0505: 1, H0052: 1, H0251: 1, H0235: 1, H0231: 1, H0544: 1, H0050: 1, H0051: 1, H0071: 1, H0083: 1, H0060: 1, |
| | | | | H0266: 1, H0188: 1, H0292: 1, S0214: 1, H0328: 1, H0033: 1, H0417: 1, H0553: 1, H0628: 1, H0617: 1, H0606: 1, H0383: 1, H0212: 1, |
| | | | | H0388: 1, H0135: 1, H0040: 1, H0487: 1, H0413: 1, T0069: 1, H0560: 1, H0538: 1, S0210: 1, L0763: 1, L0646: 1, L0641: 1, L0649: 1, |
| | | | | L0803: 1, L0652: 1, L0629: 1, L0659: 1, L0787: 1, L0665: 1, H0435: 1, H0528: 1, H0521: 1, H0555: 1, L0779: 1, L0581: 1, S0276: 1 |
| | | | | and H0008: 1. |
| 188 | HSNBM34 | 635131 | 198 | AR185: 18, AR039: 18, AR299: 15, AR104: 11, AR055: 9, AR277: 9, AR060: 8, AR096: 8, AR282: 8, AR300: 7, AR218: 7, AR240: 7, |
| | | | | AR313: 6, AR316: 6, AR219: 5, AR283: 4, AR089: 4, H0599: 9, H0144: 8, H0457: 7, H0266: 7, H0494: 6, H0046: 5, H0031: 5, |
| | | | | H0553: 5, L5622: 5, H0593: 5, H0521: 5, H0734: 4, H0013: 4, H0135: 4, S0436: 4, S0212: 3, H0069: 3, H0036: 3, H0052: 3, S0022: 3, |
| | | | | H0708: 3, H0551: 3, H0696: 3, S0434: 3, H0713: 2, H0717: 2, S0418: 2, S0354: 2, H0580: 2, H0728: 2, H0733: 2, H0550: 2, H0587: 2, |
| | | | | H0559: 2, H0706: 2, H0253: 2, H0355: 2, H0039: 2, S0364: 2, H0038: 2, H0634: 2, H0433: 2, H0560: 2, S0440: 2, H0646: 2, L3818: 2, |
| | | | | S0002: 2, L0506: 2, L5623: 2, H0547: 2, S0126: 2, H0518: 2, H0436: 2, H0478: 2, S3014: 2, L0601: 2, H0506: 2, H0265: 1, H0556: 1, |
| | | | | T0002: 1, S0114: 1, H0583: 1, S0116: 1, S0356: 1, S0442: 1, S0358: 1, S0376: 1, S0360: 1, S0408: 1, H0340: 1, H0742: 1, H0735: 1, |
| | | | | S0132: 1, S0476: 1, H0619: 1, S0278: 1, S0222: 1, H0409: 1, H0602: 1, H0592: 1, H0586: 1, H0486: 1, H0270: 1, S0280: 1, H0042: 1, |
| | | | | H0575: 1, H0122: 1, H0590: 1, S0010: 1, T0048: 1, H0318: 1, S0474: 1, S0049: 1, H0173: 1, H0085: 1, H0597: 1, H0231: 1, H0327: 1, |
| | | | | H0544: 1, H0123: 1, H0050: 1, H0095: 1, H0373: 1, L0163: 1, H0051: 1, T0010: 1, T0023: 1, H0213: 1, L0142: 1, H0383: 1, S0366: 1, |
| | | | | H0163: 1, H0040: 1, H0616: 1, H0087: 1, H0379: 1, S0038: 1, T0042: 1, S0150: 1, S0144: 1, H0529: 1, L0369: 1, L3905: 1, L0766: 1, |
| | | | | L0775: 1, L0532: 1, H0693: 1, H0689: 1, H0670: 1, L0602: 1, H0522: 1, S0044: 1, L0611: 1, S0027: 1, S0028: 1, L0741: 1, L0743: 1, |
| | | | | L0748: 1, L0439: 1, L0592: 1, L0485: 1, L0608: 1, L0366: 1, H0668: 1, H0542: 1, H0543: 1 and H0423: 1. |
| 189 | HSRFD18 | 840771 | 199 | AR055: 2, AR039: 1, L0754: 10, S0422: 5, S0022: 4, L0803: 4, L0748: 4, L0747: 4, L0591: 4, H0486: 3, L0766: 3, L0805: 3, L0526: 3, |
| | | | | L0665: 3, S0434: 3, S0212: 2, S0444: 2, S0360: 2, S0222: 2, L3816: 2, H0013: 2, H0596: 2, L0471: 2, H0166: 2, H0591: 2, H0509: 2, |
| | | | | L0646: 2, L0662: 2, L0659: 2, L0666: 2, L0664: 2, S0374: 2, L0779: 2, L0777: 2, L0759: 2, S0436: 2, H0624: 1, H0170: 1, S0114: 1, |
| | | | | S0001: 1, H0671: 1, H0663: 1, H0402: 1, H0305: 1, S0442: 1, S0408: 1, H0329: 1, H0742: 1, L3387: 1, H0581: 1, H0421: 1, H0194: 1, |
| | | | | H0263: 1, H0597: 1, H0569: 1, H0355: 1, H0510: 1, H0179: 1, H0687: 1, H0615: 1, L0483: 1, H0553: 1, H0644: 1, H0673: 1, H0674: 1, |
| | | | | H0100: 1, S0450: 1, H0714: 1, L0763: 1, L0770: 1, L0761: 1, L0649: 1, L0776: 1, L0518: 1, L0790: 1, L0791: 1, L0792: 1, L0663: 1, |
| | | | | H0547: 1, H0670: 1, H0521: 1, H0696: 1, S0406: 1, H0555: 1, H0478: 1, L0780: 1, H0707: 1, S0276: 1 and H0543: 1. |
| 190 | HSSEF77 | 658725 | 200 | H0617: 7, L0750: 7, H0556: 5, L0769: 5, L0783: 5, L0758: 5, L0759: 5, L0665: 4, L0741: 4, S0132: 3, L0761: 3, L0742: 3, L0439: 3, |
| | | | | L0755: 3, L0592: 3, H0618: 2, H0620: 2, H0038: 2, L0771: 2, L0662: 2, L0659: 2, L0666: 2, S0126: 2, H0670: 2, S0328: 2, S0380: 2, |
| | | | | L0747: 2, L0753: 2, L0731: 2, H0395: 1, H0295: 1, H0294: 1, H0657: 1, H0656: 1, H0341: 1, H0484: 1, H0663: 1, H0638: 1, S0356: 1, |
| | | | | S0444: 1, H0741: 1, L3271: 1, H0549: 1, H0550: 1, H0370: 1, H0455: 1, H0632: 1, H0486: 1, T0039: 1, T0112: 1, H0156: 1, H0581: 1, |
| | | | | H0052: 1, H0545: 1, H0046: 1, H0150: 1, H0081: 1, S0051: 1, H0107: 1, H0061: 1, H0188: 1, H0288: 1, S0250: 1, H0428: 1, H0135: 1, |
| | | | | H0163: 1, H0090: 1, H0616: 1, T0004: 1, S0438: 1, L0770: 1, L0796: 1, L0637: 1, L0772: 1, L0372: 1, L0646: 1, L0521: 1, L0768: 1, |
| | | | | L0766: 1, L5574: 1, L0774: 1, L0775: 1, L0375: 1, L0806: 1, L0776: 1, L0807: 1, L0657: 1, L0658: 1, L0540: 1, L0384: 1, L0809: 1, |
| | | | | L0663: 1, L0438: 1, H0672: 1, H0754: 1, S0188: 1, S0406: 1, H0436: 1, H0576: 1, S3014: 1, L0748: 1, L0779: 1, L0757: 1 and |
| | | | | H0506: 1. |
| 191 | HSSGJ58 | 747714 | 201 | AR277: 4, AR282: 3, AR055: 2, AR185: 2, AR299: 2, AR104: 2, AR218: 2, AR060: 2, AR240: 2, AR089: 2, AR219: 1, AR283: 1, |
| | | | | AR039: 1, AR300: 1, AR316: 1, AR313: 1, L0749: 2, H0135: 1, L0558: 1 and L0748: 1. |
| 192 | HSVBD37 | 637110 | 202 | AR219: 111, AR218: 98, AR089: 46, AR185: 35, AR299: 32, AR313: 32, AR096: 30, AR277: 30, AR316: 30, AR060: 28, AR283: 27, |
| | | | | AR104: 26, AR055: 26, AR039: 23, AR240: 22, AR282: 21, AR300: 19, S0136: 115, L0731: 10, L0803: 9, S0026: 9, S0358: 7, |
| | | | | L0439: 7, H0624: 6, S0418: 6, L0805: 6, H0619: 5, L0659: 5, L0666: 5, L0754: 5, L0756: 5, H0170: 4, S0360: 4, H0553: 4, L0662: 4, |
| | | | | H0547: 4, L0750: 4, L0779: 4, H0351: 3, H0486: 3, H0046: 3, H0050: 3, L0471: 3, H0266: 3, H0623: 3, L0770: 3, H0144: 3, H0520: 3, |
| | | | | S0380: 3, S0040: 2, H0295: 2, H0661: 2, S0420: 2, S0376: 2, H0722: 2, H0369: 2, H0592: 2, H0574: 2, H0013: 2, H0575: 2, H0051: 2, |
| | | | | S0022: 2, H0615: 2, H0032: 2, S0438: 2, S0440: 2, L0598: 2, L0769: 2, L0774: 2, L0776: 2, L0518: 2, L0663: 2, H0726: 2, S0126: 2, |
| | | | | H0539: 2, H0696: 2, H0555: 2, L0740: 2, L0747: 2, L0753: 2, L0593: 2, H0686: 1, S0212: 1, H0484: 1, H0671: 1, H0662: 1, S0356: 1, |
| | | | | S0442: 1, S0354: 1, S0444: 1, S0476: 1, H0645: 1, S0222: 1, H0441: 1, H0586: 1, H0587: 1, H0333: 1, H0632: 1, S0280: 1, L0021: 1, |
| | | | | H0599: 1, H0590: 1, H0309: 1, L0040: 1, H0544: 1, H0545: 1, H0019: 1, S0051: 1, H0275: 1, H0375: 1, S6028: 1, S0250: 1, H0328: 1, |
| | | | | H0428: 1, H0031: 1, H0111: 1, H0628: 1, S0364: 1, H0135: 1, H0616: 1, H0551: 1, H0268: 1, H0100: 1, H0494: 1, H0652: 1, S0210: 1, |
| | | | | L0763: 1, L5566: 1, L0646: 1, L0800: 1, L0764: 1, L0771: 1, L0768: 1, L0649: 1, L0804: 1, L0775: 1, L0806: 1, L0527: 1, L0636: 1, |
| | | | | L0783: 1, L0790: 1, S0296: 1, H0693: 1, H0519: 1, H0690: 1, H0682: 1, H0684: 1, H0648: 1, H0672: 1, S0454: 1, S0013: 1, H0626: 1, |
| | | | | H0627: 1, S0028: 1, L0744: 1, L0777: 1, L0755: 1, L0757: 1, L0758: 1, L0759: 1, S0434: 1, S0436: 1, L0592: 1, H0667: 1, S0194: 1 and |
| | | | | H0506: 1. |
| 193 | HSYBI06 | 740766 | 203 | AR313: 46, AR039: 40, AR096: 25, AR185: 20, AR300: 20, AR089: 20, AR299: 18, AR104: 18, AR240: 17, AR316: 17, AR219: 16, |
| | | | | AR277: 16, AR218: 14, AR060: 12, AR282: 10, AR055: 4, AR283: 3, H0159: 2, H0663: 2, H0024: 2, H0059: 2, H0543: 2, H0556: 1, |
| | | | | H0222: 1, L3643: 1, H0255: 1, H0431: 1, T0039: 1, H0599: 1, S0010: 1, T0048: 1, H0251: 1, H0266: 1, H0032: 1, H0551: 1, H0100: 1, |
| | | | | S0015: 1, S0370: 1, H0743: 1, L0369: 1, L0627: 1, L0519: 1, L0663: 1, L0665: 1, H0691: 1, H0696: 1, H0627: 1, S0028: 1, L0744: 1, |
| | | | | L0740: 1, L0777: 1, S0434: 1, L0588: 1, L0604: 1 and H0422: 1. |
| 194 | HT4FV41 | 853400 | 204 | AR244: 10, AR185: 10, AR204: 9, AR275: 9, AR202: 9, AR194: 9, AR052: 9, AR271: 8, AR246: 8, AR289: 8, AR219: 7, AR316: 7, |
| | | | | AR104: 7, AR198: 7, AR089: 7, AR277: 7, AR310: 7, AR060: 7, AR309: 7, AR206: 7, AR039: 7, AR229: 7, AR282: 7, AR053: 7, |
| | | | | AR283: 7, AR269: 6, AR205: 6, AR270: 6, AR312: 6, AR184: 6, AR186: 6, AR299: 6, AR096: 6, AR240: 6, AR251: 6, AR274: 6, |
| | | | | AR182: 6, AR055: 6, AR033: 6, AR291: 6, AR218: 6, AR243: 6, AR266: 6, AR290: 6, AR192: 5, AR268: 5, AR280: 5, AR247: 5, |
| | | | | AR213: 5, AR298: 5, AR231: 5, AR273: 5, AR313: 5, AR234: 5, AR284: 5, AR296: 5, AR061: 5, AR248: 5, AR238: 5, AR285: 5, |
| | | | | AR183: 5, AR253: 5, AR300: 5, AR267: 4, AR286: 4, AR315: 4, AR175: 4, AR293: 4, AR294: 4, AR177: 4, AR249: 4, AR281: 3, |
| | | | | AR227: 3, AR233: 3, AR292: 3, AR263: 3, AR265: 3, AR232: 3, AR295: 3, AR226: 3, AR237: 3, AR258: 2, AR314: 2, AR256: 1, |
| | | | | AR259: 1, AR179: 1, AR241: 1, L0794: 10, L0800: 7, L0769: 6, L0751: 6, L0761: 4, L0809: 4, H0521: 4, L0439: 4, H0585: 3, H0617: 3, |
| | | | | H0494: 3, L0659: 3, L0665: 3, L0777: 3, H0265: 2, H0255: 2, S0354: 2, S0376: 2, H0370: 2, H0069: 2, H0083: 2, H0040: 2, L0770: 2, |
| | | | | L0764: 2, L0662: 2, L5622: 2, L0666: 2, L0663: 2, L0438: 2, L0743: 2, L0780: 2, S0436: 2, H0667: 2, H0423: 2, S0040: 1, H0713: 1, |
| | | | | H0295: 1, H0254: 1, H0638: 1, S0418: 1, S0420: 1, S0360: 1, H0734: 1, S0046: 1, S0476: 1, H0587: 1, H0635: 1, H0575: 1, H0004: 1, |
| | | | | H0618: 1, H0052: 1, H0194: 1, H0544: 1, H0545: 1, H0373: 1, T0010: 1, H0267: 1, H0179: 1, H0622: 1, L0194: 1, H0181: 1, H0124: 1, |
| | | | | H0087: 1, H0412: 1, H0413: 1, H0646: 1, S0144: 1, L0369: 1, L0640: 1, L0763: 1, L0772: 1, L0646: 1, L0643: 1, L0644: 1, L0768: 1, |
| | | | | L0803: 1, L0805: 1, L0655: 1, L0518: 1, L0783: 1, L0384: 1, L0789: 1, S0052: 1, L2263: 1, L0710: 1, H0547: 1, H0682: 1, S0152: 1, |
| | | | | H0187: 1, H0727: 1, S0390: 1, L0752: 1, L0757: 1, L0758: 1, H06651, H0543: 1, H0422: 1 and S0424: 1. |
| 195 | HT5GR59 | 801930 | 205 | AR240: 19, AR096: 15, AR316: 10, AR300: 9, AR055: 9, AR039: 8, AR313: 8, AR282: 8, AR277: 7, AR185: 7, AR060: 7, AR219: 7, |
| | | | | AR218: 6, AR299: 6, AR104: 6, AR283: 6, AR089: 5, H0584: 36, H0585: 22, H0141: 11, H0167: 9, H0457: 7, H0521: 6, S0474: 4, |
| | | | | H0575: 3, L0731: 3, H0265: 2, H0556: 2, H0581: 2, L0761: 2, H0543: 2, H0140: 1, H0638: 1, S0358: 1, S0140: 1, H0747: 1, H0619: 1, |
| | | | | H0497: 1, H0559: 1, H0069: 1, H0635: 1, H0427: 1, S0280: 1, H0252: 1, H0477: 1, L0667: 1, L0768: 1, L0775: 1, L0659: 1, L0791: 1, |
| | | | | L0792: 1, S0053: 1, L0777: 1, L0758: 1, H0445: 1 and H0506: 1. |
| 196 | HTDAA78 | 566861 | 206 | AR240: 12, AR219: 12, AR039: 10, AR316: 10, AR218: 9, AR096: 8, AR283: 8, AR282: 8, AR313: 7, AR055: 7, AR089: 6, AR104: 6, |
| | | | | AR300: 6, AR299: 6, AR277: 5, AR060: 4, AR185: 3, H0477: 1 |
| 197 | HTEAG62 | 812332 | 207 | AR310: 2, AR282: 2, AR206: 2, AR273: 2, AR186: 1, AR295: 1, AR294: 1, AR175: 1, L0766: 6, H0038: 5, L0758: 4, H0616: 3, |
| | | | | S0422: 2, L0779: 2, L0752: 2, H0638: 1, S0376: 1, S0132: 1, L3388: 1, H0250: 1, L0564: 1, L0794: 1, L0803: 1, L0666: 1, L0777: 1, |
| | | | | L0755: 1, H0595: 1, S0434: 1 and H0542: 1. |
| 198 | HTECB02 | 806305 | 208 | AR283: 34, AR104: 20, AR219: 12, AR240: 12, AR089: 12, AR218: 12, AR282: 11, AR299: 10, AR055: 10, AR039: 9, AR060: 9, |
| | | | | AR096: 8, AR316: 8, AR185: 7, AR277: 6, AR300: 6, AR313: 6, S0358: 3, H0253: 3, T0010: 3, L0806: 3, L0747: 3, L0749: 3, |
| | | | | H0265: 2, H0663: 2, H0036: 2, H0618: 2, L0764: 2, L5623: 2, L0666: 2, H0521: 2, L0759: 2, L0591: 2, L0604: 2, H0556: 1, S0114: 1, |
| | | | | L0443: 1, S0408: 1, H0619: 1, S0222: 1, H0559: 1, T0039: 1, S0280: 1, L0021: 1, H0706: 1, H0196: 1, H0052: 1, H0545: 1, H0009: 1, |
| | | | | H0172: 1, H0123: 1, H0024: 1, H0014: 1, S0338: 1, H0239: 1, H0428: 1, H0181: 1, H0708: 1, H0591: 1, H0038: 1, S0002: 1, L0796: 1, |
| | | | | L3905: 1, L0761: 1, L0646: 1, L0766: 1, L0381: 1, L0803: 1, L0774: 1, L0775: 1, L0807: 1, L0517: 1, L0783: 1, L0384: 1, L0809: 1, |
| | | | | L0545: 1, L5622: 1, L0788: 1, L0664: 1, L0447: 1, H0658: 1, S0027: 1, L0743: 1, L0744: 1, L0751: 1, L0754: 1, L0745: 1, L0746: 1, |
| | | | | L0750: 1, L0752: 1, L0755: 1, L0758: 1, S0434: 1, H0665: 1 and H0542: 1. |
| 199 | HTEDJ28 | 762845 | 209 | AR219: 24, AR218: 21, AR089: 19, AR055: 18, AR313: 16, AR299: 15, AR096: 13, AR316: 13, AR104: 13, AR060: 11, AR185: 11, |
| | | | | AR283: 10, AR039: 9, AR277: 9, AR282: 9, AR300: 8, AR240: 7, L0747: 9, L0439: 8, L0809: 6, L0766: 5, L0750: 5, L0758: 5, |
| | | | | L0740: 4, L0752: 4, L0731: 4, L0662: 3, H0547: 3, L0779: 3, L0777: 3, L0757: 3, H0375: 2, L0646: 2, L0774: 2, L0783: 2, H0144: 2, |
| | | | | L0759: 2, S0442: 1, H0333: 1, T0060: 1, H0327: 1, H0399: 1, L0483: 1, H0038: 1, L0564: 1, S0382: 1, H0538: 1, H0743: 1, L0763: 1, |
| | | | | L0638: 1, L0765: 1, L0771: 1, L0649: 1, L0522: 1, L0775: 1, L0655: 1, L0659: 1, L0792: 1, L0663: 1, L0438: 1, H0648: 1, L0756: 1, |
| | | | | L0753: 1, L0596: 1, L0590: 1, L0592: 1, L0608: 1, H0423: 1 and S0460: 1. |
| 200 | HTEHU59 | 840385 | 210 | AR313: 11, AR218: 10, AR219: 9, AR039: 7, AR316: 6, AR096: 6, AR104: 6, AR277: 5, AR299: 5, AR055: 5, AR282: 4, AR089: 4, |
| | | | | AR283: 3, AR300: 3, AR060: 3, AR240: 3, AR185: 3, S0422: 6, H0038: 4, L0758: 4, L0754: 3, S0360: 2, H0024: 2, L0598: 2, L0766: 2, |
| | | | | L0748: 2, L0747: 2, L0756: 2, H0583: 1, H0341: 1, S0418: 1, L0005: 1, H0741: 1, H0437: 1, H0369: 1, H0581: 1, H0194: 1, S0050: 1, |
| | | | | H0271: 1, H0428: 1, T0006: 1, H0068: 1, H0412: 1, H0056: 1, H0494: 1, S0426: 1, L0772: 1, L0646: 1, L0662: 1, L0803: 1, L0806: 1, |
| | | | | L0776: 1, L0655: 1, L0789: 1, L0792: 1, H0144: 1, S0374: 1, H0670: 1, H0627: 1, S0026: 1 and S0192: 1. |
| 201 | HTEJD29 | 695798 | 211 | H0038: 2 |
| 202 | HTEKM46 | 862069 | 212 | S0422: 6, H0038: 4, L0758: 4, L0754: 3, S0360: 2, H0024: 2, L0598: 2, L0766: 2, L0748: 2, L0747: 2, L0756: 2, H0583: 1, H0341: 1, |
| | | | | S0418: 1, L0005: 1, H0741: 1, H0437: 1, H0369: 1, H0581: 1, H0194: 1, S0050: 1, H0271: 1, H0428: 1, T0006: 1, H0068: 1, H0412: 1, |
| | | | | H0056: 1, H0494: 1, S0426: 1, L0772: 1, L0646: 1, L0662: 1, L0803: 1, L0806: 1, L0776: 1, L0655: 1, L0789: 1, L0792: 1, H0144: 1, |
| | | | | S0374: 1, H0670: 1, H0627: 1, S0026: 1 and S0192: 1. |
| 203 | HTENR63 | 877952 | 213 | AR277: 32, AR283: 29, AR218: 25, AR219: 22, AR282: 21, AR316: 21, AR089: 20, AR313: 19, AR104: 18, AR055: 17, AR299: 16, |
| | | | | AR096: 16, AR240: 16, AR185: 15, AR300: 14, AR039: 14, AR060: 11, L0748: 9, L0777: 6, L0439: 5, L0749: 5, L0766: 4, L0438: 4, |
| | | | | L0755: 4, L0752: 3, L0594: 3, L3814: 2, S0212: 2, H0014: 2, H0032: 2, H0598: 2, H0038: 2, H0100: 2, L0775: 2, S0330: 2, L0754: 2, |
| | | | | L0750: 2, L0731: 2, L0758: 2, L0759: 2, L0485: 2, S0192: 2, S0040: 1, H0583: 1, S0356: 1, H0733: 1, S0046: 1, H0747: 1, L3652: 1, |
| | | | | H0613: 1, H0024: 1, H0373: 1, H0375: 1, H0179: 1, H0166: 1, H0673: 1, H0591: 1, H0616: 1, H0551: 1, H0412: 1, H0129: 1, H0529: 1, |
| | | | | L0761: 1, L0771: 1, L0804: 1, L0784: 1, L0806: 1, L0655: 1, L0783: 1, L0666: 1, H0144: 1, L3811: 1, S0126: 1, S0328: 1, H0539: 1, |
| | | | | S0152: 1, L0740: 1, L0756: 1, L0779: 1, L0757: 1, H0445: 1, L0599: 1 and S0026: 1. |
| 204 | HTGBK95 | 834490 | 214 | AR277: 83, AR313: 74, AR219: 72, AR283: 69, AR316: 57, AR039: 49, AR218: 49, AR089: 48, AR299: 46, AR282: 42, AR104: 42, |
| | | | | AR096: 42, AR185: 40, AR240: 39, AR055: 37, AR300: 32, AR060: 32, L0777: 5, S0444: 3, L0766: 3, L0803: 3, L0439: 3, S0360: 2, |
| | | | | L0598: 2, L0666: 2, L0748: 2, T0049: 1, S0134: 1, S0116: 1, S0408: 1, L0717: 1, H0586: 1, H0486: 1, H0575: 1, H0510: 1, H0553: 1, |
| | | | | H0560: 1, S0422: 1, L0763: 1, L0769: 1, L0521: 1, L0767: 1, L0768: 1, L0775: 1, L0663: 1, S0374: 1, L0438: 1, H0520: 1, H0682: 1, |
| | | | | S0328: 1, S0406: 1, L0740: 1, S0192: 1 and H0543: 1. |
| 205 | HTGGM44 | 842856 | 215 | AR246: 5, AR244: 5, AR184: 5, AR253: 5, AR309: 4, AR313: 4, AR186: 4, AR052: 3, AR206: 3, AR312: 3, AR310: 3, AR204: 3, |
| | | | | AR274: 3, AR291: 3, AR060: 3, AR055: 3, AR229: 3, AR053: 3, AR292: 3, AR269: 3, AR061: 3, AR243: 3, AR205: 3, AR247: 3, |
| | | | | AR213: 2, AR299: 2, AR294: 2, AR089: 2, AR273: 2, AR270: 2, AR266: 2, AR263: 2, AR039: 2, AR265: 2, AR293: 2, AR316: 2, |
| | | | | AR275: 2, AR282: 2, AR267: 2, AR251: 2, AR277: 2, AR231: 2, AR283: 2, AR238: 2, AR284: 2, AR185: 2, AR271: 2, AR300: 2, |
| | | | | AR182: 2, AR226: 2, AR096: 1, AR237: 1, AR033: 1, AR234: 1, AR290: 1, AR240: 1, AR241: 1, AR259: 1, AR194: 1, AR227: 1, |
| | | | | AR104: 1, AR298: 1, L0748: 8, L0805: 2, L0599: 2, S0218: 1, T0040: 1, H0635: 1, S0250: 1, H0212: 1, H0634: 1, H0063: 1, S0002: 1, |
| | | | | L0766: 1, H0144: 1, S0126: 1 and H0518: 1. |
| 206 | HTHBZ06 | 832477 | 216 | AR218: 86, AR219: 83, AR089: 54, AR104: 50, AR282: 48, AR313: 44, AR283: 40, AR055: 34, AR316: 31, AR240: 29, AR185: 27, |
| | | | | AR096: 23, AR060: 22, AR299: 22, AR300: 16, AR039: 15, AR277: 11, S0414: 9, L0005: 7, L0065: 7, S0360: 6, S0422: 5, H0545: 4, |
| | | | | H0648: 4, L0777: 4, L0758: 4, H0716: 3, H0657: 3, S0474: 3, L0770: 3, L0666: 3, L0665: 3, L0600: 3, H0674: 2, H0494: 2, L0769: 2, |
| | | | | L0638: 2, L0637: 2, L0768: 2, L0803: 2, L0774: 2, L0805: 2, L0664: 2, L0438: 2, H0520: 2, H0696: 2, L0751: 2, L0745: 2, L0749: 2, |
| | | | | L0756: 2, L0779: 2, L0757: 2, L3643: 1, H0484: 1, H0671: 1, S0358: 1, L3649: 1, H0742: 1, H0741: 1, S0132: 1, L0623: 1, H0581: 1, |
| | | | | S0214: 1, H0063: 1, H0412: 1, H0413: 1, S0002: 1, L0369: 1, L0796: 1, L0662: 1, L0766: 1, L0375: 1, L0656: 1, L0659: 1, L0647: 1, |
| | | | | L3872: 1, L0663: 1, H0684: 1, S0328: 1, S0350: 1, H0436: 1, L0743: 1, L0754: 1, L0755: 1, L0731: 1, S0031: 1, S0436: 1, L0485: 1, |
| | | | | L0608: 1, L0362: 1, H0506: 1 and H0352: 1. |
| 207 | HTLBT80 | 840045 | 217 | AR251: 22, AR273: 18, AR053: 18, AR309: 16, AR310: 16, AR183: 15, AR313: 15, AR274: 15, AR263: 15, AR247: 15, AR312: 14, |
| | | | | AR314: 14, AR266: 14, AR265: 14, AR219: 14, AR175: 13, AR218: 13, AR285: 12, AR280: 12, AR182: 12, AR268: 12, AR293: 12, |
| | | | | AR213: 12, AR052: 12, AR292: 11, AR290: 11, AR286: 11, AR267: 11, AR277: 11, AR289: 11, AR315: 11, AR296: 11, AR256: 11, |
| | | | | AR295: 11, AR177: 10, AR291: 10, AR269: 10, AR271: 10, AR284: 10, AR096: 9, AR243: 9, AR270: 9, AR299: 9, AR283: 9, |
| | | | | AR249: 9, AR300: 9, AR033: 9, AR253: 9, AR238: 9, AR184: 8, AR179: 8, AR248: 8, AR231: 8, AR298: 8, AR234: 8, AR061: 8, |
| | | | | AR226: 8, AR282: 8, AR232: 8, AR229: 8, AR316: 8, AR258: 8, AR259: 7, AR233: 7, AR240: 7, AR186: 7, AR294: 7, AR185: 7, |
| | | | | AR198: 7, AR237: 7, AR275: 6, AR281: 6, AR039: 6, AR192: 6, AR227: 6, AR089: 6, AR104: 6, AR246: 6, AR055: 6, AR244: 6, |
| | | | | AR202: 5, AR204: 5, AR060: 5, AR206: 4, AR205: 4, AR241: 4, AR194: 1, L0659: 6, H0556: 4, H0521: 4, L0439: 4, L0745: 4, |
| | | | | L0759: 4, H0657: 3, S0360: 3, L0761: 3, L0662: 3, L0766: 3, L0809: 3, H0549: 2, H0392: 2, H0253: 2, H0581: 2, H0620: 2, H0051: 2, |
| | | | | H0551: 2, H0494: 2, L0770: 2, L0794: 2, L0649: 2, L0665: 2, H0520: 2, S0032: 2, L0741: 2, L0743: 2, L0748: 2, L0747: 2, L0779: 2, |
| | | | | L0758: 2, L0605: 2, H0650: 1, H0484: 1, H0254: 1, H0402: 1, S0358: 1, H0580: 1, H0741: 1, S0007: 1, S0132: 1, S0476: 1, H0393: 1, |
| | | | | H0369: 1, H0550: 1, H0409: 1, H0256: 1, H0250: 1, H0042: 1, H0036: 1, H0318: 1, S0049: 1, H0050: 1, H0014: 1, H0375: 1, S6028: 1, |
| | | | | H0266: 1, H0292: 1, H0428: 1, H0622: 1, H0031: 1, H0617: 1, L0456: 1, H0135: 1, H0040: 1, H0379: 1, H0264: 1, H0056: 1, H0623: 1, |
| | | | | H0100: 1, H0633: 1, S0002: 1, H0529: 1, L0762: 1, L5575: 1, L0772: 1, L0646: 1, L0771: 1, L0773: 1, L0767: 1, L0768: 1, L0803: 1, |
| | | | | L0805: 1, L0653: 1, L5622: 1, L4501: 1, L0666: 1, H0689: 1, H0690: 1, H0682: 1, H0670: 1, H0522: 1, S0044: 1, H0436: 1, S0027: 1, |
| | | | | L0754: 1, L0749: 1, L0753: 1, L0731: 1, S0436: 1, H0653: 1, S0192: 1, H0542: 1, H0543: 1, H0423: 1 and S0424: 1. |
| 208 | HTLCX82 | 847091 | 218 | L0803: 4, L0805: 4, L0758: 4, S0422: 3, H0255: 2, H0747: 2, L0769: 2, L0774: 2, L0666: 2, L0665: 2, L0439: 2, L0777: 2, L0731: 2, |
| | | | | S0042: 2, H0265: 1, H0686: 1, H0662: 1, S0442: 1, L3387: 1, H0156: 1, H0253: 1, H0009: 1, H0571: 1, S6028: 1, S0214: 1, H0328: 1, |
| | | | | H0494: 1, L0773: 1, L0766: 1, L0809: 1, L0788: 1, L0792: 1, L0663: 1, L0438: 1, H0518: 1, L0749: 1, L0779: 1, L0755: 1, H0595: 1 |
| | | | | and H0707: 1. |
| 209 | HTLDU78 | 637702 | 219 | L0758: 3, H0253: 1 and L0779: 1. |
| 210 | HTLEV48 | 723799 | 220 | S0366: 4, L0623: 1 and H0253: 1. |
| | HTLEV48 | 566786 | 259 | |
| 211 | HTLFA13 | 535937 | 221 | AR313: 11, AR089: 10, AR039: 9, AR096: 8, AR299: 8, AR282: 7, AR277: 7, AR283: 7, AR104: 7, AR219: 7, AR060: 7, AR270: 7, |
| | | | | AR316: 6, AR218: 6, AR310: 6, AR300: 6, AR183: 5, AR233: 5, AR294: 5, AR185: 5, AR237: 5, AR226: 5, AR055: 5, AR238: 5, |
| | | | | AR231: 4, AR227: 4, AR296: 4, AR251: 4, AR312: 4, AR240: 4, AR033: 4, AR269: 4, AR290: 3, AR285: 3, AR052: 3, AR184: 3, |
| | | | | AR295: 3, AR258: 3, AR186: 3, AR292: 3, AR274: 2, AR205: 2, AR179: 2, AR053: 2, AR061: 2, AR206: 2, AR309: 2, AR293: 2, |
| | | | | AR266: 2, AR273: 2, AR259: 1, AR194: 1, AR234: 1, AR182: 1, AR232: 1, AR241: 1, AR284: 1, H0253: 2 and S0011: 1. |
| 212 | HTLGI89 | 835069 | 222 | AR283: 67, AR277: 61, AR219: 56, AR282: 51, AR104: 48, AR240: 47, AR316: 46, AR218: 45, AR313: 44, AR089: 42, AR096: 40, |
| | | | | AR185: 37, AR299: 36, AR055: 34, AR300: 32, AR039: 32, AR060: 31, L0758: 16, L0748: 10, H0620: 7, L0731: 6, H0246: 5, |
| | | | | S0007: 4, H0253: 4, L0769: 4, L0754: 4, H0052: 3, H0100: 3, L0638: 3, L5575: 3, L0766: 3, L0650: 3, L0774: 3, S0152: 3, S3014: 3, |
| | | | | L0439: 3, H0265: 2, H0556: 2, T0002: 2, S6024: 2, H0656: 2, H0341: 2, S0212: 2, S0376: 2, H0619: 2, H0261: 2, S0222: 2, H0318: 2, |
| | | | | H0196: 2, H0012: 2, T0010: 2, H0068: 2, H0551: 2, H0413: 2, H0494: 2, L0770: 2, L5565: 2, L3905: 2, L0768: 2, L0776: 2, S3012: 2, |
| | | | | L0741: 2, L0749: 2, L0750: 2, L0759: 2, S0434: 2, L0608: 2, L0595: 2, H0352: 2, S0040: 1, L0760: 1, S0116: 1, S0282: 1, H0638: 1, |
| | | | | S0418: 1, S0356: 1, S0444: 1, H0730: 1, H0747: 1, S0476: 1, H0393: 1, H0549: 1, H0550: 1, H0592: 1, H0333: 1, H0486: 1, T0114: 1, |
| | | | | H0250: 1, H0069: 1, S0280: 1, H0156: 1, H0599: 1, H0575: 1, H0036: 1, H0618: 1, H0597: 1, H0178: 1, N0006: 1, H0563: 1, H0197: 1, |
| | | | | H0199: 1, H0051: 1, H0083: 1, H0060: 1, H0188: 1, H0290: 1, H0284: 1, H0428: 1, H0622: 1, L0483: 1, H0124: 1, H0135: 1, H0163: 1, |
| | | | | H0040: 1, H0264: 1, H0412: 1, L0564: 1, H0130: 1, H0641: 1, S0144: 1, S0002: 1, L0763: 1, L0761: 1, L0372: 1, L0643: 1, L0764: 1, |
| | | | | L0771: 1, L0648: 1, L0767: 1, L0803: 1, L0804: 1, L0375: 1, L0378: 1, L0659: 1, L0544: 1, L0665: 1, H0703: 1, L0352: 1, H0670: 1, |
| | | | | S0328: 1, S0330: 1, H0753: 1, H0522: 1, H0134: 1, S0027: 1, L0747: 1, L0756: 1, L0777: 1, L0753: 1, S0260: 1, H0445: 1, S0436: 1, |
| | | | | L0597: 1, H0653: 1 and S0194: 1. |
| 213 | HTNBK13 | 831967 | 223 | L0779: 5, L0731: 4, L0593: 4, H0046: 3, L0776: 3, L0666: 3, H0031: 2, L0772: 2, L0774: 2, L0805: 2, H0670: 2, L0439: 2, L0754: 2, |
| | | | | L0777: 2, L0758: 2, L0590: 2, T0002: 1, L0717: 1, H0632: 1, L0622: 1, T0082: 1, H0581: 1, H0263: 1, T0115: 1, H0597: 1, L0471: 1, |
| | | | | H0012: 1, H0620: 1, H0163: 1, T0067: 1, L0770: 1, L0637: 1, L0388: 1, L0657: 1, L0382: 1, L0664: 1, S0126: 1, H0660: 1, S0378: 1, |
| | | | | H0521: 1, L0747: 1, L0750: 1, L0756: 1, L0752: 1, L0755: 1, L07591, S0031: 1, L0599: 1 and L0603: 1. |
| 214 | HTOAM11 | 664508 | 224 | AR313: 30, AR039: 27, AR185: 18, AR299: 16, AR300: 13, AR277: 13, AR096: 13, AR089: 12, AR218: 11, AR219: 11, AR316: 9, |
| | | | | AR240: 9, AR104: 8, AR060: 7, AR055: 6, AR282: 6, AR283: 3, S0010: 1 and H0264: 1. |
| 215 | HTODH83 | 580884 | 225 | AR055: 4, AR060: 4, AR283: 2, AR039: 2, AR104: 2, AR219: 2, AR299: 2, AR185: 2, AR282: 1, AR089: 1, AR316: 1, AR240: 1, |
| | | | | AR096: 1, AR277: 1, H0264: 1 |
| 216 | HTODN35 | 570901 | 226 | AR104: 20, AR185: 11, AR055: 11, AR060: 10, AR089: 10, AR299: 10, AR240: 9, AR277: 8, AR282: 8, AR313: 7, AR300: 7, |
| | | | | AR316: 7, AR283: 5, AR096: 5, AR218: 4, AR219: 4, AR039: 3, H0264: 1 |
| 217 | HTPCO75 | 853645 | 227 | AR104: 12, AR219: 11, AR089: 9, AR039: 9, AR282: 8, AR218: 8, AR313: 8, AR060: 8, AR300: 8, AR055: 7, AR316: 7, AR277: 7, |
| | | | | AR299: 7, AR096: 7, AR185: 6, AR240: 5, AR283: 4, H0039: 5, L0756: 5, S0448: 3, L0805: 3, L0759: 3, H0265: 2, S0354: 2, L0471: 2, |
| | | | | H0674: 2, S0422: 2, L0794: 2, L0517: 2, L0666: 2, L0779: 2, L0777: 2, L0758: 2, H0170: 1, H0556: 1, S0342: 1, S0134: 1, H0637: 1, |
| | | | | H0599: 1, H0318: 1, H0263: 1, H0596: 1, H0252: 1, H0428: 1, H0673: 1, H0040: 1, H0264: 1, H0268: 1, H0773: 1, H0538: 1, L0764: 1, |
| | | | | L0768: 1, L0766: 1, L0804: 1, L0774: 1, L0652: 1, L0527: 1, L0809: 1, L0519: 1, L0791: 1, H0144: 1, H0520: 1, H0519: 1, H0689: 1, |
| | | | | H0648: 1, S0028: 1, L0439: 1, L0731: 1, H0444: 1, H0445: 1, S0434: 1, S0026: 1, S0242: 1 and H0543: 1. |
| 218 | HTTCB60 | 853401 | 228 | L0794: 11, L0809: 11, L0750: 9, L0805: 8, L0791: 7, L0747: 7, L0800: 6, L0758: 6, L0759: 6, H0620: 5, L0749: 5, S0358: 4, H0135: 4, |
| | | | | L0769: 4, L0659: 4, L0780: 4, H0556: 3, L0471: 3, H0040: 3, L0804: 3, S0360: 2, H0393: 2, H0550: 2, H0592: 2, H0333: 2, S0049: 2, |
| | | | | H0124: 2, S0438: 2, L0771: 2, L0662: 2, L0803: 2, L4501: 2, H0547: 2, L3832: 2, L0779: 2, L0755: 2, L0731: 2, S0434: 2, L0603: 2, |
| | | | | H0506: 2, H0713: 1, H0717: 1, H0294: 1, H0662: 1, H0729: 1, H0734: 1, S0045: 1, H0607: 1, H0586: 1, H0587: 1, L3816: 1, T0040: 1, |
| | | | | L3653: 1, S0280: 1, H0590: 1, S0010: 1, H0581: 1, H0251: 1, H0041: 1, H0565: 1, H0570: 1, H0123: 1, H0081: 1, H0050: 1, H0188: 1, |
| | | | | H0039: 1, H0622: 1, H0038: 1, H0063: 1, H0412: 1, H0413: 1, S0440: 1, S0210: 1, S0002: 1, L0763: 1, L0770: 1, L3905: 1, L0761: 1, |
| | | | | L0641: 1, L0768: 1, L0766: 1, L0375: 1, L0806: 1, L0776: 1, L0789: 1, L0790: 1, L0666: 1, L0663: 1, L0665: 1, L2258: 1, L2654: 1, |
| | | | | H0520: 1, H0660: 1, H0672: 1, H0539: 1, S0380: 1, H0521: 1, H0696: 1, H0555: 1, L0744: 1, L0748: 1, L0757: 1, H0445: 1, L0584: 1, L0589: 1, |
| | | | | S0242: 1, S0194: 1, H0008: 1 and H0352: 1. |
| 219 | HTTDN24 | 766485 | 229 | AR218: 21, AR219: 20, AR089: 15, AR300: 14, AR316: 14, AR185: 13, AR313: 13, AR277: 13, AR282: 13, AR039: 12, AR299: 11, |
| | | | | AR096: 11, AR055: 10, AR104: 8, AR240: 7, AR060: 7, AR283: 6 |
| 220 | HTTEE41 | 840950 | 230 | AR219: 84, AR218: 59, AR316: 43, AR313: 32, AR104: 24, AR089: 24, AR185: 24, AR039: 23, AR096: 23, AR299: 21, AR055: 20, |
| | | | | AR060: 17, AR282: 14, AR300: 14, AR283: 11, AR240: 11, AR277: 10, H0040: 17, H0251: 14, L0758: 10, L0748: 8, L0731: 8, |
| | | | | H0494: 7, L0666: 7, H0144: 7, H0659: 7, L0747: 7, L0749: 7, L0757: 7, H0038: 6, H0529: 6, L0770: 6, L0662: 6, L0659: 6, H0013: 5, |
| | | | | H0318: 5, H0616: 5, S0440: 5, L0775: 5, L0776: 5, H0519: 5, L0588: 5, L0592: 5, H0341: 4, S0360: 4, H0412: 4, L0663: 4, H0547: 4, |
| | | | | L0754: 4, L0595: 4, H0542: 4, H0543: 4, H0423: 4, H0171: 3, H0657: 3, H0656: 3, S0045: 3, L3388: 3, H0581: 3, S0049: 3, T0110: 3, |
| | | | | H0046: 3, H0090: 3, H0591: 3, H0551: 3, H0100: 3, H0022: 3, H0625: 3, H0633: 3, S0422: 3, L0375: 3, L0664: 3, H0682: 3, S0406: 3, |
| | | | | L0740: 3, H0556: 2, H0241: 2, H0638: 2, S0418: 2, L0005: 2, S0442: 2, S0376: 2, H0722: 2, H0393: 2, L0717: 2, S0222: 2, H0574: 2, |
| | | | | H0486: 2, T0040: 2, L0471: 2, S0051: 2, S0003: 2, H0252: 2, L0483: 2, T0006: 2, H0031: 2, H0032: 2, H0124: 2, H0634: 2, H0264: 2, |
| | | | | T0042: 2, S0150: 2, H0646: 2, L0763: 2, L0637: 2, L0646: 2, L0374: 2, L0764: 2, L0768: 2, L0653: 2, L0665: 2, H0593: 2, H0435: 2, |
| | | | | H0658: 2, H0539: 2, S0152: 2, L3832: 2, H0521: 2, S3014: 2, S0027: 2, S0028: 2, L0439: 2, L0750: 2, L0777: 2, S0436: 2, L0596: 2, |
| | | | | L0608: 2, L0604: 2, L0594: 2, L0362: 2, S0026: 2, H0667: 2, S0452: 2, H0506: 2, L0411: 1, H0624: 1, H0170: 1, H0395: 1, H0265: 1, |
| | | | | T0002: 1, H0220: 1, H0140: 1, H0159: 1, H0686: 1, H0583: 1, H0650: 1, S0212: 1, H0484: 1, H0664: 1, L0481: 1, S0356: 1, S0354: 1, |
| | | | | S0358: 1, S0444: 1, S0408: 1, L3649: 1, H0580: 1, H0747: 1, H0437: 1, H0431: 1, T0104: 1, H0600: 1, H0592: 1, H0586: 1, L3817: 1, |
| | | | | H0642: 1, H0632: 1, L2482: 1, T0114: 1, H0244: 1, H0250: 1, H0069: 1, H0156: 1, L0021: 1, H0599: 1, H0036: 1, S0346: 1, H0596: 1, |
| | | | | H0544: 1, H0009: 1, N0006: 1, L0157: 1, H0569: 1, H0123: 1, H0242: 1, H0024: 1, H0083: 1, H0375: 1, H0328: 1, H0615: 1, H0428: 1, |
| | | | | H0039: 1, H0622: 1, H0213: 1, H0553: 1, L0142: 1, H0628: 1, H0674: 1, H0388: 1, L0456: 1, H0708: 1, H0068: 1, H0598: 1, S0036: 1, |
| | | | | H0135: 1, H0087: 1, H0380: 1, H0413: 1, H0056: 1, L0351: 1, T0041: 1, H0334: 1, H0561: 1, H0366: 1, S0448: 1, S0294: 1, H0130: 1, |
| | | | | H0641: 1, H0649: 1, S0208: 1, S0002: 1, S0426: 1, L0520: 1, L0631: 1, L0769: 1, L0638: 1, L5565: 1, L0667: 1, L0772: 1, L0372: 1, |
| | | | | L0641: 1, L0626: 1, L0794: 1, L0766: 1, L0381: 1, L0650: 1, L0651: 1, L0806: 1, L0655: 1, L0807: 1, L0657: 1, L0636: 1, L0518: 1, |
| | | | | L0782: 1, L0382: 1, L0809: 1, L3391: 1, L2263: 1, L2259: 1, L2262: 1, L0565: 1, H0693: 1, L3827: 1, H0520: 1, S0126: 1, H0689: 1, |
| | | | | H0670: 1, H0660: 1, H0666: 1, H0648: 1, L0602: 1, H0710: 1, H0518: 1, S0176: 1, H0134: 1, H0555: 1, H0436: 1, H0478: 1, H0631: 1, |
| | | | | L0779: 1, L0752: 1, S0434: 1, L0605: 1, L0591: 1, L0599: 1, H0665: 1, S0196: 1, L2368: 1, H0008: 1 and H0352: 1. |
| 221 | HTWEH94 | 561680 | 231 | AR313: 9, AR039: 7, AR096: 5, AR300: 3, AR185: 3, AR089: 3, AR299: 3, AR277: 2, AR316: 2, AR240: 2, AR060: 2, AR104: 2, |
| | | | | AR218: 1, AR282: 1, AR055: 1, L0766: 1 and H0436: 1. |
| 222 | HTXDG92 | 658730 | 232 | AR218: 44, AR277: 37, AR283: 37, AR219: 35, AR055: 31, AR316: 30, AR089: 29, AR104: 23, AR299: 21, AR240: 20, AR313: 20, |
| | | | | AR039: 19, AR282: 19, AR185: 19, AR096: 18, AR060: 17, AR300: 17, L0777: 11, H0618: 7, L0438: 6, H0144: 5, L0758: 5, S0410: 4, |
| | | | | H0059: 4, L0601: 4, H0556: 3, H0253: 3, H0052: 3, H0620: 3, H0617: 3, L0764: 3, L0768: 3, L0744: 3, L0747: 3, H0265: 2, H0341: 2, |
| | | | | S0046: 2, S0222: 2, H0013: 2, H0069: 2, S0049: 2, H0150: 2, H0087: 2, L0351: 2, L0771: 2, L0766: 2, L0665: 2, H0547: 2, H0659: 2, |
| | | | | L0748: 2, L0439: 2, L0754: 2, L0749: 2, H0542: 2, L3643: 1, S0040: 1, H0717: 1, H0716: 1, S0114: 1, T0049: 1, H0583: 1, H0657: 1, |
| | | | | H0656: 1, H0381: 1, H0663: 1, S0358: 1, H0734: 1, S0007: 1, H0747: 1, S0278: 1, H0261: 1, H0550: 1, H0392: 1, H0486: 1, T0114: 1, |
| | | | | S0010: 1, H0581: 1, H0374: 1, H0327: 1, H0545: 1, H0457: 1, H0012: 1, H0024: 1, H0015: 1, H0510: 1, H0594: 1, H0188: 1, H0292: 1, |
| | | | | H0286: 1, H0622: 1, H0181: 1, H0135: 1, H0040: 1, H0063: 1, H0100: 1, T0041: 1, H0561: 1, S0440: 1, H0509: 1, H0529: 1, L0640: 1, |
| | | | | L0770: 1, L0769: 1, L3905: 1, L5566: 1, L0773: 1, L0662: 1, L0363: 1, L0774: 1, L0775: 1, L0806: 1, L0559: 1, L0783: 1, L0383: 1, |
| | | | | L5623: 1, H0698: 1, S0374: 1, H0520: 1, H0519: 1, S0292: 1, S0126: 1, H0682: 1, S0380: 1, H0696: 1, S0027: 1, L0740: 1, L0731: 1, |
| | | | | H0445: 1, L0605: 1, L0592: 1 and H0543: 1. |
| 223 | HTXET11 | 581521 | 233 | AR240: 7, AR055: 6, AR060: 5, AR283: 5, AR282: 5, AR300: 4, AR218: 4, AR277: 4, AR089: 3, AR185: 3, AR104: 3, AR039: 3, |
| | | | | AR096: 3, AR316: 3, AR313: 2, AR299: 2, AR219: 2, H0265: 1 and S0442: 1. |
| 224 | HTXFA72 | 853410 | 234 | AR313: 47, AR039: 45, AR299: 26, AR089: 23, AR096: 23, AR185: 22, AR300: 20, AR277: 19, AR219: 17, AR316: 16, AR240: 14, |
| | | | | AR104: 14, AR060: 12, AR218: 11, AR282: 10, AR055: 8, AR283: 5, H0265: 1 |
| 225 | HTXJD85 | 840391 | 235 | AR313: 38, AR039: 32, AR096: 17, AR185: 17, AR300: 17, AR277: 16, AR299: 15, AR089: 15, AR240: 12, AR316: 10, AR219: 10, |
| | | | | AR104: 9, AR060: 8, AR055: 8, AR218: 8, AR282: 6, AR283: 4, H0556: 2, L0638: 1, L0748: 1 and L0439: 1. |
| 226 | HTXJY08 | 637774 | 236 | AR055: 2, AR060: 2, AR300: 2, AR299: 2, AR313: 2, AR185: 1, AR282: 1, AR089: 1, AR039: 1, AR316: 1, AR219: 1, H0556: 1, |
| | | | | S0442: 1, H0036: 1, H0590: 1, H0024: 1, H0100: 1, L0769: 1, L0667: 1, L0438: 1, L0740: 1 and L0777: 1. |
| 227 | HTXLT36 | 843477 | 237 | AR218: 8, AR240: 7, AR313: 7, AR060: 7, AR055: 7, AR089: 6, AR096: 6, AR104: 6, AR185: 6, AR299: 6, AR316: 5, AR300: 5, |
| | | | | AR219: 5, AR039: 5, AR282: 5, AR277: 3, AR283: 3, H0250: 2, H0477: 2, L0804: 2, L0791: 2, H0660: 2, S0406: 2, L0758: 2, |
| | | | | H0171: 1, H0556: 1, H0713: 1, H0717: 1, T0049: 1, L0760: 1, S0356: 1, H0747: 1, H0587: 1, L3653: 1, H0013: 1, H0635: 1, H0081: 1, |
| | | | | S0003: 1, H0135: 1, H0090: 1, T0042: 1, L0065: 1, S0440: 1, S0422: 1, L0520: 1, L0766: 1, L0655: 1, L4501: 1, L0665: 1, H0539: 1, |
| | | | | L0747: 1, L0749: 1, L0757: 1, L0759: 1, H0423: 1, H0422: 1 and H0352: 1. |
| 228 | HUFCL31 | 801938 | 238 | AR060: 26, AR240: 10, AR300: 9, AR096: 9, AR316: 8, AR299: 8, AR089: 8, AR218: 7, AR313: 5, AR219: 5, AR283: 5, AR055: 4, |
| | | | | AR039: 4, AR104: 4, AR185: 3, AR282: 3, AR277: 2, L0764: 5, L0771: 5, H0506: 4, L0374: 3, S0434: 3, S0356: 1, S0410: 1, H0264: 1, |
| | | | | L0372: 1, L0783: 1, L0532: 1 and L0663: 1. |
| 229 | HUKDF20 | 566823 | 239 | AR055: 7, AR218: 6, AR060: 6, AR300: 5, AR282: 4, AR104: 4, AR313: 4, AR283: 4, AR185: 4, AR299: 4, AR277: 3, AR219: 3, |
| | | | | AR089: 3, AR316: 3, AR039: 3, AR240: 3, AR096: 2, H0261: 1, H0266: 1 and H0059: 1. |
| 230 | HUSCJ14 | 894699 | 240 | AR239: 10, AR228: 10, AR227: 9, AR237: 9, AR230: 8, AR233: 8, AR287: 8, AR203: 7, AR288: 7, AR176: 6, AR184: 6, AR199: 6, |
| | | | | AR229: 6, AR215: 6, AR190: 6, AR200: 5, AR245: 5, AR174: 5, AR234: 5, AR191: 5, AR180: 4, AR297: 4, AR232: 4, AR226: 4, |
| | | | | AR289: 4, AR298: 4, AR194: 4, AR170: 4, AR257: 4, AR061: 3, AR292: 3, AR173: 3, AR231: 3, AR262: 3, AR242: 3, AR284: 3, |
| | | | | AR286: 3, AR251: 3, AR179: 3, AR236: 3, AR238: 3, AR255: 3, AR161: 3, AR189: 3, AR162: 3, AR235: 3, AR293: 3, AR282: 3, |
| | | | | AR188: 3, AR294: 3, AR165: 3, AR163: 3, AR164: 3, AR166: 3, AR285: 2, AR201: 2, AR181: 2, AR295: 2, AR177: 2, AR247: 2, |
| | | | | AR290: 2, AR205: 2, AR300: 2, AR225: 2, AR260: 2, AR198: 2, AR261: 2, AR193: 2, AR291: 2, AR268: 2, AR175: 2, AR270: 2, |
| | | | | AR183: 2, AR211: 2, AR296: 2, AR196: 2, AR185: 2, AR258: 2, AR250: 2, AR240: 2, AR178: 2, AR204: 2, AR195: 2, AR060: 2, |
| | | | | AR312: 1, AR311: 1, AR210: 1, AR224: 1, AR243: 1, AR299: 1, AR269: 1, AR316: 1, AR275: 1, AR186: 1, AR172: 1, AR039: 1, |
| | | | | AR267: 1, AR256: 1, AR263: 1, AR055: 1, AR089: 1, AR217: 1, L2654: 6, L0741: 4, S0192: 4, H0677: 4, H0556: 3, H0013: 3, |
| | | | | H0052: 3, L0766: 3, L0744: 3, L0439: 3, L0757: 3, H0265: 2, S0040: 2, S0410: 2, H0599: 2, H0545: 2, H0266: 2, H0030: 2, H0135: 2, |
| | | | | L3905: 2, L5622: 2, H0520: 2, H0547: 2, H0519: 2, L0748: 2, L0756: 2, L0777: 2, L0780: 2, L0758: 2, L0485: 2, L0604: 2, H0739: 1, |
| | | | | H0713: 1, S0134: 1, S0218: 1, H0656: 1, L2909: 1, S0212: 1, H0663: 1, S0420: 1, L1562: 1, S0360: 1, S0408: 1, H0742: 1, S0132: 1, |
| | | | | S0476: 1, H0393: 1, H0587: 1, T0040: 1, H0575: 1, H0309: 1, H0009: 1, L0471: 1, H0620: 1, H0510: 1, H0290: 1, S0250: 1, S0022: 1, |
| | | | | T0023: 1, H0488: 1, H0268: 1, T0041: 1, T0042: 1, H0538: 1, S0210: 1, L0763: 1, L0800: 1, L0771: 1, L0794: 1, L0804: 1, L0774: 1, |
| | | | | L0775: 1, L5623: 1, L0793: 1, L2652: 1, L2257: 1, L2260: 1, L0710: 1, L2262: 1, H0144: 1, H0593: 1, H0435: 1, H0521: 1, H0555: 1, |
| | | | | L0743: 1, L0754: 1, L0779: 1, L0752: 1, S0031: 1, S0436: 1, L0596: 1, L0605: 1, L0601: 1, S0106: 1, H0667: 1, S0276: 1 and L3576: 1. |
| 231 | HUVDJ48 | 564853 | 241 | AR055: 6, AR060: 5, AR283: 5, AR039: 5, AR185: 4, AR096: 4, AR240: 4, AR104: 4, AR299: 4, AR300: 3, AR089: 3, AR316: 3, |
| | | | | AR313: 3, AR282: 3, AR218: 2, AR277: 2, AR219: 2, H0393: 1, H0056: 1 and L0662: 1. |
| 232 | HWBBU75 | 780360 | 242 | L0665: 4, H0457: 3, H0264: 3, L0766: 3, H0521: 3, L0745: 3, H0556: 2, H0580: 2, S0352: 2, L0761: 2, L0806: 2, L0789: 2, L0748: 2, |
| | | | | H0542: 2, H0255: 1, S0278: 1, H0581: 1, H0271: 1, H0719: 1, H0413: 1, H0494: 1, S0002: 1, S0426: 1, L0769: 1, L0774: 1, H0660: 1, |
| | | | | L0750: 1, L0752: 1, L0753: 1 and S0424: 1. |
| 233 | HWBCN36 | 722259 | 243 | AR104: 3, AR185: 3, AR039: 2, AR055: 2, AR282: 2, AR300: 2, AR060: 1, AR096: 1, AR089: 1, AR240: 1, AR277: 1, AR316: 1 |
| | | | | H0580: 1 |
| 234 | HWBDJ08 | 762860 | 244 | AR313: 31, AR039: 30, AR096: 19, AR218: 18, AR316: 17, AR300: 17, AR219: 16, AR299: 13, AR185: 12, AR277: 12, AR089: 12, |
| | | | | AR104: 8, AR240: 7, AR060: 5, AR282: 5, AR055: 4, AR283: 1, L0794: 7, H0556: 4, S0414: 4, L0779: 4, H0031: 3, S0216: 3, |
| | | | | H0265: 2, H0220: 2, H0688: 2, H0634: 2, L0655: 2, L0665: 2, H0659: 2, S0328: 2, H0521: 2, L0753: 2, L0758: 2, H0422: 2, S0114: 1, |
| | | | | H0300: 1, S0356: 1, S0360: 1, H0580: 1, S0046: 1, H0643: 1, L3655: 1, H0250: 1, H0069: 1, H0635: 1, H0042: 1, H0575: 1, H0581: 1, |
| | | | | S0049: 1, L0045: 1, H0622: 1, H0644: 1, H0641: 1, S0002: 1, L0763: 1, L0653: 1, L0776: 1, L0793: 1, L0777: 1, L0755: 1, L0731: 1, |
| | | | | L0593: 1 and H0542: 1. |
| 235 | HWLBO67 | 834315 | 245 | S0374: 1 |
| 236 | HWLGP26 | 834770 | 246 | AR313: 10, AR039: 7, AR096: 6, AR316: 5, AR299: 4, AR240: 4, AR300: 3, AR277: 3, AR089: 3, AR060: 2, AR185: 2, AR282: 2, |
| | | | | AR055: 2, AR218: 1, AR283: 1, L0766: 5, L0803: 5, L0794: 3, S0410: 2, H0551: 2, H0435: 2, L0756: 2, L0731: 2, H0585: 1, S0212: 1, |
| | | | | S0282: 1, L0534: 1, S0442: 1, S0354: 1, H0735: 1, H0486: 1, H0014: 1, H0354: 1, H0644: 1, H0135: 1, H0647: 1, L0369: 1, L0640: 1, |
| | | | | L0763: 1, L0770: 1, L3905: 1, L0646: 1, L0771: 1, L0804: 1, L0784: 1, L0528: 1, L0789: 1, L0790: 1, L0792: 1, L3827: 1, H0658: 1, |
| | | | | L0749: 1, L0758: 1 and S0436: 1. |
| 237 | HILCA24 | 869856 | 247 | AR316: 4, AR282: 2, AR096: 1, AR299: 1, AR039: 1, L0748: 4, H0090: 2, L0659: 2, H0521: 2, L0777: 2, L0608: 2, H0543: 2, |
| | | | | T0002: 1, S0114: 1, L3658: 1, S0358: 1, S0408: 1, L3649: 1, T0109: 1, H0581: 1, H0622: 1, H0031: 1, H0644: 1, S0002: 1, L0657: 1, |
| | | | | L0526: 1, L0789: 1, L0664: 1, S0380: 1, H0522: 1, L0749: 1 and L0779: 1. |
| | HILCA24 | 782450 | 260 | |
| 238 | HYABC84 | 865064 | 248 | AR313: 19, AR219: 16, AR218: 13, AR104: 13, AR096: 11, AR316: 11, AR240: 10, AR299: 10, AR089: 10, AR282: 9, AR185: 9, |
| | | | | AR039: 9, AR283: 8, AR277: 7, AR060: 6, AR055: 5, AR300: 5 |
| | HYABC84 | 789854 | 261 | |
| 239 | HPWTF23 | 844775 | 249 | AR240: 84, AR089: 51, AR299: 38, AR096: 37, AR039: 36, AR313: 34, AR185: 24, AR300: 22, AR316: 22, AR282: 19, AR283: 15, |
| | | | | AR104: 14, AR055: 10, AR060: 10, AR277: 6, AR218: 2, S0474: 47, H0710: 28, L0747: 18, L0659: 17, H0656: 13, H0436: 10, |
| | | | | H0271: 9, L0751: 9, H0581: 8, H0179: 8, H0063: 8, L0731: 8, L0599: 8, H0740: 7, L0756: 7, H0650: 6, L0662: 6, H0555: 6, S0354: 5, |
| | | | | H0728: 5, H0733: 5, H0734: 5, H0036: 5, H0590: 5, H0052: 5, L0770: 5, S0428: 5, S0374: 5, L0439: 5, L3643: 4, H0717: 4, H0747: 4, |
| | | | | H0393: 4, S0222: 4, H0156: 4, H0309: 4, S0312: 4, S0314: 4, H0090: 4, H0591: 4, L0637: 4, L0761: 4, L0776: 4, L0783: 4, L0438: 4, |
| | | | | L0757: 4, H0543: 4, H0716: 3, H0662: 3, H0402: 3, H0619: 3, H0392: 3, H0575: 3, H0004: 3, H0673: 3, S0364: 3, H0135: 3, H0059: 3, |
| | | | | H0494: 3, L0667: 3, L0764: 3, L0803: 3, L0775: 3, L0666: 3, L3811: 3, H0670: 3, L0744: 3, L0750: 3, L0779: 3, L0758: 3, L0759: 3, |
| | | | | S0436: 3, H0556: 2, L3644: 2, H0713: 2, S6024: 2, H0341: 2, S0282: 2, S0442: 2, S0376: 2, S0360: 2, H0580: 2, H0329: 2, H0749: 2, |
| | | | | H0645: 2, H0369: 2, H0486: 2, S0280: 2, H0042: 2, H0421: 2, H0545: 2, H0457: 2, H0620: 2, H0014: 2, S0051: 2, T0010: 2, S0340: 2, |
| | | | | H0031: 2, H0644: 2, H0383: 2, H0674: 2, H0551: 2, H0264: 2, H0488: 2, T0004: 2, S0438: 2, H0130: 2, H0647: 2, S0422: 2, L0766: 2, |
| | | | | L0655: 2, L0517: 2, L0518: 2, L0809: 2, L0647: 2, H0547: 2, H0660: 2, S0044: 2, S0027: 2, S0028: 2, L0748: 2, L0754: 2, L0745: 2, |
| | | | | H0445: 2, S0434: 2, L0596: 2, L0588: 2, H0506: 2, H0170: 1, S0134: 1, L0414: 1, L0785: 1, S0212: 1, H0255: 1, S0358: 1, S0444: 1, |
| | | | | L3649: 1, H0637: 1, H0729: 1, H0730: 1, H0741: 1, H0208: 1, S6022: 1, H0550: 1, H0609: 1, H0586: 1, H0333: 1, T0060: 1, H0427: 1, |
| | | | | L0021: 1, L0022: 1, S0010: 1, S0346: 1, L0105: 1, H0318: 1, H0597: 1, H0150: 1, L0471: 1, H0011: 1, S0362: 1, H0373: 1, S0388: 1, |
| | | | | H0354: 1, H0099: 1, H0594: 1, H0266: 1, H0416: 1, H0188: 1, S0318: 1, S0334: 1, H0687: 1, S0338: 1, H0252: 1, H0213: 1, H0553: 1, |
| | | | | H0111: 1, H0617: 1, H0169: 1, H0163: 1, T0067: 1, L0435: 1, L0564: 1, S0440: 1, H0509: 1, S0150: 1, H0646: 1, H0652: 1, L3815: 1, |
| | | | | L0371: 1, L0769: 1, L0771: 1, L0649: 1, L0774: 1, L0375: 1, L0651: 1, L0378: 1, L0805: 1, L0606: 1, L0657: 1, L0384: 1, L0529: 1, |
| | | | | L5623: 1, L0793: 1, L0664: 1, S0216: 1, H0144: 1, H0723: 1, H0593: 1, H0689: 1, H0659: 1, H0672: 1, S0328: 1, H0539: 1, H0518: 1, |
| | | | | H0521: 1, H0696: 1, H0134: 1, L0612: 1, H0732: 1, S3012: 1, S0390: 1, S0037: 1, S3014: 1, S0032: 1, L0743: 1, L0749: 1, L0752: 1, |
| | | | | L0755: 1, H0707: 1, L0591: 1, L0592: 1, H0653: 1, H0136: 1, S0412: 1 and H0721: 1. |
| | HPWTF23 | 843700 | 262 | |
| 240 | HLWAU42 | 695737 | 250 | AR055: 57, AR060: 56, AR185: 55, AR299: 45, AR283: 43, AR089: 41, AR282: 37, AR104: 35, AR316: 31, AR300: 25, AR039: 24, |
| | | | | AR096: 23, AR240: 22, AR313: 22, AR277: 22, AR218: 16, AR219: 9, L0740: 8, H0486: 5, L0439: 5, H0733: 4, L0606: 4, L0731: 4, |
| | | | | H0553: 3, S0422: 3, H0672: 3, H0696: 3, L0747: 3, H0581: 2, H0428: 2, H0169: 2, L0774: 2, L0518: 2, L0438: 2, H0436: 2, L0744: 2, |
| | | | | L0779: 2, L0752: 2, S0436: 2, L0362: 2, S0242: 2, S0412: 2, S0040: 1, H0713: 1, H0656: 1, H0341: 1, H0661: 1, H0459: 1, S0444: 1, |
| | | | | S0360: 1, H0729: 1, H0728: 1, H0734: 1, L0717: 1, H0411: 1, S0278: 1, H0431: 1, H0592: 1, H0587: 1, H0331: 1, H0013: 1, H0156: 1, |
| | | | | H0599: 1, L0105: 1, H0015: 1, H0051: 1, H0355: 1, S0022: 1, H0030: 1, H0031: 1, H0032: 1, S0440: 1, H0509: 1, H0132: 1, H0646: 1, |
| | | | | S0210: 1, L0770: 1, L3905: 1, L0766: 1, L0775: 1, L0661: 1, L0783: 1, L0666: 1, L0664: 1, L0665: 1, H0723: 1, H0724: 1, H0648: 1, |
| | | | | S0330: 1, S0044: 1, S0028: 1, L0743: 1, L0756: 1, L0755: 1, L0759: 1, H0595: 1, S0192: 1, S0276: 1, S0196: 1 and H0423: 1. |
| | HLWAU42 | 840855 | 263 | |
| 241 | HGCAC19 | 851527 | 251 | AR219: 2, AR316: 2, AR096: 1, L0794: 15, L0803: 12, L0766: 7, H0013: 6, H0090: 6, L0663: 6, L0777: 6, L0731: 6, L0759: 6, |
| | | | | H0457: 5, H0328: 5, L0493: 5, L0666: 5, L0754: 5, L0749: 5, H0543: 5, H0656: 4, S0358: 4, H0615: 4, L0665: 4, H0521: 4, L0779: 4, |
| | | | | L0588: 4, H0305: 3, S0360: 3, H0036: 3, H0052: 3, T0042: 3, L0761: 3, L0805: 3, L0809: 3, H0144: 3, H0670: 3, H0696: 3, L0591: 3, |
| | | | | S0134: 2, H0657: 2, L3659: 2, S0418: 2, S0442: 2, S0007: 2, S0045: 2, L0717: 2, H0600: 2, H0486: 2, H0156: 2, H0575: 2, H0590: 2, |
| | | | | H0024: 2, S0022: 2, L0483: 2, H0135: 2, H0038: 2, H0560: 2, S0422: 2, L0457: 2, H0529: 2, L0625: 2, L0648: 2, L0776: 2, L0655: 2, |
| | | | | L0527: 2, S0374: 2, H0520: 2, H0519: 2, H0659: 2, H0436: 2, L0748: 2, L0745: 2, L0581: 2, L0361: 2, H0542: 2, H0423: 2, S0424: 2, |
| | | | | H0624: 1, H0171: 1, H0556: 1, T0002: 1, H0686: 1, S0342: 1, H0717: 1, T0049: 1, S0430: 1, H0650: 1, H0341: 1, H0663: 1, H0589: 1, |
| | | | | S0356: 1, S0376: 1, S0408: 1, S0410: 1, L2336: 1, H0329: 1, S0046: 1, H0645: 1, H0369: 1, S6014: 1, H0370: 1, H0455: 1, H0438: 1, |
| | | | | H0602: 1, H0586: 1, H0587: 1, H0574: 1, H0559: 1, S0280: 1, L0021: 1, H0318: 1, S0474: 1, H0263: 1, T0115: 1, H0545: 1, L0157: 1, |
| | | | | H0123: 1, L0471: 1, H0015: 1, S0388: 1, S0051: 1, H0375: 1, H0271: 1, H0188: 1, S0312: 1, S0003: 1, H0688: 1, H0039: 1, H0622: 1, |
| | | | | H0031: 1, H0644: 1, L0055: 1, H0169: 1, L0456: 1, H0163: 1, H0634: 1, H0551: 1, H0379: 1, H0488: 1, H0279: 1, L0475: 1, S0352: 1, |
| | | | | H0652: 1, S0208: 1, L0640: 1, L0763: 1, L0500: 1, L0769: 1, L0646: 1, L0662: 1, L0649: 1, L0498: 1, L0804: 1, L0650: 1, L0784: 1, |
| | | | | L0806: 1, L0653: 1, L0606: 1, L0515: 1, L0659: 1, L0526: 1, L0519: 1, L0788: 1, L0790: 1, L0791: 1, L0664: 1, S0053: 1, S0296: 1, |
| | | | | H0547: 1, S0126: 1, H0682: 1, H0684: 1, H0658: 1, H0660: 1, H0672: 1, S0380: 1, H0518: 1, H0525: 1, S0044: 1, S0404: 1, S0406: 1, |
| | | | | H0479: 1, S0432: 1, S3014: 1, L0744: 1, L0750: 1, L0780: 1, L0753: 1, L0604: 1, S0106: 1, S0242: 1, S0196: 1, S0452: 1 and H0506: 1. |
| | HGCAC19 | 842540 | 264 | |
| | HGCAC19 | 801999 | 265 | |
| 242 | HEQBJ01 | 876546 | 252 | AR277: 12, AR283: 11, AR219: 11, AR316: 10, AR089: 10, AR218: 9, AR104: 9, AR055: 8, AR282: 8, AR313: 8, AR096: 7, |
| | | | | AR300: 7, AR185: 7, AR299: 7, AR240: 7, AR060: 5, AR039: 5, S0360: 3, H0619: 3, H0673: 2, L0438: 2, H0685: 1, S0444: 1, |
| | | | | H0544: 1, H0266: 1, H0163: 1, L0770: 1, L0646: 1, L0768: 1, L0766: 1, L0803: 1, L0776: 1, S0152: 1, S0027: 1, L0439: 1, L0747: 1, |
| | | | | L0777: 1, L0752: 1 and L0758: 1. |
| | HEQBJ01 | 861786 | 266 | |
| | HEQBJ01 | 834633 | 267 | |
| 243 | HBJHT01 | 587262 | 253 | AR313: 10, AR039: 8, AR299: 6, AR300: 5, AR185: 5, AR055: 5, AR277: 5, AR060: 4, AR096: 4, AR089: 4, AR316: 4, AR240: 3, |
| | | | | AR104: 3, AR282: 2, AR218: 2, AR283: 2, L0667: 2, S0114: 1, H0351: 1, H0318: 1, H0615: 1 and L0764: 1. |
| | HBJHT01 | 580026 | 268 | |
| 244 | HE8FD92 | 901142 | 254 | AR055: 6, AR299: 6, AR060: 6, AR240: 5, AR218: 5, AR219: 5, AR300: 5, AR185: 5, AR089: 4, AR316: 3, AR096: 3, AR104: 3, |
| | | | | AR039: 3, AR277: 3, AR283: 2, AR282: 2, AR313: 2 |
| | HE8FD92 | 888274 | 269 | |
| | HE8FD92 | 869847 | 270 | |
| | HE8FD92 | 856544 | 271 | |
| | HE8FD92 | 843825 | 272 | |
| 245 | HBDAB91 | 864374 | 255 | AR282: 3, AR219: 1, H0551: 2, L0803: 2, L0439: 2, L0750: 2, S0308: 2, L0644: 1, L0655: 1, L0809: 1, L0780: 1 and L0752: 1. |
| | HBDAB91 | 789532 | 273 | |

[0087] Table 1C summarizes additional polynucleotides encompassed by the invention (including cDNA clones related to the sequences (Clone ID:), contig sequences (contig identifier (Contig ID:) contig nucleotide sequence identifiers (SEQ ID NO:X)), and genomic sequences (SEQ ID NO:B). The first column provides a unique clone identifier, “Clone ID:”, for a cDNA clone related to each contig sequence. The second column provides the sequence identifier, “SEQ ID NO:X”, for each contig sequence. The third column provides a unique contig identifier, “Contig ID:” for each contig sequence. The fourth column, provides a BAC identifier “BAC ID NO:A” for the BAC clone referenced in the corresponding row of the table. The fifth column provides the nucleotide sequence identifier, “SEQ ID NO:B” for a fragment of the BAC clone identified in column four of the corresponding row of the table. The sixth column, “Exon From-To”, provides the location (i.e., nucleotide position numbers) within the polynucleotide sequence of SEQ ID NO:B which delineate certain polynucleotides of the invention that are also exemplary members of polynucleotide sequences that encode polypeptides of the invention (e.g., polypeptides containing amino acid sequences encoded by the polynucleotide sequences delineated in column six, and fragments and variants thereof).

TABLE 1C

| cDNA | SEQ ID | CONTIG | BAC | SEQ ID | EXON |
|---|---|---|---|---|---|
| Clone ID | NO: X | ID: | ID: A | NO: B | From-To |
| H6EEU40 | 12 | 757048 | AC026285 | 537 | 1-414 |
| | | | | | 440-1918 |
| H6EEU40 | 12 | 757048 | AC023920 | 538 | 1-416 |
| | | | | | 44-1920 |
| H6EEU40 | 12 | 757048 | AC026285 | 539 | 1-1458 |
| | | | | | 1729-1836 |
| H6EEU40 | 12 | 757048 | AC023920 | 540 | 1-1459 |
| | | | | | 1730-1837 |
| HACBJ56 | 13 | 847112 | AC069497 | 541 | 1-117 |
| | | | | | 2470-3367 |
| | | | | | 4908-5262 |
| | | | | | 5641-5756 |
| | | | | | 7886-8200 |
| | | | | | 9815-11138 |
| HACBJ56 | 13 | 847112 | AC007104 | 542 | 1-802 |
| | | | | | 2342-2695 |
| | | | | | 3074-3189 |
| | | | | | 5319-5633 |
| | | | | | 7248-8571 |
| HACBJ56 | 13 | 847112 | AC069497 | 543 | 1-453 |
| HACBJ56 | 13 | 847112 | AC007104 | 544 | 1-453 |
| HACBS22 | 14 | 847113 | AC012073 | 545 | 1-134 |
| | | | | | 718-833 |
| | | | | | 1002-1132 |
| | | | | | 2357-2516 |
| | | | | | 3762-3945 |
| | | | | | 5344-5477 |
| | | | | | 7446-7594 |
| | | | | | 7742-7904 |
| | | | | | 10636-10725 |
| | | | | | 11138-12223 |
| | | | | | 12583-12977 |
| | | | | | 13095-13178 |
| | | | | | 14224-14532 |
| | | | | | 14668-14841 |
| | | | | | 15779-16124 |
| | | | | | 16257-16343 |
| | | | | | 16508-16826 |
| | | | | | 17489-17757 |
| | | | | | 17847-18008 |
| | | | | | 19028-19192 |
| | | | | | 19755-23561 |
| | | | | | 24286-24717 |
| | | | | | 24920-25347 |
| | | | | | 25567-25741 |
| | | | | | 26629-26891 |
| | | | | | 27895-27968 |
| HACBS22 | 14 | 847113 | AC012073 | 546 | 1-545 |
| HADMA77 | 17 | 783049 | AC007944 | 547 | 1-3350 |
| HADMA77 | 17 | 783049 | AC018656 | 548 | 1-3349 |
| HADMA77 | 17 | 783049 | AC021874 | 549 | 1-3351 |
| | | | | | 4529-4959 |
| | | | | | 6110-6438 |
| HADMA77 | 17 | 783049 | AC007944 | 550 | 1-941 |
| HADMA77 | 17 | 783049 | AC018656 | 551 | 1-432 |
| HADMA77 | 17 | 783049 | AC018656 | 552 | 1-941 |
| HADMB15 | 18 | 847116 | AC026666 | 553 | 1-385 |
| | | | | | 406-780 |
| HADMB15 | 18 | 847116 | AC026281 | 554 | 1-114 |
| | | | | | 430-875 |
| | | | | | 896-1262 |
| HAGFJ67 | 21 | 861680 | AL353805 | 555 | 1-1465 |
| HAGFJ67 | 21 | 861680 | AL354917 | 556 | 1-1465 |
| HAGFJ67 | 21 | 861680 | AL353793 | 557 | 1-1464 |
| HAGFJ67 | 21 | 861680 | AL353805 | 558 | 1-565 |
| HAGFJ67 | 21 | 861680 | AL353793 | 559 | 1-565 |
| HAGFS57 | 22 | 847120 | AC021238 | 560 | 1-140 |
| | | | | | 3343-3636 |
| | | | | | 5052-5179 |
| | | | | | 5712-5796 |
| | | | | | 6486-6918 |
| | | | | | 7867-8404 |
| | | | | | 8934-9513 |
| | | | | | 9711-10538 |
| | | | | | 10984-11992 |
| | | | | | 12080-12349 |
| | | | | | 12485-12857 |
| | | | | | 13895-14212 |
| | | | | | 14994-15054 |
| | | | | | 15169-15297 |
| | | | | | 16132-16211 |
| | | | | | 17721-17811 |
| | | | | | 18135-18354 |
| | | | | | 18363-18444 |
| | | | | | 19661-19720 |
| | | | | | 19841-20784 |
| | | | | | 20920-21236 |
| | | | | | 22168-24079 |
| HAGFS57 | 22 | 847120 | AC066613 | 561 | 1-433 |
| | | | | | 1382-1919 |
| | | | | | 2449-3028 |
| | | | | | 3226-4053 |
| | | | | | 4499-5507 |
| | | | | | 5595-5864 |
| | | | | | 6000-6372 |
| | | | | | 7410-7727 |
| | | | | | 8509-8569 |
| | | | | | 8684-8812 |
| | | | | | 9647-9726 |
| | | | | | 11236-11326 |
| | | | | | 11650-11869 |
| | | | | | 11878-11959 |
| | | | | | 13176-13235 |
| | | | | | 13356-14299 |
| | | | | | 14435-14752 |
| | | | | | 15684-17595 |
| HAGHR18 | 24 | 655435 | AC009671 | 562 | 1-1134 |
| HAJAY92 | 26 | 845601 | AL353726 | 563 | 1-2332 |
| HAJAY92 | 26 | 845601 | AL353726 | 564 | 1-115 |
| HAJAY92 | 26 | 845601 | AL353726 | 565 | 1-115 |
| HARAE26 | 29 | 560598 | AC024491 | 566 | 1-1237 |
| HATCD80 | 30 | 826098 | AL158801 | 567 | 1-1974 |
| HATCD80 | 30 | 826098 | AL158801 | 568 | 1-90 |
| HBAGD86 | 31 | 838799 | AC016755 | 569 | 1-41 |
| | | | | | 1648-1993 |
| | | | | | 2035-3552 |
| | | | | | 3554-6713 |
| HBAGD86 | 31 | 838799 | AC016755 | 570 | 1-161 |
| | | | | | 696-809 |
| | | | | | 2256-2753 |
| | | | | | 6910-6991 |
| | | | | | 7733-7857 |
| | | | | | 9267-9458 |
| | | | | | 10650-10734 |
| | | | | | 11114-11562 |
| | | | | | 11678-11801 |
| | | | | | 12524-12817 |
| | | | | | 14494-15914 |
| HBAGD86 | 31 | 838799 | AC016755 | 571 | 1-217 |
| HBHAA05 | 33 | 603174 | AL353743 | 572 | 1-677 |
| HBHAA05 | 33 | 603174 | AL161453 | 573 | 1-677 |
| HBHAA05 | 33 | 603174 | AL161453 | 574 | 1-339 |
| HBHAA81 | 34 | 846465 | AC006059 | 575 | 1-230 |
| | | | | | 1619-1699 |
| | | | | | 1953-2090 |
| | | | | | 2986-3054 |
| | | | | | 3665-3786 |
| | | | | | 3902-4406 |
| | | | | | 4457-4674 |
| | | | | | 5129-5531 |
| | | | | | 5660-5811 |
| | | | | | 5934-5969 |
| | | | | | 7563-7959 |
| | | | | | 8086-9195 |
| | | | | | 9591-9735 |
| | | | | | 9788-10149 |
| HBHAA81 | 34 | 846465 | AC018471 | 576 | 1-230 |
| | | | | | 1619-1699 |
| | | | | | 1965-2090 |
| | | | | | 2986-3054 |
| | | | | | 3665-3786 |
| | | | | | 3902-4405 |
| | | | | | 4456-4673 |
| | | | | | 5128-5530 |
| | | | | | 5659-5810 |
| | | | | | 5933-5968 |
| | | | | | 7561-7957 |
| | | | | | 8084-9193 |
| | | | | | 9589-9733 |
| | | | | | 9786-10146 |
| HBHAA81 | 34 | 846465 | AC006059 | 577 | 1-340 |
| | | | | | 501-802 |
| HBHAA81 | 34 | 846465 | AC006059 | 578 | 1-661 |
| | | | | | 1538-1684 |
| | | | | | 3489-3680 |
| | | | | | 3832-3933 |
| | | | | | 4241-4410 |
| | | | | | 5782-5872 |
| | | | | | 5998-6150 |
| HBHAA81 | 34 | 846465 | AC018471 | 579 | 1-661 |
| | | | | | 1539-1672 |
| HBHAA81 | 34 | 846465 | AC018471 | 580 | 1-340 |
| | | | | | 501-802 |
| HBJAB02 | 35 | 837309 | AC015651 | 581 | 1-35 |
| | | | | | 159-252 |
| | | | | | 410-783 |
| | | | | | 786-830 |
| | | | | | 953-1035 |
| | | | | | 1452-1553 |
| | | | | | 1651-2071 |
| | | | | | 2161-2264 |
| | | | | | 2352-2454 |
| | | | | | 2494-2758 |
| | | | | | 2847-3006 |
| | | | | | 3135-3272 |
| | | | | | 3477-4138 |
| | | | | | 4907-5738 |
| | | | | | 5972-6059 |
| | | | | | 6132-6367 |
| | | | | | 6650-6834 |
| | | | | | 6915-7010 |
| | | | | | 7091-7658 |
| | | | | | 7662-9457 |
| | | | | | 10122-10222 |
| | | | | | 11415-11534 |
| | | | | | 12386-12418 |
| | | | | | 13253-13584 |
| | | | | | 13635-13867 |
| | | | | | 14881-15326 |
| | | | | | 15851-16013 |
| | | | | | 16529-16816 |
| | | | | | 17430-17529 |
| | | | | | 18140-18269 |
| | | | | | 18634-18734 |
| | | | | | 19189-19369 |
| | | | | | 20434-21105 |
| | | | | | 21912-22008 |
| HBJAB02 | 35 | 837309 | AC015651 | 582 | 1-2097 |
| | | | | | 5308-5495 |
| | | | | | 5696-5742 |
| | | | | | 5890-6249 |
| | | | | | 7370-7525 |
| | | | | | 7850-8236 |
| | | | | | 8359-8463 |
| | | | | | 8597-8770 |
| | | | | | 8919-9028 |
| | | | | | 9213-9353 |
| | | | | | 9517-9639 |
| | | | | | 9765-9874 |
| | | | | | 9944-11023 |
| | | | | | 11124-11219 |
| | | | | | 11315-11613 |
| | | | | | 11708-12241 |
| | | | | | 12431-12666 |
| | | | | | 12744-12802 |
| | | | | | 12976-13087 |
| | | | | | 13374-13914 |
| | | | | | 14728-15500 |
| HBJAC40 | 36 | 841235 | AC007606 | 583 | 1-89 |
| | | | | | 520-616 |
| | | | | | 811-972 |
| | | | | | 1604-1874 |
| | | | | | 1982-5038 |
| | | | | | 5125-5260 |
| | | | | | 6459-6956 |
| | | | | | 7370-7473 |
| | | | | | 7507-7774 |
| | | | | | 8952-9321 |
| HBJAC40 | 36 | 841235 | AC007606 | 584 | 1-403 |
| | | | | | 428-1236 |
| HBJDW56 | 38 | 520401 | AC005532 | 585 | 1-626 |
| HBJDW56 | 38 | 520401 | AC005532 | 586 | 1-516 |
| HBJDW56 | 38 | 520401 | AC005532 | 587 | 1-176 |
| HBXCM66 | 44 | 639039 | AC011962 | 588 | 1-102 |
| HCEEE79 | 48 | 560609 | AC006923 | 589 | 1-1044 |
| HCEEE79 | 48 | 560609 | AC006923 | 590 | 1-207 |
| HCEFG93 | 49 | 745400 | AC068128 | 591 | 1-2635 |
| HCEFG93 | 49 | 745400 | AC011140 | 592 | 1-2636 |
| HCFLN88 | 51 | 610000 | AC005089 | 593 | 1-594 |
| | | | | | 1779-2065 |
| | | | | | 2224-2411 |
| | | | | | 3295-3588 |
| | | | | | 3962-4463 |
| | | | | | 5317-5561 |
| | | | | | 5835-6210 |
| | | | | | 6750-7793 |
| HCFLN88 | 51 | 610000 | AC005089 | 594 | 1-141 |
| HCFLN88 | 51 | 610000 | AC005089 | 595 | 1-215 |
| HCLBK61 | 53 | 845659 | AC009299 | 596 | 1-1756 |
| HCLBK61 | 53 | 845659 | AC009299 | 597 | 1-359 |
| HCMSX51 | 54 | 788643 | U96629 | 598 | 1-3014 |
| HCMSX51 | 54 | 788643 | AC040975 | 599 | 1-3014 |
| HCNCO11 | 55 | 775086 | AC011319 | 600 | 1-700 |
| HCNCO11 | 55 | 775086 | AC069204 | 601 | 1-700 |
| HCNCO11 | 55 | 775086 | AC011319 | 602 | 1-354 |
| HCNCO11 | 55 | 775086 | AC011319 | 603 | 1-338 |
| HCNCO11 | 55 | 775086 | AC069204 | 604 | 1-354 |
| HCQBH72 | 57 | 637548 | AC073530 | 605 | 1-1790 |
| HCQBH72 | 57 | 637548 | AC073530 | 606 | 1-106 |
| HCQBH72 | 57 | 637548 | AC073530 | 607 | 1-410 |
| HCWAE64 | 60 | 535893 | AL157935 | 608 | 1-1319 |
| | | | | | 2024-2316 |
| | | | | | 2937-2984 |
| | | | | | 3126-3281 |
| | | | | | 5595-5703 |
| | | | | | 5788-6574 |
| | | | | | 6667-6733 |
| | | | | | 6788-6880 |
| | | | | | 6962-7303 |
| | | | | | 8111-11869 |
| | | | | | 12019-12418 |
| | | | | | 12420-12679 |
| | | | | | 13140-13191 |
| HCWAE64 | 60 | 535893 | AL157935 | 609 | 1-1316 |
| HCWAE64 | 60 | 535893 | AL157935 | 610 | 1-309 |
| HDPDI72 | 62 | 897277 | AL139238 | 611 | 1-76 |
| | | | | | 3170-3542 |
| | | | | | 4724-5613 |
| | | | | | 6598-6719 |
| | | | | | 6954-7373 |
| | | | | | 8256-8349 |
| | | | | | 10408-11003 |
| HDPDI72 | 62 | 897277 | AL139238 | 612 | 1-279 |
| HDPIY31 | 66 | 886159 | AL356790 | 613 | 1-114 |
| | | | | | 949-1189 |
| | | | | | 2041-2318 |
| | | | | | 2541-2711 |
| | | | | | 2797-2871 |
| | | | | | 3152-7720 |
| HDPIY31 | 66 | 886159 | AL118506 | 614 | 1-241 |
| | | | | | 1067-1317 |
| | | | | | 1567-1737 |
| | | | | | 1823-1897 |
| | | | | | 2178-6746 |
| HDPIY31 | 66 | 886159 | AL356790 | 615 | 1-104 |
| | | | | | 116-297 |
| HDPIY31 | 66 | 886159 | AL356790 | 616 | 1-481 |
| HDPIY31 | 66 | 886159 | AL118506 | 617 | 1-89 |
| HDPPQ30 | 69 | 684292 | AL022315 | 618 | 1-968 |
| HDPPQ30 | 69 | 684292 | AL022315 | 619 | 1-255 |
| HDTLM18 | 71 | 836057 | AL049843 | 620 | 1-148 |
| | | | | | 811-1104 |
| | | | | | 2196-2793 |
| | | | | | 2930-2991 |
| | | | | | 3921-4047 |
| | | | | | 6575-6627 |
| | | | | | 8124-8659 |
| | | | | | 8741-8843 |
| | | | | | 9448-9886 |
| | | | | | 10480-10524 |
| | | | | | 10944-11103 |
| | | | | | 13917-14450 |
| | | | | | 14801-15344 |
| | | | | | 16392-17295 |
| | | | | | 18110-18311 |
| | | | | | 20445-21421 |
| | | | | | 21596-22268 |
| | | | | | 23857-23968 |
| | | | | | 24205-24585 |
| | | | | | 24623-24701 |
| | | | | | 25168-25575 |
| | | | | | 28078-28391 |
| | | | | | 28548-28707 |
| | | | | | 29039-29839 |
| | | | | | 30732-31495 |
| | | | | | 32024-32487 |
| | | | | | 32521-33216 |
| | | | | | 34511-34647 |
| | | | | | 35166-35720 |
| | | | | | 36527-36797 |
| | | | | | 36993-37125 |
| | | | | | 38178-38288 |
| | | | | | 39341-39646 |
| | | | | | 41511-41570 |
| | | | | | 42307-42873 |
| | | | | | 42914-43014 |
| | | | | | 43248-43465 |
| | | | | | 43589-43690 |
| | | | | | 43724-43909 |
| | | | | | 44170-44333 |
| | | | | | 44517-45130 |
| | | | | | 45497-45961 |
| | | | | | 46215-46842 |
| | | | | | 47926-48126 |
| | | | | | 49391-51961 |
| HDTLM18 | 71 | 836057 | AL049843 | 621 | 1-2071 |
| HDTLM18 | 71 | 836057 | AL049843 | 622 | 1-76 |
| | | | | | 2590-2720 |
| | | | | | 4185-4370 |
| | | | | | 7052-7178 |
| | | | | | 7385-7428 |
| HE2CM39 | 72 | 553651 | AC018391 | 623 | 1-3570 |
| | | | | | 3779-3904 |
| | | | | | 4646-5979 |
| | | | | | 6339-6701 |
| | | | | | 6710-8473 |
| HE2CM39 | 72 | 553651 | AC018391 | 624 | 1-438 |
| HE2CM39 | 72 | 553651 | AC018391 | 625 | 1-1402 |
| | | | | | 1586-1871 |
| | | | | | 2685-2797 |
| | | | | | 3088-3503 |
| | | | | | 4900-5170 |
| | | | | | 5789-5882 |
| | | | | | 6089-6195 |
| HE6FU11 | 74 | 827236 | AL021578 | 626 | 1-116 |
| | | | | | 2674-2776 |
| | | | | | 3489-4063 |
| | | | | | 7279-7402 |
| | | | | | 9706-10120 |
| | | | | | 10217-10368 |
| | | | | | 12042-12219 |
| | | | | | 12315-12924 |
| | | | | | 14271-14380 |
| | | | | | 14463-14842 |
| | | | | | 16153-16301 |
| HE6FV29 | 75 | 588454 | AL162401 | 627 | 1-1425 |
| HE8BQ49 | 76 | 589443 | AC009225 | 628 | 1-1857 |
| HB8SG96 | 77 | 862016 | AL138707 | 629 | 1-152 |
| | | | | | 684-1297 |
| | | | | | 1697-3720 |
| | | | | | 4478-6193 |
| HE8SG96 | 77 | 862016 | AL138707 | 630 | 1-336 |
| HEBCI18 | 81 | 831464 | AC013399 | 631 | 1-3602 |
| HEBCI18 | 81 | 831464 | AC013399 | 632 | 1-651 |
| HEBDQ91 | 83 | 840288 | AC008623 | 633 | 1-2883 |
| HEBDQ91 | 83 | 840288 | AC008623 | 634 | 1-350 |
| HEBDQ91 | 83 | 840288 | AC008623 | 635 | 1-555 |
| HEBFR46 | 84 | 847064 | AC006483 | 636 | 1-70 |
| | | | | | 282-644 |
| | | | | | 789-4243 |
| HEBFR46 | 84 | 847064 | AC073481 | 637 | 1-2167 |
| | | | | | 2174-3461 |
| HEBFR46 | 84 | 847064 | AC006483 | 638 | 1-344 |
| HEBFR46 | 84 | 847064 | AC006483 | 639 | 1-195 |
| HEBGE07 | 85 | 798096 | AC021918 | 640 | 1-1899 |
| HEBGE07 | 85 | 798096 | AC021918 | 641 | 1-225 |
| HEBGE23 | 86 | 836129 | AC006486 | 642 | 1-976 |
| | | | | | 1287-1533 |
| | | | | | 1631-1785 |
| | | | | | 1868-2476 |
| | | | | | 2517-3500 |
| HEBGE23 | 86 | 836129 | AC021858 | 643 | 1-632 |
| HEBGE23 | 86 | 836129 | AC006486 | 644 | 1-174 |
| HEBGE23 | 86 | 836129 | AC006486 | 645 | 1-509 |
| | | | | | 539-830 |
| | | | | | 1796-2057 |
| | | | | | 2096-2262 |
| | | | | | 2409-2658 |
| | | | | | 2862-3403 |
| | | | | | 4612-4900 |
| | | | | | 4910-5022 |
| | | | | | 5115-5768 |
| | | | | | 7511-7738 |
| | | | | | 8302-8392 |
| | | | | | 9165-9436 |
| | | | | | 10716-11025 |
| | | | | | 12552-13090 |
| | | | | | 13282-13789 |
| HEGAU15 | 87 | 834379 | AC009404 | 646 | 1-1121 |
| HEGAU15 | 87 | 834379 | AC011638 | 647 | 1-1119 |
| HEGAU15 | 87 | 834379 | AC009404 | 648 | 1-363 |
| HEGAU15 | 87 | 834379 | AC009404 | 649 | 1-446 |
| HEGAU15 | 87 | 834379 | AC011638 | 650 | 1-446 |
| HEGAU15 | 87 | 834379 | AC011638 | 651 | 1-363 |
| HFCEI04 | 88 | 692438 | AC068996 | 652 | 1-865 |
| HFCEI04 | 88 | 692438 | AC068303 | 653 | 1-865 |
| HFEAY59 | 89 | 658685 | AC005919 | 654 | 1-490 |
| | | | | | 976-1063 |
| | | | | | 1264-1351 |
| | | | | | 1663-1956 |
| | | | | | 2076-2238 |
| | | | | | 2674-2837 |
| | | | | | 2910-3034 |
| | | | | | 4517-4686 |
| | | | | | 4804-5021 |
| | | | | | 5234-5282 |
| | | | | | 5397-5729 |
| | | | | | 7103-7442 |
| HFEAY59 | 89 | 658685 | AC005919 | 655 | 1-155 |
| HFIJA68 | 91 | 847074 | AC010550 | 656 | 1-127 |
| HFKFX64 | 93 | 566835 | AP001203 | 657 | 1-870 |
| HFKFX64 | 93 | 566835 | AC025291 | 658 | 1-868 |
| HFKFX64 | 93 | 566835 | AC010798 | 659 | 1-868 |
| HFKFX64 | 93 | 566835 | AP001203 | 660 | 1-750 |
| HFKFX64 | 93 | 566835 | AC025291 | 661 | 1-750 |
| HFKFX64 | 93 | 566835 | AC010798 | 662 | 1-750 |
| HFTAS49 | 95 | 847386 | AC025405 | 663 | 1-89 |
| | | | | | 1179-1585 |
| | | | | | 1793-1888 |
| | | | | | 2057-2469 |
| | | | | | 2682-3084 |
| | | | | | 3387-4038 |
| | | | | | 4507-6765 |
| | | | | | 6791-13862 |
| HFTAS49 | 95 | 847386 | AL354740 | 664 | 1-47 |
| | | | | | 245-499 |
| | | | | | 2148-2236 |
| | | | | | 3326-3732 |
| | | | | | 3940-4035 |
| | | | | | 4204-4616 |
| | | | | | 4829-5231 |
| | | | | | 5536-6187 |
| | | | | | 6656-8914 |
| | | | | | 8941-13186 |
| HFTAS49 | 95 | 847386 | AL354740 | 665 | 1-187 |
| HFVHW43 | 96 | 570948 | AL132795 | 666 | 1-253 |
| | | | | | 1142-1455 |
| | | | | | 1576-2150 |
| | | | | | 2529-2966 |
| | | | | | 4374-4471 |
| | | | | | 4991-5361 |
| | | | | | 6514-7738 |
| | | | | | 7936-8053 |
| | | | | | 9858-9979 |
| | | | | | 11930-12101 |
| | | | | | 12401-12525 |
| | | | | | 12531-12712 |
| | | | | | 16593-16786 |
| | | | | | 17053-17214 |
| | | | | | 18919-19396 |
| | | | | | 21174-21327 |
| | | | | | 21724-22296 |
| | | | | | 22515-23071 |
| HFVHW43 | 96 | 570948 | AL132795 | 667 | 1-6181 |
| HFVHW43 | 96 | 570948 | AL132795 | 668 | 1-287 |
| | | | | | 622-861 |
| HGBER72 | 97 | 826710 | AL157935 | 669 | 1-1319 |
| | | | | | 2024-2316 |
| | | | | | 2937-2984 |
| | | | | | 3126-3281 |
| | | | | | 5595-5703 |
| | | | | | 5788-6574 |
| | | | | | 6667-6733 |
| | | | | | 6788-6880 |
| | | | | | 6962-7303 |
| | | | | | 8111-11869 |
| | | | | | 12019-12418 |
| | | | | | 12420-12679 |
| | | | | | 13140-13191 |
| HGBER72 | 97 | 826710 | AL157935 | 670 | 1-1316 |
| HGBER72 | 97 | 826710 | AL157935 | 671 | 1-309 |
| HGBHP91 | 98 | 693011 | AL356056 | 672 | 1-1048 |
| HGBHP91 | 98 | 693011 | AL136982 | 673 | 1-1048 |
| HGBHP91 | 98 | 693011 | AL356056 | 674 | 1-238 |
| HGBHP91 | 98 | 693011 | AL356056 | 675 | 1-135 |
| HGBHP91 | 98 | 693011 | AL136982 | 676 | 1-238 |
| HGBHP91 | 98 | 693011 | AL136982 | 677 | 1-136 |
| HGLBG15 | 99 | 701990 | AC005082 | 678 | 1-252 |
| | | | | | 2150-2418 |
| | | | | | 2461-2695 |
| | | | | | 2700-3101 |
| | | | | | 3368-3776 |
| | | | | | 6066-6250 |
| | | | | | 7105-7363 |
| | | | | | 8329-9740 |
| HGLBG15 | 99 | 701990 | AC073992 | 679 | 1-259 |
| | | | | | 1225-2636 |
| HGLBG15 | 99 | 701990 | AC005082 | 680 | 1-546 |
| HGLBG15 | 99 | 701990 | AC073992 | 681 | 1-282 |
| HHEAK45 | 100 | 765278 | AL035690 | 682 | 1-2148 |
| | | | | | 4277-4419 |
| | | | | | 5252-5365 |
| | | | | | 5452-6322 |
| | | | | | 6863-7710 |
| HHEAK45 | 100 | 765278 | AC010388 | 683 | 1-2149 |
| HHEAK45 | 100 | 765278 | AL035690 | 684 | 1-732 |
| HHEAK45 | 100 | 765278 | AL035690 | 685 | 1-86 |
| | | | | | 175-566 |
| HHFEB79 | 102 | 1300768 | AC022305 | 686 | 1-686 |
| HHFEB79 | 102 | 1300768 | AL022167 | 687 | 1-1796 |
| HHFEB79 | 102 | 1300768 | AL049186 | 688 | 1-912 |
| HHFEB79 | 102 | 1300768 | AC068470 | 689 | 1-706 |
| HHFEB79 | 102 | 1300768 | AC018903 | 690 | 1-631 |
| HHFEB79 | 102 | 1300768 | AL049186 | 691 | 1-87 |
| HHFEC39 | 103 | 609873 | AL022726 | 692 | 1-819 |
| | | | | | 1137-4813 |
| HHFEC39 | 103 | 609873 | AL022726 | 693 | 1-509 |
| HHFFS40 | 104 | 824059 | AC022423 | 694 | 1-2017 |
| HHFFS40 | 104 | 824059 | AC025178 | 695 | 1-2017 |
| HHFFS40 | 104 | 824059 | AC022444 | 696 | 1-2017 |
| HHPFU28 | 107 | 824573 | AC069200 | 697 | 1-2595 |
| HHPFU28 | 107 | 824573 | AC069200 | 698 | 1-3998 |
| HHPFU28 | 107 | 824573 | AC069200 | 699 | 1-777 |
| HHSBI06 | 108 | 639097 | AF285442 | 700 | 1-1170 |
| | | | | | 1250-1439 |
| | | | | | 1565-1850 |
| | | | | | 2214-2632 |
| HHSBI06 | 108 | 639097 | AF271897 | 701 | 1-1174 |
| | | | | | 1253-1444 |
| | | | | | 1568-1853 |
| | | | | | 2217-2659 |
| | | | | | 4394-4876 |
| | | | | | 5269-6156 |
| | | | | | 7228-8366 |
| | | | | | 8574-8852 |
| HHSBI06 | 108 | 639097 | AC025857 | 702 | 1-1172 |
| | | | | | 1254-1442 |
| | | | | | 1566-1851 |
| | | | | | 2215-2618 |
| | | | | | 4423-4905 |
| | | | | | 5298-6179 |
| | | | | | 7253-8391 |
| | | | | | 8599-8877 |
| HHSBI06 | 108 | 639097 | AF285442 | 703 | 1-483 |
| HHSBI06 | 108 | 639097 | AF285442 | 704 | 1-323 |
| | | | | | 420-676 |
| | | | | | 774-935 |
| | | | | | 1372-1637 |
| HHSBI06 | 108 | 639097 | AF271897 | 705 | 1-522 |
| HHSBI06 | 108 | 639097 | AF271897 | 706 | 1-323 |
| | | | | | 420-676 |
| | | | | | 774-935 |
| | | | | | 1372-1637 |
| HHSBI06 | 108 | 639097 | AC025857 | 707 | 1-522 |
| HHSBI06 | 108 | 639097 | AC025857 | 708 | 1-323 |
| | | | | | 420-676 |
| | | | | | 774-935 |
| | | | | | 1372-1637 |
| HHSBI65 | 109 | 801910 | AF205589 | 709 | 1-1703 |
| | | | | | 1798-2217 |
| | | | | | 2302-3089 |
| HHSBI65 | 109 | 801910 | AF205589 | 710 | 1-531 |
| | | | | | 571-1759 |
| | | | | | 1862-2104 |
| | | | | | 2219-2722 |
| HISAT67 | 110 | 843549 | AC013403 | 711 | 1-753 |
| | | | | | 852-1545 |
| | | | | | 1734-1816 |
| | | | | | 1930-2061 |
| | | | | | 2259-2428 |
| | | | | | 2573-2648 |
| | | | | | 2685-2987 |
| | | | | | 3135-4126 |
| | | | | | 4242-4543 |
| | | | | | 4732-4905 |
| | | | | | 5033-5145 |
| | | | | | 5298-5341 |
| | | | | | 5530-5715 |
| | | | | | 6059-6126 |
| HISAT67 | 110 | 843549 | AC013403 | 712 | 1-102 |
| HISBA38 | 111 | 561711 | AL137020 | 713 | 1-1169 |
| HISBA38 | 111 | 561711 | AL359254 | 714 | 1-1169 |
| HISBA38 | 111 | 561711 | AL137020 | 715 | 1-702 |
| HISBA38 | 111 | 561711 | AL359254 | 716 | 1-702 |
| HJPCH08 | 114 | 840365 | AC004826 | 717 | 1-71 |
| | | | | | 475-867 |
| | | | | | 2289-2390 |
| | | | | | 2475-2596 |
| | | | | | 3191-3333 |
| | | | | | 3458-3644 |
| | | | | | 3729-3859 |
| | | | | | 4038-4233 |
| | | | | | 4338-4451 |
| | | | | | 4558-4626 |
| | | | | | 4832-4977 |
| | | | | | 5108-5272 |
| | | | | | 5380-5622 |
| | | | | | 5698-5816 |
| | | | | | 5965-6067 |
| | | | | | 6380-6580 |
| | | | | | 6829-6920 |
| | | | | | 7162-7299 |
| | | | | | 7943-10018 |
| | | | | | 10503-10623 |
| | | | | | 10699-10776 |
| | | | | | 10917-11336 |
| | | | | | 12343-12406 |
| | | | | | 12731-13275 |
| HJPCH08 | 114 | 840365 | AC004826 | 718 | 1-406 |
| | | | | | 862-1119 |
| | | | | | 1423-1689 |
| | | | | | 2886-2989 |
| | | | | | 5361-5431 |
| | | | | | 5969-6059 |
| | | | | | 6874-7181 |
| | | | | | 9823-9980 |
| | | | | | 10928-11194 |
| | | | | | 12667-12838 |
| | | | | | 17063-18165 |
| | | | | | 18168-18649 |
| | | | | | 18785-19579 |
| | | | | | 19733-19780 |
| | | | | | 20247-20355 |
| | | | | | 21063-21415 |
| | | | | | 21546-22630 |
| | | | | | 23320-23541 |
| | | | | | 24276-24323 |
| | | | | | 24510-24602 |
| | | | | | 24903-25357 |
| | | | | | 26015-27115 |
| | | | | | 27309-28272 |
| | | | | | 28601-28879 |
| | | | | | 29413-29552 |
| | | | | | 30539-30602 |
| | | | | | 30728-31110 |
| | | | | | 31231-31353 |
| | | | | | 32257-32325 |
| | | | | | 33895-34173 |
| | | | | | 35081-35392 |
| | | | | | 37763-37860 |
| | | | | | 38789-38822 |
| | | | | | 38920-39119 |
| HJPCH08 | 114 | 840365 | AC004826 | 719 | 1-424 |
| | | | | | 2065-2241 |
| HKIXC44 | 116 | 716213 | AC016240 | 720 | 1-195 |
| | | | | | 476-552 |
| | | | | | 679-763 |
| | | | | | 1040-1119 |
| | | | | | 1998-3764 |
| HKIXC44 | 116 | 716213 | AF261720 | 721 | 1-195 |
| | | | | | 475-551 |
| | | | | | 678-762 |
| | | | | | 1039-1118 |
| | | | | | 1998-3764 |
| HKIXC44 | 116 | 716213 | AC016240 | 722 | 1-423 |
| HKIXC44 | 116 | 716213 | AF261720 | 723 | 1-423 |
| HKIXC44 | 116 | 716213 | AF261720 | 724 | 1-206 |
| HKTAB41 | 117 | 695732 | AC006451 | 725 | 1-737 |
| HLDBG17 | 118 | 855953 | AL161798 | 726 | 1-1403 |
| HLHAP05 | 120 | 638476 | AC009097 | 727 | 1-101 |
| HLHBS54 | 121 | 837503 | AL020996 | 728 | 1-122 |
| | | | | | 973-1079 |
| | | | | | 3003-3636 |
| | | | | | 3733-4238 |
| | | | | | 5772-5955 |
| | | | | | 7540-7752 |
| | | | | | 7989-8112 |
| | | | | | 8643-8783 |
| | | | | | 10417-10491 |
| | | | | | 10647-10842 |
| | | | | | 11649-11762 |
| | | | | | 11922-12346 |
| | | | | | 12667-12760 |
| | | | | | 12832-12954 |
| | | | | | 13035-13141 |
| | | | | | 13358-13818 |
| | | | | | 14508-17386 |
| | | | | | 18605-18733 |
| HLHBS54 | 121 | 837503 | AL020996 | 729 | 1-73 |
| | | | | | 275-708 |
| | | | | | 893-1047 |
| | | | | | 1096-1399 |
| | | | | | 1619-2003 |
| | | | | | 2288-2518 |
| | | | | | 2565-3369 |
| | | | | | 3500-3687 |
| | | | | | 3690-3794 |
| | | | | | 4245-4515 |
| | | | | | 4967-5882 |
| | | | | | 6346-6458 |
| | | | | | 6648-6872 |
| | | | | | 7729-8095 |
| | | | | | 9551-9877 |
| | | | | | 10983-11246 |
| | | | | | 11967-12988 |
| HLHCS23 | 122 | 560663 | AL356385 | 730 | 1-1419 |
| HLHCS23 | 122 | 560663 | AC016501 | 731 | 1-1419 |
| HLHCS23 | 122 | 560663 | AL356385 | 732 | 1-560 |
| HLHCS23 | 122 | 560663 | AC016501 | 733 | 1-560 |
| HLYAR30 | 125 | 781249 | AC018391 | 734 | 1-3570 |
| | | | | | 3779-3904 |
| | | | | | 4646-5979 |
| | | | | | 6339-6701 |
| | | | | | 6710-8473 |
| HLYAR30 | 125 | 781249 | AC018391 | 735 | 1-438 |
| HLYAR30 | 125 | 781249 | AC018391 | 736 | 1-1402 |
| | | | | | 1586-1871 |
| | | | | | 2685-2797 |
| | | | | | 3088-3503 |
| | | | | | 4900-5170 |
| | | | | | 5789-5882 |
| | | | | | 6089-6195 |
| HLYDF73 | 126 | 566869 | AL122127 | 737 | 1-583 |
| HMDAB29 | 129 | 584789 | AC027264 | 738 | 1-147 |
| HMDAB29 | 129 | 584789 | AC068682 | 739 | 1-153 |
| HMDAB29 | 129 | 584789 | AL354887 | 740 | 1-1433 |
| HMDAB29 | 129 | 584789 | AL157408 | 741 | 1-1434 |
| HMDAB29 | 129 | 584789 | AL354887 | 742 | 1-577 |
| HMDAB29 | 129 | 584789 | AL354887 | 743 | 1-196 |
| HMDAB29 | 129 | 584789 | AL157408 | 744 | 1-577 |
| HMDAB29 | 129 | 584789 | AL157408 | 745 | 1-196 |
| HMDAD44 | 130 | 566854 | AC012370 | 746 | 1-145 |
| | | | | | 2813-4454 |
| HMDAD44 | 130 | 566854 | AC034121 | 747 | 1-1569 |
| HMDAD44 | 130 | 566854 | AC012370 | 748 | 1-787 |
| HMDAD44 | 130 | 566854 | AC012370 | 749 | 1-622 |
| HMEDE24 | 131 | 837027 | AC011078 | 750 | 1-297 |
| | | | | | 359-416 |
| | | | | | 3247-3653 |
| | | | | | 6083-6236 |
| | | | | | 9753-10036 |
| | | | | | 11128-11233 |
| | | | | | 12148-12514 |
| | | | | | 12635-13141 |
| | | | | | 15604-16463 |
| | | | | | 19071-19190 |
| | | | | | 19476-20232 |
| | | | | | 20321-20638 |
| | | | | | 21200-21594 |
| | | | | | 21959-22219 |
| | | | | | 23120-23362 |
| | | | | | 23467-24143 |
| | | | | | 24766-24853 |
| | | | | | 25725-26143 |
| | | | | | 26310-26455 |
| | | | | | 27545-30619 |
| | | | | | 30708-31169 |
| HMIBD93 | 133 | 634227 | AC010913 | 751 | 1-3640 |
| HMIBD93 | 133 | 634227 | AC010913 | 752 | 1-495 |
| | | | | | 593-668 |
| | | | | | 670-1055 |
| | | | | | 1578-1799 |
| | | | | | 2445-2717 |
| | | | | | 3103-3203 |
| | | | | | 3284-3751 |
| | | | | | 3841-4032 |
| | | | | | 5093-5261 |
| | | | | | 5443-5872 |
| | | | | | 5922-6838 |
| | | | | | 7633-8170 |
| | | | | | 8304-8491 |
| | | | | | 8968-9029 |
| | | | | | 9888-10020 |
| | | | | | 10479-10733 |
| | | | | | 10807-10958 |
| | | | | | 11020-11132 |
| | | | | | 12080-12373 |
| | | | | | 12464-12585 |
| | | | | | 13223-13381 |
| | | | | | 17379-17471 |
| | | | | | 18572-19447 |
| HMIBF07 | 134 | 603528 | AC022833 | 753 | 1-1721 |
| HMQAI38 | 136 | 589964 | AC000403 | 754 | 1-32 |
| | | | | | 225-465 |
| | | | | | 3716-3779 |
| | | | | | 3917-4243 |
| | | | | | 5065-5157 |
| | | | | | 6778-6987 |
| | | | | | 7684-7829 |
| | | | | | 8473-10115 |
| HMQAI38 | 136 | 589964 | AL136440 | 755 | 1-64 |
| | | | | | 202-528 |
| | | | | | 1350-1439 |
| | | | | | 3073-3276 |
| | | | | | 3973-4099 |
| | | | | | 4762-6404 |
| HMWBL03 | 140 | 822861 | AC012052 | 756 | 1-130 |
| | | | | | 548-784 |
| | | | | | 4520-4887 |
| | | | | | 5112-6285 |
| | | | | | 6741-6888 |
| | | | | | 7577-7727 |
| | | | | | 7951-8582 |
| | | | | | 8927-10292 |
| HMWBL03 | 140 | 822861 | AC011667 | 757 | 1-138 |
| | | | | | 1281-1681 |
| | | | | | 2270-2632 |
| | | | | | 3070-3372 |
| | | | | | 3865-3990 |
| | | | | | 4407-4644 |
| | | | | | 8378-8745 |
| | | | | | 8970-10143 |
| | | | | | 10599-10746 |
| | | | | | 11435-11585 |
| | | | | | 11809-12440 |
| | | | | | 12785-14150 |
| HMWBL03 | 140 | 822861 | AC012052 | 758 | 1-303 |
| HNECW49 | 142 | 639117 | AC011864 | 759 | 1-522 |
| HNECW49 | 142 | 639117 | AC011864 | 760 | 1-607 |
| HNECW49 | 142 | 639117 | AC011864 | 761 | 1-741 |
| HNFGR08 | 144 | 825417 | AC006369 | 762 | 1-1423 |
| HNGAK51 | 145 | 603910 | AC013443 | 763 | 1-913 |
| HNGAK51 | 145 | 603910 | AC013443 | 764 | 1-406 |
| HNGAK51 | 145 | 603910 | AC013443 | 765 | 1-297 |
| HNGDX18 | 146 | 1145071 | AL391069 | 766 | 1-1403 |
| HNGDX18 | 146 | 1145071 | AL158846 | 767 | 1-193 |
| | | | | | 208-577 |
| | | | | | 894-1167 |
| | | | | | 1401-1629 |
| | | | | | 1918-3320 |
| | | | | | 4039-4082 |
| | | | | | 9400-10337 |
| HNGDX18 | 146 | 1145071 | AL391069 | 768 | 1-274 |
| HNGDX18 | 146 | 1145071 | AL158846 | 769 | 1-117 |
| HNGFR54 | 147 | 695748 | AC007316 | 770 | 1-456 |
| HNGFR54 | 147 | 695748 | AC007316 | 771 | 1-260 |
| HNGHK37 | 149 | 609889 | AC023177 | 772 | 1-1532 |
| HNGJB41 | 151 | 852178 | AC004542 | 773 | 1-108 |
| | | | | | 192-278 |
| | | | | | 349-470 |
| | | | | | 678-804 |
| | | | | | 2945-4433 |
| | | | | | 4687-4749 |
| | | | | | 5583-5951 |
| | | | | | 6304-6501 |
| | | | | | 7398-7867 |
| | | | | | 10583-10956 |
| | | | | | 11008-11440 |
| | | | | | 11603-11875 |
| | | | | | 12070-12473 |
| HNGJB41 | 151 | 852178 | AC004542 | 774 | 1-976 |
| HNGKT41 | 152 | 836061 | AC008581 | 775 | 1-1099 |
| HNGNO53 | 154 | 836063 | AC023387 | 776 | 1-869 |
| HNGNO53 | 154 | 836063 | AL355500 | 777 | 1-851 |
| HNGPJ25 | 155 | 834942 | AP002781 | 778 | 1-1472 |
| HNHCT47 | 156 | 634691 | AC027793 | 779 | 1-147 |
| HNHCT47 | 156 | 634691 | AC022107 | 780 | 1-111 |
| HNHCT47 | 156 | 634691 | AP001271 | 781 | 1-610 |
| HNHCT47 | 156 | 634691 | AP000487 | 782 | 1-610 |
| HNHCT47 | 156 | 634691 | AP000405 | 783 | 1-612 |
| HNHCT47 | 156 | 634691 | AP001271 | 784 | 1-375 |
| HNHCT47 | 156 | 634691 | AP000487 | 785 | 1-36 |
| | | | | | 434-873 |
| HNHCT47 | 156 | 634691 | AP000405 | 786 | 1-375 |
| HNHKV56 | 158 | 800877 | AC009396 | 787 | 1-1605 |
| HODBB70 | 160 | 520196 | AC006322 | 788 | 1-561 |
| HODBB70 | 160 | 520196 | AC073110 | 789 | 1-561 |
| HODBB70 | 160 | 520196 | AC025553 | 790 | 1-561 |
| HODBB70 | 160 | 520196 | AC006322 | 791 | 1-1741 |
| HODBB70 | 160 | 520196 | AC006322 | 792 | 1-354 |
| HODBB70 | 160 | 520196 | AC073110 | 793 | 1-1741 |
| HODBB70 | 160 | 520196 | AC073110 | 794 | 1-354 |
| HORBS82 | 165 | 638293 | AL034419 | 795 | 1-1798 |
| HORBS82 | 165 | 638293 | AL034419 | 796 | 1-1186 |
| HOUDE92 | 169 | 580866 | AC005865 | 797 | 1-173 |
| | | | | | 553-629 |
| | | | | | 1941-2042 |
| | | | | | 2757-2891 |
| | | | | | 3294-3378 |
| | | | | | 4606-5498 |
| | | | | | 5550-8125 |
| HPCAL26 | 170 | 762822 | AP000654 | 798 | 1-4150 |
| HPEBA84 | 172 | 753957 | AL357372 | 799 | 1-1238 |
| HPEBA84 | 172 | 753957 | AL161799 | 800 | 1-1112 |
| HPEBA84 | 172 | 753957 | AL357372 | 801 | 1-294 |
| HPEBA84 | 172 | 753957 | AL357372 | 802 | 1-140 |
| HPEBA84 | 172 | 753957 | AL161799 | 803 | 1-294 |
| HPFCI36 | 173 | 855966 | AL161652 | 804 | 1-174 |
| | | | | | 313-4710 |
| HPFDI37 | 174 | 862056 | AC000090 | 805 | 1-29 |
| | | | | | 566-712 |
| | | | | | 1355-1425 |
| | | | | | 3075-3241 |
| | | | | | 3725-3806 |
| | | | | | 4295-4357 |
| | | | | | 5382-5571 |
| | | | | | 6510-7016 |
| | | | | | 7981-8321 |
| HPJCW58 | 176 | 612866 | AC024735 | 806 | 1-1160 |
| HPMCV30 | 177 | 612870 | AC006512 | 807 | 1-658 |
| | | | | | 3090-3543 |
| | | | | | 4479-5105 |
| | | | | | 5885-6846 |
| | | | | | 7103-9707 |
| | | | | | 9914-10293 |
| | | | | | 11523-12034 |
| | | | | | 12067-12181 |
| | | | | | 13769-14031 |
| | | | | | 14199-14291 |
| | | | | | 14584-14790 |
| | | | | | 15123-15154 |
| | | | | | 17039-17482 |
| | | | | | 17539-17987 |
| | | | | | 18697-19052 |
| | | | | | 19112-19380 |
| | | | | | 20023-20268 |
| | | | | | 21158-21598 |
| | | | | | 21817-22221 |
| | | | | | 23565-23665 |
| | | | | | 23906-24076 |
| | | | | | 24981-25506 |
| | | | | | 25510-25861 |
| | | | | | 25981-26645 |
| | | | | | 26661-27449 |
| | | | | | 27717-27812 |
| | | | | | 27991-28024 |
| | | | | | 28437-28888 |
| | | | | | 29651-33442 |
| | | | | | 33621-34089 |
| | | | | | 34245-34808 |
| | | | | | 34819-35284 |
| | | | | | 35854-35960 |
| | | | | | 38525-38771 |
| HPMCV30 | 177 | 612870 | AC005517 | 808 | 1-945 |
| HPMCV30 | 177 | 612870 | AC006512 | 809 | 1-315 |
| | | | | | 439-531 |
| | | | | | 707-1080 |
| | | | | | 1144-1227 |
| | | | | | 1491-1845 |
| | | | | | 2113-2321 |
| | | | | | 2700-3556 |
| | | | | | 3818-4307 |
| | | | | | 4336-4813 |
| | | | | | 4958-5775 |
| HPMCV30 | 177 | 612870 | AC006512 | 810 | 1-738 |
| HPMCV30 | 177 | 612870 | AC005517 | 811 | 1-352 |
| HPMCV30 | 177 | 612870 | AC005517 | 812 | 1-177 |
| HPRCM72 | 180 | 813512 | AC015867 | 813 | 1-291 |
| | | | | | 634-3334 |
| HPRCM72 | 180 | 813512 | AC010189 | 814 | 1-3040 |
| | | | | | 3384-6081 |
| HPRCM72 | 180 | 813512 | AC015867 | 815 | 1-305 |
| HPRCM72 | 180 | 813512 | AC010189 | 816 | 1-740 |
| HPRCM72 | 180 | 813512 | AC010189 | 817 | 1-305 |
| HPTRI42 | 182 | 655362 | AC004229 | 818 | 1-98 |
| | | | | | 1759-1841 |
| | | | | | 2062-2504 |
| | | | | | 2787-2818 |
| | | | | | 2897-2984 |
| | | | | | 3079-3168 |
| | | | | | 3423-3593 |
| | | | | | 3666-3786 |
| | | | | | 4178-4301 |
| | | | | | 4459-4598 |
| | | | | | 5581-5689 |
| | | | | | 5784-5890 |
| | | | | | 6035-6068 |
| | | | | | 6179-6267 |
| | | | | | 6672-7873 |
| HPTRI42 | 182 | 655362 | AC019071 | 819 | 1-136 |
| | | | | | 1023-1365 |
| | | | | | 2131-2213 |
| | | | | | 2434-2875 |
| | | | | | 3158-3189 |
| | | | | | 3268-3355 |
| | | | | | 3450-3539 |
| | | | | | 3794-3964 |
| | | | | | 4037-4157 |
| | | | | | 4549-4672 |
| | | | | | 4830-4969 |
| | | | | | 5952-6060 |
| | | | | | 6155-6261 |
| | | | | | 6406-6439 |
| | | | | | 6549-6637 |
| | | | | | 7041-8091 |
| HPTRI42 | 182 | 655362 | AC004229 | 820 | 1-2392 |
| | | | | | 2959-3254 |
| HPTRQ52 | 184 | 655363 | AC021462 | 821 | 1-763 |
| | | | | | 771-1244 |
| HPTRQ52 | 184 | 655363 | AC068629 | 822 | 1-916 |
| HPTRQ52 | 184 | 655363 | AL355514 | 823 | 1-265 |
| | | | | | 397-1368 |
| | | | | | 1377-1655 |
| | | | | | 2338-3396 |
| HPTRQ52 | 184 | 655363 | AC021462 | 824 | 1-187 |
| HPTRQ52 | 184 | 655363 | AC021462 | 825 | 1-975 |
| HPWBA29 | 186 | 561956 | AL160011 | 826 | 1-318 |
| HPWBA29 | 186 | 561956 | AL160011 | 827 | 1-568 |
| | | | | | 736-1212 |
| HRDAI17 | 187 | 560720 | AL139385 | 828 | 1-99 |
| HRDAI17 | 187 | 560720 | AC008439 | 829 | 1-125 |
| HRDAI17 | 187 | 560720 | AC034240 | 830 | 1-141 |
| HRDAI17 | 187 | 560720 | AC015884 | 831 | 1-207 |
| HRDAI17 | 187 | 560720 | AC008690 | 832 | 1-164 |
| HRDAI17 | 187 | 560720 | AC022032 | 833 | 1-146 |
| HRDAI17 | 187 | 560720 | AC027802 | 834 | 1-117 |
| HRDAI17 | 187 | 560720 | AC060763 | 835 | 1-129 |
| HRDAI17 | 187 | 560720 | AC073842 | 836 | 1-165 |
| HRDAI17 | 187 | 560720 | AC023018 | 837 | 1-145 |
| HRDAI17 | 187 | 560720 | AC021163 | 838 | 1-97 |
| | | | | | 402-2108 |
| | | | | | 2292-2943 |
| | | | | | 2997-3408 |
| | | | | | 3423-3481 |
| | | | | | 3551-4145 |
| | | | | | 4557-5026 |
| | | | | | 5029-6260 |
| | | | | | 6276-6930 |
| | | | | | 6936-7000 |
| HRDAI17 | 187 | 560720 | AC068013 | 839 | 1-125 |
| HRDAI17 | 187 | 560720 | AC023398 | 840 | 1-134 |
| HRDAI17 | 187 | 560720 | AC015884 | 841 | 1-131 |
| HRDDQ39 | 188 | 840405 | AC009152 | 842 | 1-755 |
| HSAVW42 | 191 | 637660 | AC021117 | 843 | 1-865 |
| HSAVW42 | 191 | 637660 | AC021117 | 844 | 1-336 |
| | | | | | 397-651 |
| HSAVW42 | 191 | 637660 | AC021117 | 845 | 1-185 |
| HSAWZ40 | 193 | 634000 | AC024249 | 846 | 1-1532 |
| HSAWZ40 | 193 | 634000 | AC024249 | 847 | 1-409 |
| HSAWZ40 | 193 | 634000 | AC024249 | 848 | 1-319 |
| HSDBI90 | 195 | 853376 | AC010285 | 849 | 1-731 |
| | | | | | 1367-3915 |
| | | | | | 4065-5062 |
| HSDBI90 | 195 | 853376 | AC008393 | 850 | 1-730 |
| | | | | | 961-1358 |
| | | | | | 1366-3914 |
| | | | | | 4064-5061 |
| HSDBI90 | 195 | 853376 | AC010313 | 851 | 1-731 |
| | | | | | 962-1359 |
| | | | | | 1367-3916 |
| | | | | | 4066-5063 |
| HSDBI90 | 195 | 853376 | AC010285 | 852 | 1-133 |
| HSDBI90 | 195 | 853376 | AC010285 | 853 | 1-282 |
| HSDBI90 | 195 | 853376 | AC008393 | 854 | 1-133 |
| HSDBI90 | 195 | 853376 | AC010313 | 855 | 1-246 |
| HSDBI90 | 195 | 853376 | AC010313 | 856 | 1-115 |
| HSHAX04 | 196 | 812178 | AL049824 | 857 | 1-110 |
| | | | | | 1211-1257 |
| | | | | | 1740-1878 |
| | | | | | 3062-3144 |
| | | | | | 3668-3772 |
| | | | | | 4775-5175 |
| | | | | | 5220-5345 |
| | | | | | 7001-7384 |
| | | | | | 8361-8657 |
| | | | | | 8747-8937 |
| | | | | | 9876-9980 |
| | | | | | 12753-12901 |
| | | | | | 13131-13891 |
| | | | | | 14272-14726 |
| | | | | | 14851-16619 |
| | | | | | 16683-17910 |
| | | | | | 18078-18367 |
| HSHAX04 | 196 | 812178 | AL354888 | 858 | 1-47 |
| | | | | | 1277-1376 |
| | | | | | 2477-2523 |
| | | | | | 3006-3144 |
| | | | | | 4326-4408 |
| | | | | | 4932-5036 |
| | | | | | 6039-6439 |
| | | | | | 6484-6609 |
| | | | | | 8265-8648 |
| | | | | | 9625-9921 |
| | | | | | 10011-10216 |
| | | | | | 11141-11245 |
| | | | | | 14019-14167 |
| | | | | | 14397-15157 |
| | | | | | 15538-15992 |
| | | | | | 16117-17885 |
| | | | | | 17949-19176 |
| | | | | | 19344-19633 |
| HSHAX04 | 196 | 812178 | AL354888 | 859 | 1-314 |
| HSHAX04 | 196 | 812178 | AL354888 | 860 | 1-599 |
| HSKDR27 | 197 | 580874 | AC008742 | 861 | 1-50 |
| | | | | | 1016-1321 |
| | | | | | 1979-2220 |
| | | | | | 2313-3310 |
| HSKDR27 | 197 | 580874 | AC008742 | 862 | 1-495 |
| HSRFD18 | 199 | 840771 | AL096819 | 863 | 1-3975 |
| HSRFD18 | 199 | 840771 | AL096819 | 864 | 1-304 |
| HSSEF77 | 200 | 658725 | AC005041 | 865 | 1-68 |
| | | | | | 87-493 |
| | | | | | 711-838 |
| | | | | | 997-1167 |
| | | | | | 2227-2960 |
| | | | | | 3326-4641 |
| | | | | | 4768-5786 |
| HSSEF77 | 200 | 658725 | AC005041 | 866 | 1-2920 |
| | | | | | 3439-3667 |
| | | | | | 3839-4332 |
| HSSEF77 | 200 | 658725 | AC005041 | 867 | 1-143 |
| HSSGJ58 | 201 | 747714 | AL355491 | 868 | 1-1936 |
| HSSGJ58 | 201 | 747714 | AL356112 | 869 | 1-1936 |
| HSSGJ58 | 201 | 747714 | AL354665 | 870 | 1-1932 |
| HSVBD37 | 202 | 637110 | AL359554 | 871 | 1-125 |
| | | | | | 340-404 |
| | | | | | 1268-1408 |
| | | | | | 1655-1862 |
| | | | | | 2328-2417 |
| | | | | | 4005-4354 |
| | | | | | 5438-6584 |
| HSVBD37 | 202 | 637110 | AL354940 | 872 | 1-145 |
| | | | | | 155-344 |
| | | | | | 1428-2582 |
| HSVBD37 | 202 | 637110 | AL157708 | 873 | 1-145 |
| | | | | | 155-344 |
| | | | | | 1428-2579 |
| HSVBD37 | 202 | 637110 | AL359554 | 874 | 1-1191 |
| | | | | | 1690-2151 |
| | | | | | 2730-2963 |
| | | | | | 3372-3513 |
| | | | | | 3977-4114 |
| HSVBD37 | 202 | 637110 | AL359554 | 875 | 1-240 |
| HSVBD37 | 202 | 637110 | AL354940 | 876 | 1-1115 |
| HSVBD37 | 202 | 637110 | AL157708 | 877 | 1-1115 |
| HSYBI06 | 203 | 740766 | AL049795 | 878 | 1-135 |
| | | | | | 2267-2358 |
| | | | | | 2759-2859 |
| | | | | | 3659-3775 |
| | | | | | 4814-4946 |
| | | | | | 5270-5730 |
| | | | | | 6026-6474 |
| | | | | | 6782-7341 |
| | | | | | 7359-7475 |
| | | | | | 7777-7939 |
| | | | | | 8137-8247 |
| | | | | | 8262-8548 |
| | | | | | 8649-8729 |
| | | | | | 9467-10551 |
| | | | | | 10640-10701 |
| | | | | | 11022-11356 |
| | | | | | 11406-11450 |
| | | | | | 11517-11645 |
| | | | | | 12002-12057 |
| | | | | | 12580-12713 |
| | | | | | 14863-15041 |
| | | | | | 15151-15479 |
| | | | | | 16120-21982 |
| HSYBI06 | 203 | 740766 | AL049795 | 879 | 1-98 |
| HSYBI06 | 203 | 740766 | AL049795 | 880 | 1-110 |
| HT4FV41 | 204 | 853400 | AC011547 | 881 | 1-170 |
| | | | | | 793-936 |
| | | | | | 2771-3041 |
| | | | | | 3691-3788 |
| | | | | | 5141-5252 |
| | | | | | 5755-6030 |
| | | | | | 6325-6407 |
| | | | | | 7214-7551 |
| | | | | | 8653-8940 |
| | | | | | 9033-9136 |
| | | | | | 9428-9907 |
| | | | | | 11266-11659 |
| | | | | | 12082-12263 |
| | | | | | 13451-13544 |
| | | | | | 13664-13699 |
| | | | | | 13769-13936 |
| | | | | | 14571-14761 |
| | | | | | 14897-14997 |
| | | | | | 15135-17127 |
| HT4FV41 | 204 | 853400 | AC005331 | 882 | 1-88 |
| | | | | | 224-324 |
| | | | | | 462-2454 |
| HT4FV41 | 204 | 853400 | AC023470 | 883 | 1-80 |
| | | | | | 204-242 |
| | | | | | 313-477 |
| | | | | | 1213-1300 |
| | | | | | 1436-1536 |
| | | | | | 1673-3658 |
| HT4FV41 | 204 | 853400 | AC005331 | 884 | 1-607 |
| HT4FV41 | 204 | 853400 | AC023470 | 885 | 1-606 |
| HTEDJ28 | 209 | 762845 | AC025974 | 886 | 1-2357 |
| HTEDJ28 | 209 | 762845 | AC013370 | 887 | 1-2357 |
| HTEHU59 | 210 | 840385 | AP001003 | 888 | 1-3207 |
| HTEHU59 | 210 | 840385 | AP001557 | 889 | 1-3206 |
| HTEHU59 | 210 | 840385 | AP001156 | 890 | 1-3207 |
| HTEHU59 | 210 | 840385 | AP001003 | 891 | 1-863 |
| HTEHU59 | 210 | 840385 | AP001003 | 892 | 1-1399 |
| | | | | | 1504-1948 |
| | | | | | 1956-2672 |
| | | | | | 2761-2905 |
| | | | | | 3007-3135 |
| | | | | | 3290-3445 |
| | | | | | 3537-3653 |
| | | | | | 3746-3913 |
| | | | | | 4010-4131 |
| | | | | | 4251-4428 |
| HTEHU59 | 210 | 840385 | AP001557 | 893 | 1-863 |
| HTEHU59 | 210 | 840385 | AP001557 | 894 | 1-1395 |
| | | | | | 1500-1944 |
| | | | | | 1952-2667 |
| | | | | | 2757-2900 |
| | | | | | 3002-3130 |
| | | | | | 3285-3439 |
| HTEHU59 | 210 | 840385 | AP001156 | 895 | 1-1396 |
| | | | | | 1502-1945 |
| | | | | | 1953-2668 |
| HTEHU59 | 210 | 840385 | AP001156 | 896 | 1-863 |
| HTEJD29 | 211 | 695798 | AL354733 | 897 | 1-1292 |
| HTEJD29 | 211 | 695798 | AC007943 | 898 | 1-1292 |
| HTEJD29 | 211 | 695798 | AL354733 | 899 | 1-184 |
| HTEJD29 | 211 | 695798 | AL354733 | 900 | 1-59 |
| | | | | | 1212-1284 |
| | | | | | 1905-1956 |
| | | | | | 2351-2840 |
| | | | | | 4126-5105 |
| | | | | | 5892-6298 |
| | | | | | 6726-7122 |
| | | | | | 7204-7713 |
| | | | | | 7747-7932 |
| HTHBZ06 | 216 | 832477 | AC068768 | 901 | 1-835 |
| HTLBT80 | 217 | 840045 | AL133227 | 902 | 1-51 |
| | | | | | 476-521 |
| | | | | | 842-1226 |
| | | | | | 1375-1490 |
| | | | | | 3745-4016 |
| | | | | | 4046-4229 |
| | | | | | 4430-4855 |
| | | | | | 5300-6053 |
| | | | | | 6598-6883 |
| | | | | | 7406-7446 |
| | | | | | 7461-8437 |
| | | | | | 8550-8681 |
| | | | | | 8888-8919 |
| | | | | | 8943-9353 |
| | | | | | 9458-9544 |
| | | | | | 9834-10607 |
| | | | | | 11550-11629 |
| | | | | | 12196-12374 |
| | | | | | 13532-14886 |
| HTLBT80 | 217 | 840045 | AL133227 | 903 | 1-32 |
| | | | | | 712-1071 |
| | | | | | 3453-3870 |
| | | | | | 4197-4326 |
| | | | | | 4639-4751 |
| | | | | | 5131-5202 |
| | | | | | 5588-5638 |
| | | | | | 7454-8108 |
| | | | | | 8670-8767 |
| | | | | | 9511-9692 |
| | | | | | 9754-10134 |
| | | | | | 11109-11226 |
| | | | | | 12456-12607 |
| | | | | | 15237-15316 |
| | | | | | 18143-18311 |
| | | | | | 18429-18478 |
| | | | | | 20682-20982 |
| | | | | | 20988-21295 |
| | | | | | 22686-23061 |
| | | | | | 23358-23495 |
| | | | | | 24076-24612 |
| | | | | | 25196-25334 |
| | | | | | 26760-26926 |
| | | | | | 27041-27152 |
| | | | | | 27271-27379 |
| | | | | | 27697-28289 |
| | | | | | 29024-29340 |
| | | | | | 29761-29840 |
| | | | | | 31168-32681 |
| HTLCX82 | 218 | 847091 | AC004471 | 904 | 1-478 |
| | | | | | 1424-1734 |
| | | | | | 1764-1994 |
| | | | | | 2027-2127 |
| | | | | | 2589-2825 |
| | | | | | 4635-4805 |
| | | | | | 4929-5050 |
| | | | | | 5134-5289 |
| | | | | | 5367-5501 |
| | | | | | 6339-6446 |
| | | | | | 6780-6902 |
| | | | | | 7225-7337 |
| | | | | | 9237-9728 |
| | | | | | 10180-10725 |
| | | | | | 11846-13361 |
| HTLCX82 | 218 | 847091 | AC004471 | 905 | 1-919 |
| HTLDU78 | 219 | 637702 | AC011444 | 906 | 1-1305 |
| HTLDU78 | 219 | 637702 | AC011444 | 907 | 1-285 |
| HTLDU78 | 219 | 637702 | AC011444 | 908 | 1-274 |
| HTLEV48 | 220 | 723799 | AL079300 | 909 | 1-833 |
| | | | | | 1783-2055 |
| | | | | | 2908-3362 |
| | | | | | 3583-4048 |
| HTLEV48 | 220 | 723799 | AL079300 | 910 | 1-163 |
| HTLFA13 | 221 | 535937 | AC022007 | 911 | 1-1127 |
| HTLFA13 | 221 | 535937 | AC021995 | 912 | 1-1115 |
| HTLFA13 | 221 | 535937 | AC007783 | 913 | 1-1144 |
| HTLFA13 | 221 | 535937 | AC022007 | 914 | 1-1729 |
| HTLFA13 | 221 | 535937 | AC022007 | 915 | 1-179 |
| | | | | | 184-696 |
| HTLFA13 | 221 | 535937 | AC021995 | 916 | 1-106 |
| | | | | | 132-190 |
| | | | | | 674-831 |
| | | | | | 1456-1588 |
| | | | | | 3423-4270 |
| | | | | | 4811-4933 |
| | | | | | 5118-5304 |
| HTLFA13 | 221 | 535937 | AC021995 | 917 | 1-179 |
| | | | | | 184-696 |
| | | | | | 894-945 |
| HTLFA13 | 221 | 535937 | AC007783 | 918 | 1-169 |
| | | | | | 180-258 |
| | | | | | 681-859 |
| | | | | | 864-1376 |
| | | | | | 3240-3503 |
| HTLFA13 | 221 | 535937 | AC007783 | 919 | 1-1729 |
| HTLGI89 | 222 | 835069 | AC048342 | 920 | 1-130 |
| HTLGI89 | 222 | 835069 | AC009453 | 921 | 1-143 |
| HTLGI89 | 222 | 835069 | AC022231 | 922 | 1-151 |
| HTLGI89 | 222 | 835069 | AC009524 | 923 | 1-151 |
| HTLGI89 | 222 | 835069 | AC048342 | 924 | 1-118 |
| HTOAM11 | 224 | 664508 | AC002369 | 925 | 1-586 |
| | | | | | 2559-2651 |
| | | | | | 3329-3426 |
| | | | | | 3756-5088 |
| HTOAM11 | 224 | 664508 | AP001486 | 926 | 1-1191 |
| HTOAM11 | 224 | 664508 | AP000875 | 927 | 1-1192 |
| HTOAM11 | 224 | 664508 | AC002369 | 928 | 1-228 |
| HTOAM11 | 224 | 664508 | AP001486 | 929 | 1-711 |
| HTOAM11 | 224 | 664508 | AP001486 | 930 | 1-374 |
| HTOAM11 | 224 | 664508 | AP000875 | 931 | 1-710 |
| HTODH83 | 225 | 580884 | AC012046 | 932 | 1-1972 |
| HTODH83 | 225 | 580884 | AC012046 | 933 | 1-105 |
| HTTEE41 | 230 | 840950 | AC018921 | 934 | 1-92 |
| | | | | | 318-578 |
| | | | | | 837-912 |
| | | | | | 1091-1249 |
| | | | | | 1321-1387 |
| | | | | | 1862-2192 |
| | | | | | 2485-2579 |
| | | | | | 2708-2831 |
| | | | | | 3685-4257 |
| | | | | | 4547-5127 |
| | | | | | 5811-6037 |
| | | | | | 6562-7076 |
| | | | | | 7541-7678 |
| | | | | | 8069-8191 |
| | | | | | 10100-10207 |
| | | | | | 11102-11688 |
| | | | | | 11721-11847 |
| | | | | | 12201-12335 |
| | | | | | 12532-12641 |
| | | | | | 12888-12991 |
| | | | | | 13027-13546 |
| | | | | | 13637-16146 |
| HTTEE41 | 230 | 840950 | AC018921 | 935 | 1-100 |
| HTWEH94 | 231 | 561680 | AC004858 | 936 | 1-1349 |
| | | | | | 1370-1744 |
| HTWEH94 | 231 | 561680 | AC004858 | 937 | 1-94 |
| HTWEH94 | 231 | 561680 | AC004858 | 938 | 1-199 |
| HTXET11 | 233 | 581521 | AC011802 | 939 | 1-984 |
| HTXET11 | 233 | 581521 | AC025414 | 940 | 1-984 |
| HTXET11 | 233 | 581521 | AC011802 | 941 | 1-36 |
| | | | | | 836-964 |
| | | | | | 4059-5438 |
| | | | | | 6005-6176 |
| | | | | | 6789-7120 |
| | | | | | 7124-7588 |
| | | | | | 7735-7827 |
| | | | | | 7925-8770 |
| | | | | | 9057-9545 |
| HTXET11 | 233 | 581521 | AC025414 | 942 | 1-36 |
| | | | | | 836-964 |
| | | | | | 4059-5438 |
| | | | | | 6002-6173 |
| | | | | | 6786-7117 |
| | | | | | 7121-7585 |
| | | | | | 7732-7809 |
| HTXFA72 | 234 | 853410 | AP001812 | 943 | 1-1015 |
| HTXFA72 | 234 | 853410 | AP000822 | 944 | 1-1015 |
| HTXFA72 | 234 | 853410 | AP001812 | 945 | 1-130 |
| HTXFA72 | 234 | 853410 | AP000822 | 946 | 1-527 |
| HTXJD85 | 235 | 840391 | AC078797 | 947 | 1-1239 |
| HTXJD85 | 235 | 840391 | AC078797 | 948 | 1-2296 |
| | | | | | 2428-2719 |
| HTXJD85 | 235 | 840391 | AC078797 | 949 | 1-224 |
| HTXJY08 | 236 | 637774 | AC005962 | 950 | 1-2075 |
| HTXJY08 | 236 | 637774 | AC004757 | 951 | 1-2075 |
| HTXJY08 | 236 | 637774 | AC005962 | 952 | 1-478 |
| HTXJY08 | 236 | 637774 | AC005962 | 953 | 1-1011 |
| HTXJY08 | 236 | 637774 | AC004757 | 954 | 1-478 |
| HTXJY08 | 236 | 637774 | AC004757 | 955 | 1-1011 |
| HTXLT36 | 237 | 843477 | AC006160 | 956 | 1-175 |
| | | | | | 3693-4007 |
| | | | | | 5248-5429 |
| | | | | | 6946-7065 |
| | | | | | 7636-8072 |
| | | | | | 8959-10995 |
| HTXLT36 | 237 | 843477 | AC006160 | 957 | 1-461 |
| | | | | | 1144-1986 |
| HTXLT36 | 237 | 843477 | AC006160 | 958 | 1-81 |
| | | | | | 185-259 |
| | | | | | 314-593 |
| HUFCL31 | 238 | 801938 | AC012255 | 959 | 1-417 |
| | | | | | 834-1753 |
| | | | | | 1788-1918 |
| | | | | | 2176-2628 |
| | | | | | 2755-2971 |
| | | | | | 3036-5033 |
| HUFCL31 | 238 | 801938 | AC012255 | 960 | 1-134 |
| HUSCJ14 | 240 | 894699 | AC007040 | 961 | 1-149 |
| | | | | | 394-889 |
| | | | | | 1061-1139 |
| | | | | | 2097-2249 |
| | | | | | 2852-3007 |
| | | | | | 5021-5089 |
| | | | | | 5217-5919 |
| | | | | | 6119-8896 |
| HUSCJ14 | 240 | 894699 | AC007040 | 962 | 1-854 |
| HUSCJ14 | 240 | 894699 | AC007040 | 963 | 1-397 |
| HWBCN36 | 243 | 722259 | AL031296 | 964 | 1-670 |
| | | | | | 1590-2584 |
| | | | | | 3609-3751 |
| | | | | | 4204-4803 |
| | | | | | 4847-5271 |
| | | | | | 9874-10146 |
| | | | | | 11847-12328 |
| | | | | | 12493-13051 |
| | | | | | 13395-13635 |
| | | | | | 15455-15917 |
| | | | | | 17288-17739 |
| | | | | | 18945-19908 |
| | | | | | 21414-22006 |
| | | | | | 27737-27823 |
| | | | | | 35955-36575 |
| | | | | | 36643-37204 |
| | | | | | 37341-37504 |
| | | | | | 39154-39312 |
| | | | | | 41736-42263 |
| | | | | | 47221-47669 |
| | | | | | 47712-48167 |
| | | | | | 50898-51095 |
| | | | | | 51163-51655 |
| | | | | | 51716-52580 |
| | | | | | 52706-58181 |
| HWBCN36 | 243 | 722259 | AL109757 | 965 | 1-670 |
| | | | | | 1590-2583 |
| | | | | | 3578-3751 |
| | | | | | 4203-4802 |
| HWBCN36 | 243 | 722259 | AL031296 | 966 | 1-274 |
| HWBCN36 | 243 | 722259 | AL109757 | 967 | 1-425 |
| HWBDJ08 | 244 | 762860 | AL133351 | 968 | 1-238 |
| | | | | | 2679-2860 |
| | | | | | 6204-6544 |
| | | | | | 6911-7399 |
| | | | | | 7795-7909 |
| | | | | | 8430-8914 |
| | | | | | 9187-9620 |
| | | | | | 9744-10234 |
| | | | | | 11159-11190 |
| | | | | | 11310-11737 |
| | | | | | 12408-16037 |
| HWBDJ08 | 244 | 762860 | AC013339 | 969 | 1-238 |
| | | | | | 2699-2880 |
| | | | | | 6224-6564 |
| | | | | | 6931-7419 |
| | | | | | 7815-7929 |
| | | | | | 8449-8932 |
| | | | | | 9205-9638 |
| | | | | | 9762-10130 |
| | | | | | 10144-10309 |
| | | | | | 11380-11807 |
| | | | | | 12478-16107 |
| HWBDJ08 | 244 | 762860 | AL133351 | 970 | 1-466 |
| HWBDJ08 | 244 | 762860 | AC013339 | 971 | 1-466 |
| HWLBO67 | 245 | 834315 | AC011739 | 972 | 1-517 |
| HWLBO67 | 245 | 834315 | AC011739 | 973 | 1-586 |
| | | | | | 3120-3867 |
| | | | | | 4726-4866 |
| | | | | | 6044-6395 |
| | | | | | 6686-7156 |
| | | | | | 11614-12016 |
| | | | | | 18205-18501 |
| HWLBO67 | 245 | 834315 | AC011739 | 974 | 1-202 |
| HYABC84 | 248 | 865064 | AL132825 | 975 | 1-2512 |
| | | | | | 2604-2740 |
| | | | | | 2974-3241 |
| | | | | | 1-2512 |
| | | | | | 2604-2740 |
| | | | | | 2974-3241 |
| HYABC84 | 248 | 865064 | AL132825 | 976 | 1-553 |
| | | | | | 1-553 |
| | | | | | 1059-1263 |
| | | | | | 1059-1263 |
| | | | | | 3121-3476 |
| | | | | | 3121-3476 |
| | | | | | 5284-5734 |
| | | | | | 5284-5734 |
| | | | | | 6284-6513 |
| | | | | | 6284-6513 |
| | | | | | 6786-7426 |
| | | | | | 6786-7426 |
| | | | | | 8674-8733 |
| | | | | | 8674-8733 |
| | | | | | 10656-10933 |
| | | | | | 10656-10933 |
| | | | | | 11453-11555 |
| | | | | | 11453-11555 |
| | | | | | 12991-13079 |
| | | | | | 12991-13079 |
| | | | | | 13839-14281 |
| | | | | | 13839-14281 |
| | | | | | 14527-14827 |
| | | | | | 14527-14827 |
| | | | | | 15156-15685 |
| | | | | | 15156-15685 |
| | | | | | 15835-16046 |
| | | | | | 15835-16046 |
| | | | | | 16166-16604 |
| | | | | | 16166-16604 |
| | | | | | 16736-19566 |
| | | | | | 16736-19566 |
| | | | | | 19658-19794 |
| | | | | | 19658-19794 |
| | | | | | 20028-20295 |
| | | | | | 20028-20295 |
| HYABC84 | 248 | 865064 | AL132825 | 977 | 1-188 |
| | | | | | 1-188 |
| HLWAU42 | 250 | 695737 | AC010794 | 978 | 1-3291 |
| | | | | | 1-3291 |
| HLWAU42 | 250 | 695737 | AC009985 | 979 | 1-3291 |
| | | | | | 1-3291 |
| HLWAU42 | 250 | 695737 | AC010794 | 980 | 1-92 |
| | | | | | 1-92 |
| HLWAU42 | 250 | 695737 | AC010794 | 981 | 1-279 |
| | | | | | 1-279 |
| | | | | | 736-997 |
| | | | | | 736-997 |
| | | | | | 1377-1619 |
| | | | | | 1377-1619 |
| | | | | | 3065-3511 |
| | | | | | 3065-3511 |
| | | | | | 3829-7852 |
| | | | | | 3829-7852 |
| HLWAU42 | 250 | 695737 | AC009985 | 982 | 1-279 |
| | | | | | 736-997 |
| | | | | | 1320-1633 |
| | | | | | 3065-3511 |
| | | | | | 3829-7851 |
| | | | | | 1-279 |
| | | | | | 736-997 |
| | | | | | 1320-1633 |
| | | | | | 3065-3511 |
| | | | | | 3829-7851 |
| HEQBJ01 | 252 | 876546 | AC009079 | 983 | 1-198 |
| | | | | | 1263-1467 |
| | | | | | 2271-2369 |
| | | | | | 5035-5870 |
| | | | | | 5888-6174 |
| | | | | | 6249-6472 |
| | | | | | 7148-11343 |
| | | | | | 1-198 |
| | | | | | 1263-1467 |
| | | | | | 2271-2369 |
| | | | | | 5035-5870 |
| | | | | | 5888-6174 |
| | | | | | 6249-6472 |
| | | | | | 7148-11343 |
| HEQBJ01 | 252 | 876546 | AC009079 | 984 | 1-173 |
| | | | | | 916-970 |
| | | | | | 1-173 |
| | | | | | 916-970 |
| HF8FD92 | 254 | 901142 | AL359176 | 985 | 1-2410 |
| | | | | | 1-2410 |
| | | | | | 1-2410 |
| | | | | | 2420-4226 |
| | | | | | 2420-4226 |
| | | | | | 2420-4226 |
| HE8FD92 | 254 | 901142 | AL139152 | 986 | 1-826 |
| | | | | | 863-2063 |
| | | | | | 2125-4935 |
| | | | | | 4945-6753 |
| | | | | | 1-826 |
| | | | | | 863-2063 |
| | | | | | 2125-4935 |
| | | | | | 4945-6753 |
| | | | | | 1-826 |
| | | | | | 863-2063 |
| | | | | | 2125-4935 |
| | | | | | 4945-6753 |
| | | | | | 1-826 |
| | | | | | 863-2063 |
| | | | | | 2125-4935 |
| | | | | | 4945-6753 |
| HE8FD92 | 254 | 901142 | AL109937 | 987 | 1-168 |
| | | | | | 233-930 |
| | | | | | 1572-1748 |
| | | | | | 2463-3391 |
| HE8FD92 | 254 | 901142 | AC027209 | 988 | 1-1201 |
| | | | | | 1-1201 |
| | | | | | 1-1201 |
| | | | | | 1263-1531 |
| | | | | | 1263-1531 |
| | | | | | 1263-1531 |
| | | | | | 1648-5860 |
| | | | | | 1648-5860 |
| | | | | | 1648-5860 |
| HE8FD92 | 254 | 901142 | AL356004 | 989 | 1-1052 |
| | | | | | 1062-2871 |
| HE8FD92 | 254 | 901142 | AL139152 | 990 | 1-560 |
| | | | | | 760-1714 |
| | | | | | 1740-3644 |
| | | | | | 3736-4319 |
| | | | | | 4872-4998 |
| | | | | | 1-560 |
| | | | | | 760-1714 |
| | | | | | 1740-3644 |
| | | | | | 3736-4319 |
| | | | | | 4872-4998 |
| | | | | | 1-560 |
| | | | | | 760-1714 |
| | | | | | 1740-3644 |
| | | | | | 3736-4319 |
| | | | | | 4872-4998 |
| | | | | | 1-560 |
| | | | | | 760-1714 |
| | | | | | 1740-3644 |
| | | | | | 3736-4319 |
| | | | | | 4872-4998 |
| HE8FD92 | 254 | 901142 | AL109937 | 991 | 1-437 |
| HE8FD92 | 254 | 901142 | AC027209 | 992 | 1-560 |
| | | | | | 1-560 |
| | | | | | 1-560 |
| | | | | | 747-1721 |
| | | | | | 747-1721 |
| | | | | | 747-1721 |
| | | | | | 1875-3650 |
| | | | | | 1875-3650 |
| | | | | | 1875-3650 |
| | | | | | 3698-4325 |
| | | | | | 3698-4325 |
| | | | | | 3698-4325 |
| | | | | | 4657-4693 |
| | | | | | 4657-4693 |
| | | | | | 4657-4693 |
| | | | | | 4879-5008 |
| | | | | | 4879-5008 |
| | | | | | 4879-5008 |
| HE8FD92 | 254 | 901142 | AC027209 | 993 | 1-423 |
| | | | | | 1-423 |
| | | | | | 1-423 |
| HE8FD92 | 254 | 901142 | AL356004 | 994 | 1-560 |

[0088] Table 1D: The polynucleotides or polypeptides, or agonists or antagonists of the present invention can be used in assays to test for one or more biological activities. If these polynucleotides and polypeptides do exhibit activity in a particular assay, it is likely that these molecules may be involved in the diseases associated with the biological activity. Thus, the polynucleotides or polypeptides, or agonists or antagonists could be used to treat the associated disease.

[0089] The present invention encompasses methods of detecting, preventing, diagnosing, prognosticating, treating, and/or ameliorating a disease or disorder. In preferred embodiments, the present invention encompasses a method of treating a hematopoietic and hematologic diseases and disorders comprising administering to a patient in which such detection, treatment, prevention, and/or amelioration is desired a protein, nucleic acid, or antibody of the invention (or fragment or variant thereof) in an amount effective to detect, prevent, diagnose, prognosticate, treat, and/or ameliorate the hematopoietic and hematologic diseases and disorder.

[0090] In another embodiment, the present invention also encompasses methods of detecting, preventing, diagnosing, prognosticating, treating, and/or ameliorating a hematopoietic and hematologic diseases and disorder; comprising administering to a patient combinations of the proteins, nucleic acids, or antibodies of the invention (or fragments or variants thereof), sharing similar indications as shown in the corresponding rows in Column 3 of Table 1D.

[0091] Table 1D provides information related to biological activities for polynucleotides and polypeptides of the invention (including antibodies, agonists, and/or antagonists thereof). Table 1D also provides information related to assays which may be used to test polynucleotides and polypeptides of the invention (including antibodies, agonists, and/or antagonists thereof) for the corresponding biological activities. The first column (“Gene No.”) provides the gene number in the application for each clone identifier. The second column (“cDNA Clone ID:”) provides the unique clone identifier for each clone as previously described and indicated in Table 1A through Table 1D. The third column (“AA SEQ ID NO:Y”) indicates the Sequence Listing SEQ ID Number for polypeptide sequences encoded by the corresponding cDNA clones (also as indicated in Tables 1A, Table 1B, and Table 2). The fourth column (“Biological Activity”) indicates a biological activity corresponding to the indicated polypeptides (or polynucleotides encoding said polypeptides). The fifth column (“Exemplary Activity Assay”) further describes the corresponding biological activity and also provides information pertaining to the various types of assays which may be performed to test, demonstrate, or quantify the corresponding biological activity.

[0092] Table 1D describes the use of, inter alia, FMAT technology for testing or demonstrating various biological activities. Fluorometric microvolume assay technology (FMAT) is a fluorescence-based system which provides a means to perform nonradioactive cell- and bead-based assays to detect activation of cell signal transduction pathways. This technology was designed specifically for ligand binding and immunological assays. Using this technology, fluorescent cells or beads at the bottom of the well are detected as localized areas of concentrated fluorescence using a data processing system. Unbound flurophore comprising the background signal is ignored, allowing for a wide variety of homogeneous assays. FMAT technology may be used for peptide ligand binding assays, immunofluorescence, apoptosis, cytotoxicity, and bead-based immunocapture assays. See, Miraglia S et. al., “Homogeneous cell and bead based assays for highthroughput screening using flourometric microvolume assay technology,” Journal of Biomolecular Screening; 4:193-204 (1999). In particular, FMAT technology may be used to test, confirm, and/or identify the ability of polypeptides (including polypeptide fragments and variants) to activate signal transduction pathways. For example, FMAT technology may be used to test, confirm, and/or identify the ability of polypeptides to upregulate production of immunomodulatory proteins (such as, for example, interleukins, GM-CSF, Rantes, and Tumor Necrosis factors, as well as other cellular regulators (e.g. insulin)).

[0093] Table 1D also describes the use of kinase assays for testing, demonstrating, or quantifying biological activity. In this regard, the phosphorylation and de-phosphorylation of specific amino acid residues (e.g. Tyrosine, Serine, Threonine) on cell-signal transduction proteins provides a fast, reversible means for activation and de-activation of cellular signal transduction pathways. Moreover, cell signal transduction via phosphorylation/de-phosphorylation is crucial to the regulation of a wide variety of cellular processes (e.g. proliferation, differentiation, migration, apoptosis, etc.). Accordingly, kinase assays provide a powerful tool useful for testing, confirming, and/or identifying polypeptides (including polypeptide fragments and variants) that mediate cell signal transduction events via protein phosphorylation. See e.g., Forrer, P., Tamaskovic R., and Jaussi, R. “Enzyme-Linked Immunosorbent Assay for Measurement of JNK, ERK, and p38 Kinase Activities” Biol. Chem. 379(8-9): 1101-1110 (1998).

LENGTHY TABLE REFERENCED HERE
US20070026454A1-20070201-T00001
Please refer to the end of the specification for access instructions.

[0094] Table 2 further characterizes certain encoded polypeptides of the invention, by providing the results of comparisons to protein and protein family databases. The first column provides a unique clone identifier, “Clone ID NO:”, corresponding to a cDNA clone disclosed in Table 1A and/or Table 1B. The second column provides the unique contig identifier, “Contig ID:” which allows correlation with the information in Table 1B. The third column provides the sequence identifier, “SEQ ID NO:”, for the contig polynucleotide sequences. The fourth column provides the analysis method by which the homology/identity disclosed in the Table was determined. The fifth column provides a description of the PFAM/NR hit identified by each analysis. Column six provides the accession number of the PFAM/NR hit disclosed in the fifth column. Column seven, score/percent identity, provides a quality score or the percent identity, of the hit disclosed in column five. Comparisons were made between polypeptides encoded by polynucleotides of the invention and a non-redundant protein database (herein referred to as “NR”), or a database of protein families (herein referred to as “PFAM”), as described below.

[0095] The NR database, which comprises the NBRF PIR database, the NCBI GenPept database, and the SIB SwissProt and TrEMBL databases, was made non-redundant using the computer program nrdb2 (Warren Gish, Washington University in Saint Louis). Each of the polynucleotides shown in Table 1B, column 3 (e.g., SEQ ID NO:X or the ‘Query’ sequence) was used to search against the NR database. The computer program BLASTX was used to compare a 6-frame translation of the Query sequence to the NR database (for information about the BLASTX algorithm please see Altshul et al., J. Mol. Biol. 215:403-410 (1990), and Gish and States, Nat. Genet. 3:266-272 (1993). A description of the sequence that is most similar to the Query sequence (the highest scoring ‘Subject’) is shown in column five of Table 2 and the database accession number for that sequence is provided in column six. The highest scoring ‘Subject’ is reported in Table 2 if (a) the estimated probability that the match occurred by chance alone is less than 1.0 e-07, and (b) the match was not to a known repetitive element. BLASTX returns alignments of short polypeptide segments of the Query and Subject sequences which share a high degree of similarity; these segments are known as High-Scoring Segment Pairs or HSPs. Table 2 reports the degree of similarity between the Query and the Subject for each HSP as a percent identity in Column 7. The percent identity is determined by dividing the number of exact matches between the two aligned sequences in the HSP, dividing by the number of Query amino acids in the HSP and multiplying by 100. The polynucleotides of SEQ ID NO:X which encode the polypeptide sequence that generates an HSP are delineated by columns 8 and 9 of Table 2.

[0096] The PFAM database, PFAM version 2.1, (Sonnhammer, Nucl. Acids Res., 26:320-322, 1998)) consists of a series of multiple sequence alignments; one alignment for each protein family. Each multiple sequence alignment is converted into a probability model called a Hidden Markov Model, or HMM, that represents the position-specific variation among the sequences that make up the multiple sequence alignment (see, e.g., Durbin, et al., Biological sequence analysis: probabilistic models of proteins and nucleic acids, Cambridge University Press, 1998 for the theory of HMMs). The program HMMER version 1.8 (Sean Eddy, Washington University in Saint Louis) was used to compare the predicted protein sequence for each Query sequence (SEQ ID NO:Y in Table 1B.1) to each of the HMMs derived from PFAM version 2.1. A HMM derived from PFAM version 2.1 was said to be a significant match to a polypeptide of the invention if the score returned by HMMER 1.8 was greater than 0.8 times the HMMER 1.8 score obtained with the most distantly related known member of that protein family. The description of the PFAM family which shares a significant match with a polypeptide of the invention is listed in column 5 of Table 2, and the database accession number of the PFAM hit is provided in column 6. Column 7 provides the score returned by HMMER version 1.8 for the alignment. Columns 8 and 9 delineate the polynucleotides of SEQ ID NO:X which encode the polypeptide sequence which show a significant match to a PFAM protein family.

[0097] As mentioned, columns 8 and 9 in Table 2, “NT From” and “NT To”, delineate the polynucleotides of “SEQ ID NO:X” that encode a polypeptide having a significant match to the PFAM/NR database as disclosed in the fifth column. In one embodiment, the invention provides a protein comprising, or alternatively consisting of, a polypeptide encoded by the polynucleotides of SEQ ID NO:X delineated in columns 8 and 9 of Table 2. Also provided are polynucleotides encoding such proteins, and the complementary strand thereto.

[0098] The nucleotide sequence SEQ ID NO:X and the translated SEQ ID NO:Y are sufficiently accurate and otherwise suitable for a variety of uses well known in the art and described further below. For instance, the nucleotide sequences of SEQ ID NO:X are useful for designing nucleic acid hybridization probes that will detect nucleic acid sequences contained in SEQ ID NO:X or the cDNA contained in ATCC Deposit No:Z. These probes will also hybridize to nucleic acid molecules in biological samples, thereby enabling immediate applications in chromosome mapping, linkage analysis, tissue identification and/or typing, and a variety of forensic and diagnostic methods of the invention. Similarly, polypeptides identified from SEQ ID NO:Y may be used to generate antibodies which bind specifically to these polypeptides, or fragments thereof, and/or to the polypeptides encoded by the cDNA clones identified in, for example, Table 1A and/or 1B.

[0099] Nevertheless, DNA sequences generated by sequencing reactions can contain sequencing errors. The errors exist as misidentified nucleotides, or as insertions or deletions of nucleotides in the generated DNA sequence. The erroneously inserted or deleted nucleotides cause frame shifts in the reading frames of the predicted amino acid sequence. In these cases, the predicted amino acid sequence diverges from the actual amino acid sequence, even though the generated DNA sequence may be greater than 99.9% identical to the actual DNA sequence (for example, one base insertion or deletion in an open reading frame of over 1000 bases).

[0100] Accordingly, for those applications requiring precision in the nucleotide sequence or the amino acid sequence, the present invention provides not only the generated nucleotide sequence identified as SEQ ID NO:X, and a predicted translated amino acid sequence identified as SEQ ID NO:Y, but also a sample of plasmid DNA containing cDNA ATCC Deposit No:Z (e.g., as set forth in columns 2 and 3 of Table 1A and/or as set forth, for example, in Table 1B, 6, and 7). The nucleotide sequence of each deposited clone can readily be determined by sequencing the deposited clone in accordance with known methods. Further, techniques known in the art can be used to verify the nucleotide sequences of SEQ ID NO:X. The predicted amino acid sequence can then be verified from such deposits. Moreover, the amino acid sequence of the protein encoded by a particular clone can also be directly determined by peptide sequencing or by expressing the protein in a suitable host cell containing the deposited human cDNA, collecting the protein, and determining its sequence.

TABLE 2

| | | | | | PFam/NR | Score/ | | |
|---|---|---|---|---|---|---|---|---|
| cDNA | | SEQ | Analysis | | Accession | Percent | NT | NT |
| Clone ID | Contig ID: | ID NO: X | Method | PFam/NR Description | Number | Identity | From | To |
| H6EDM64 | 841331 | 11 | WUblastx.64 | (Q9UID3) ANG2. | Q9UID3 | 90% | 928 | 2451 |
| | | | | | | 36% | 203 | 310 |
| | | | | | | 36% | 931 | 1038 |
| | | | | | | 95% | 191 | 871 |
| HACBJ56 | 847112 | 13 | WUblastx.64 | (Q9D2Q2) 2310079F23RIK PROTEIN. | Q9D2Q2 | 65% | 98 | 286 |
| HACBS22 | 847113 | 14 | WUblastx.64 | (O60266) ADENYLATE CYCLASE TYPE III (EC | CYA3_HUMAN | 89% | 6 | 416 |
| | | | | 4.6.1.1) (ADENYLATE | | 25% | 1547 | 2299 |
| | | | | | | 18% | 917 | 1111 |
| | | | | | | 93% | 416 | 2449 |
| HADMB15 | 847116 | 18 | WUblastx.64 | (Q9BVH1) SIMILAR TO DLXIN-1. | Q9BVH1 | 100% | 8 | 109 |
| HAGCC87 | 638587 | 20 | WUblastx.64 | (Q9BGW3) HYPOTHETICAL 13.5 KDA. | Q9BGW3 | 65% | 992 | 1105 |
| | | | | PROTEIN. | | 36% | 54 | 116 |
| | | | | | | 57% | 801 | 980 |
| HAGFS57 | 847120 | 22 | WUblastx.64 | (Q9Y485) X-LIKE 1 PROTEIN. | Q9Y485 | 58% | 9 | 872 |
| HAGHN57 | 773286 | 23 | WUblastx.64 | (O60416) WUGSC: H_RG276O03.2 PROTEIN. | O60416 | 98% | 65 | 1444 |
| HAJAA47 | 534670 | 25 | WUblastx.64 | (Q9NZA3) CDA14. | Q9NZA3 | 100% | 17 | 157 |
| HAJAY92 | 845601 | 26 | WUblastx.64 | (O00549) ORF2-LIKE PROTEIN (FRAGMENT). | O00549 | 53% | 2226 | 2318 |
| | | | | | | 26% | 769 | 915 |
| | | | | | | 38% | 1653 | 1769 |
| | | | | | | 31% | 1721 | 2242 |
| HAJBV67 | 866415 | 27 | WUblastx.64 | (Q9HD45) TRANSMEMBRANE 9 | T9S3_HUMAN | 100% | 13 | 126 |
| | | | | SUPERFAMILY PROTEIN MEMBER 3 PRECU | | 93% | 116 | 1681 |
| HARAE26 | 560598 | 29 | WUblastx.64 | (Q9H743) CDNA: FLJ21394 FIS, CLONE | Q9H743 | 65% | 1204 | 1076 |
| | | | | COL03536. | | 75% | 1068 | 925 |
| HBAGD86 | 838799 | 31 | WUblastx.64 | (Q14287) HYPOTHETICAL PROTEIN | Q14287 | 37% | 801 | 559 |
| | | | | (FRAGMENT). | | | | |
| HBGBC29 | 691473 | 32 | WUblastx.64 | (O60513) BETA-1,4- | B4G4_HUMAN | 61% | 1 | 78 |
| | | | | GALACTOSYLTRANSFERASE 4 (EC 2.4.1.—) | | 98% | 65 | 1021 |
| | | | | (BET | | | | |
| HBHAA05 | 603174 | 33 | WUblastx.64 | (Q9H387) PRO2550. | Q9H387 | 71% | 676 | 386 |
| HBHAA81 | 846465 | 34 | WUblastx.64 | (Q9D1G3) 1110011D13RIK PROTEIN. | Q9D1G3 | 89% | 1329 | 1502 |
| | | | | | | 79% | 28 | 1329 |
| HBJAB02 | 837309 | 35 | WUblastx.64 | (Q9NXT6) CDNA FLJ20062 FIS, CLONE | Q9NXT6 | 70% | 2 | 1210 |
| | | | | COL01508. | | | | |
| HBJAC40 | 841235 | 36 | WUblastx.64 | (Q9P112) CHROMOSOME 16 OPEN READING | Q9P112 | 100% | 8 | 73 |
| | | | | FRAME 5. | | 36% | 5 | 70 |
| | | | | | | 57% | 11 | 52 |
| | | | | | | 53% | 85 | 180 |
| | | | | | | 100% | 192 | 632 |
| HBJCR46 | 815649 | 37 | HMMER | PFAM: WD domain, G-beta repeat | PF00400 | 36.6 | 790 | 867 |
| | | | 2.1.1 | | | | | |
| | | | WUblastx.64 | (Q9DC22) 1200006M05RIK PROTEIN. | Q9DC22 | 96% | 207 | 611 |
| | | | | | | 73% | 568 | 2763 |
| HBJEL16 | 847030 | 39 | WUblastx.64 | (O95297) PROTEIN ZERO RELATED PROTEIN. | O95297 | 98% | 285 | 491 |
| HBJKD16 | 853358 | 41 | WUblastx.64 | (Q9NXS4) CDNA FLJ20080 FIS, CLONE | Q9NXS4 | 91% | 8 | 1528 |
| | | | | COL03184. | | | | |
| HBMUH74 | 866160 | 42 | WUblastx.64 | (Q9NVW8) CDNA FLJ10462 FIS, CLONE | Q9NVW8 | 100% | 11 | 427 |
| | | | | NT2RP1001494, WEAKLY SIMILAR TO MAL | | | | |
| HBQAB79 | 810542 | 43 | WUblastx.64 | (Q9UQ32) AD 3 (FRAGMENT). | Q9UQ32 | 82% | 323 | 204 |
| HBXCM66 | 639039 | 44 | WUblastx.64 | (Q9H728) CDNA: FLJ21463 FIS, CLONE | Q9H728 | 65% | 988 | 809 |
| | | | | COL04765. | | 77% | 836 | 690 |
| HBXCX15 | 637542 | 45 | WUblastx.64 | (Q9GMX5) HYPOTHETICAL 12.9 KDA | Q9GMX5 | 41% | 726 | 827 |
| | | | | PROTEIN. | | 52% | 578 | 730 |
| HCDBO32 | 831942 | 46 | WUblastx.64 | (AAH17472) Hypothetical 21.3 kDa protein. | AAH17472 | 69% | 643 | 801 |
| | | | | | | 100% | 239 | 583 |
| HCEDR26 | 771144 | 47 | WUblastx.64 | (Q9H919) CDNA FLJ13078 FIS, CLONE | Q9H919 | 66% | 1157 | 1095 |
| | | | | NT2RP3002002. | | 66% | 1345 | 1184 |
| HCEFG93 | 745400 | 49 | WUblastx.64 | (Q9H387) PRO2550. | Q9H387 | 66% | 1178 | 1134 |
| | | | | | | 80% | 1114 | 1052 |
| | | | | | | 76% | 1323 | 1186 |
| HCEFZ82 | 831745 | 50 | WUblastx.64 | (Q9BV23) SIMILAR TO LIPASE PROTEIN. | Q9BV23 | 95% | 594 | 782 |
| | | | | | | 100% | 17 | 604 |
| HCFLN88 | 610000 | 51 | WUblastx.64 | (Q9BQE9) SIMILAR TO B-CELL | Q9BQE9 | 87% | 278 | 475 |
| | | | | CLL/LYMPHOMA 7B (UNKNOWN) (PROTEIN | | | | |
| | | | | FOR MGC | | | | |
| HCHAB84 | 834326 | 52 | WUblastx.64 | (Q9BRV3) STROMAL CELL PROTEIN. | Q9BRV3 | 89% | 82 | 744 |
| HCNSD29 | 862314 | 56 | WUblastx.64 | (O75400) HUNTINGTIN-INTERACTING | O75400 | 82% | 628 | 1605 |
| | | | | PROTEIN HYPA/FBP11 (FRAGMENT). | | 78% | 337 | 489 |
| HDPDI72 | 897277 | 62 | WUblastx.64 | adult-specific brush border protein - rabbit | pir\|C45665\|C45665 | 64% | 180 | 230 |
| | | | | | | 83% | 11 | 100 |
| HDPGE24 | 801947 | 63 | WUblastx.64 | (Q9P195) PRO1722. | Q9P195 | 65% | 1413 | 1291 |
| | | | | | | 43% | 1388 | 1278 |
| | | | | | | 77% | 2528 | 2394 |
| | | | | | | 47% | 2182 | 2078 |
| | | | | | | 75% | 1774 | 1751 |
| | | | | | | 62% | 2604 | 2557 |
| | | | | | | 68% | 1301 | 1167 |
| HDPIE44 | 899328 | 64 | WUblastx.64 | (Q9D666) 4632417G13RIK PROTEIN. | Q9D666 | 62% | 102 | 2453 |
| HDPIU94 | 813352 | 65 | WUblastx.64 | (Q9BVF7) SIMILAR TO HYPOTHETICAL | Q9BVF7 | 99% | 63 | 1703 |
| | | | | PROTEIN FLJ10422. | | | | |
| HDPIY31 | 886159 | 66 | WUblastx.64 | hypothetical protein DKFZp434N1429.1 - human | pir\|T46448\|T46448 | 72% | 1714 | 1899 |
| | | | | (fragment) | | | | |
| HDPOC24 | 777493 | 67 | WUblastx.64 | (Q9H8K1) CDNA FLJ13518 FLS, CLONE | Q9H8K1 | 100% | 62 | 208 |
| | | | | PLACE1005799. | | | | |
| HDPPQ30 | 684292 | 69 | WUblastx.64 | (Q9H387) PRO2550. | Q9H387 | 51% | 807 | 727 |
| | | | | | | 79% | 1042 | 815 |
| HDQHM36 | 852328 | 70 | WUblastx.64 | (Q9N083) UNNAMED PORTEIN PRODUCT. | Q9N083 | 69% | 1129 | 1257 |
| | | | | | | 50% | 965 | 1153 |
| HE6CS65 | 762960 | 73 | WUblastx.64 | (Q9H7C6) CDNA: FLJ21047 FIS, CLONE | Q9H7C6 | 98% | 938 | 1378 |
| | | | | CAS00253. | | | | |
| HE6FU11 | 827236 | 74 | HEMMER | PFAM: von Willebrand factor type A domain | PF00092 | 184.7 | 244 | 771 |
| | | | 2.1.1 | | | | | |
| | | | WUblastx.64 | (O95460) MATRILIN-4 PRECURSOR. | MTN4_HUMAN | 77% | 145 | 789 |
| | | | | | | 45% | 782 | 907 |
| | | | | | | 41% | 791 | 925 |
| | | | | | | 50% | 794 | 907 |
| | | | | | | 38% | 863 | 1498 |
| | | | | | | 33% | 190 | 741 |
| | | | | | | 98% | 782 | 1642 |
| HE8BQ49 | 589443 | 76 | WUblastx.64 | hypothetical protein - human transposon MER37 | pir\|S72482\|S72482 | 75% | 343 | 474 |
| | | | | | | 64% | 105 | 248 |
| HE8SG96 | 862016 | 77 | WUblastx.64 | (Q9P195) PRO1722. | Q9P195 | 58% | 1997 | 1845 |
| | | | | | | 63% | 1854 | 1687 |
| HE9EA10 | 827796 | 78 | WUblastx.64 | laminin alpha-1 chain precursor - human | pir\|S14458\|S14458 | 99% | 761 | 1891 |
| | | | | | | 27% | 878 | 1840 |
| | | | | | | 25% | 1142 | 1876 |
| HEAAW94 | 847340 | 80 | WUblastx.64 | (Q9UEV9) ACTIN-BINDING PROTEIN | Q9UEV9 | 94% | 285 | 890 |
| | | | | HOMOLOG ABP-278. | | 41% | 285 | 884 |
| | | | | | | 38% | 285 | 884 |
| | | | | | | 36% | 285 | 872 |
| | | | | | | 35% | 285 | 884 |
| | | | | | | 34% | 285 | 884 |
| | | | | | | 34% | 285 | 878 |
| | | | | | | 32% | 303 | 887 |
| | | | | | | 33% | 285 | 881 |
| | | | | | | 33% | 285 | 878 |
| | | | | | | 31% | 285 | 869 |
| | | | | | | 29% | 288 | 887 |
| | | | | | | 30% | 279 | 884 |
| | | | | | | 31% | 285 | 863 |
| | | | | | | 36% | 414 | 848 |
| | | | | | | 30% | 288 | 884 |
| | | | | | | 32% | 429 | 857 |
| | | | | | | 31% | 309 | 824 |
| | | | | | | 26% | 321 | 824 |
| | | | | | | 38% | 285 | 539 |
| | | | | | | 37% | 552 | 824 |
| HEBFR46 | 847064 | 84 | WUblastx.64 | (Q9NX85) CDNA FLJ20378 FIS, CLONE | Q9NX85 | 80% | 1111 | 1022 |
| | | | | KAIA0536. | | 84% | 1265 | 1110 |
| HEBGE07 | 798096 | 85 | WUblastx.64 | (Q9NX85) CDNA FLJ20378 FIS, CLONE | Q9NX85 | 79% | 1851 | 1720 |
| | | | | KAIA0536. | | | | |
| HFEAY59 | 658685 | 89 | WUblastx.64 | (Q9Z320) C29. | Q9Z320 | 67% | 50 | 1153 |
| HFEBO17 | 852218 | 90 | WUblastx.64 | (BAB55130) CDNA FLJ14559 fis, clone | BAB55130 | 100% | 523 | 624 |
| | | | | NT2RM2001998. | | 91% | 606 | 809 |
| HFIJA68 | 847074 | 91 | WUblastx.64 | (Q9UHE8) SIX TRANSMEMBRANE | STEA_HUMAN | 89% | 13 | 399 |
| | | | | EPITHELIAL ANTIGEN OF PROSTATE. | | | | |
| HFKES05 | 827572 | 92 | WUblastx.64 | (BAB55088) CDNA FLJ14496 fis, clone | BAB55088 | 85% | 84 | 314 |
| | | | | NT2RM1000035. | | 94% | 367 | 1722 |
| HFVHW43 | 570948 | 96 | WUblastx.64 | (Q9BGX4) HYPOTHETICAL 13.8 KDA | Q9BGX4 | 69% | 1209 | 1093 |
| | | | | PROTEIN. | | | | |
| HGBER72 | 826710 | 97 | WUblastx.64 | (Q9H387) PRO2550. | Q9H387 | 71% | 1061 | 969 |
| | | | | | | 78% | 1104 | 1063 |
| | | | | | | 77% | 1237 | 1103 |
| HGBHP91 | 693011 | 98 | WUblastx.64 | hypothetical protein (L1H 3′ region) - human | pir\|B34087\|B34087 | 52% | 541 | 491 |
| | | | | | | 44% | 537 | 34 |
| HHEAK45 | 765278 | 100 | WUblastx.64 | (Q9NPB0) DJ202I21.1 (NOVEL PROTEIN) | Q9NPB0 | 68% | 1949 | 1458 |
| | | | | (CDNA FLJ11101 FIS, CLONE PLACE10 | | | | |
| HHEOW19 | 886174 | 101 | WUblastx.64 | (O18973) RAB5 GDP/GTP EXCHANGE | O18973 | 77% | 417 | 623 |
| | | | | FACTOR, RABEX5. | | 91% | 611 | 715 |
| | | | | | | 56% | 166 | 378 |
| | | | | | | 92% | 129 | 167 |
| HHFEB79 | 1300768 | 102 | WUblastx.64 | (Q92545) RW1 PROTEIN (FRAGMENT). | RW1_HUMAN | 74% | 708 | 2387 |
| | | | | | | 80% | 6 | 590 |
| | | | | | | 32% | 1984 | 2148 |
| HHFEB79 | 863749 | 256 | WUblastx.64 | Similar to a C. elegans protein encoded in cosmid | dbj\|BAA13387.1\| | 69% | 1303 | 2400 |
| | | | | C27F2 (U40419) [Homo sapiens] | | 80% | 601 | 1185 |
| HHFFS40 | 824059 | 104 | WUblastx.64 | (Q9H4A6) GOLGI PROTEIN. | Q9H4A6 | 100% | 3 | 251 |
| HHPFP26 | 753269 | 106 | WUblastx.64 | (Q9BQG8) HYPOTHETICAL 32.5 KDA | Q9BQG8 | 100% | 906 | 1742 |
| | | | | PROTEIN. | | | | |
| HHSBI65 | 801910 | 109 | WUblastx.64 | (Q9H5W9) CDNA: FLJ22888 FIS, CLONE | Q9H5W9 | 100% | 270 | 407 |
| | | | | KAT03934. | | 94% | 479 | 1300 |
| HISAT67 | 843549 | 110 | WUblastx.64 | (Q9UH94) PROLACTIN REGULATORY | Q9UH94 | 88% | 219 | 797 |
| | | | | ELEMENT-BINDING PROTEIN (PROLACTIN | | 91% | 788 | 1447 |
| | | | | REGU | | | | |
| HISBA38 | 561711 | 111 | WUblastx.64 | (Q9H387) PRO2550. | Q9H387 | 53% | 919 | 836 |
| | | | | | | 53% | 996 | 907 |
| | | | | | | 51% | 842 | 687 |
| HJBCU75 | 638329 | 112 | WUblastx.64 | (O45030) STRABISMUS. | O45030 | 44% | 199 | 426 |
| | | | | | | 52% | 464 | 964 |
| HJMAA03 | 824062 | 113 | WUblastx.64 | (Q9N032) UNNAMED PROTEIN PRODUCT. | Q9N032 | 71% | 415 | 528 |
| HJPCH08 | 840365 | 114 | WUblastx.64 | (O95235) RABKINESIN-6 (RAB6- | RB6K_HUMAN | 93% | 9 | 596 |
| | | | | INTERACTING KINESIN-LIKE PROTEI | | | | |
| HKABU43 | 838573 | 115 | WUblastx.64 | (AAH03633) Translocase of outer mitochondrial | AAH03633 | 100% | 33 | 62 |
| | | | | membr | | 92% | 26 | 1597 |
| HLDQU79 | 740755 | 119 | WUblastx.64 | (O75477) KE04P. | O75477 | 100% | 105 | 1142 |
| HLDQU79 | 837599 | 257 | blastx.2 | KE04P. | sp\|O75477\|O75477 | 99% | 81 | 1118 |
| HLHAP05 | 638476 | 120 | WUblastx.64 | (Q9HA67) CDNA FLJ12155 FIS, CLONE | Q9HA67 | 55% | 1553 | 1500 |
| | | | | MAMMA1000472. | | 72% | 1650 | 1585 |
| | | | | | | 77% | 1807 | 1646 |
| HLHBS54 | 837503 | 121 | WUblastx.64 | (Q9NZV5) SELENOPROTEIN N PRECURSOR. | SELN_HUMAN | 92% | 1 | 1455 |
| HLICE88 | 840321 | 123 | WUblastx.64 | fibrinogen gamma-A chain precursor [validated] - | pir\|A90470\|FGHUG | 89% | 3 | 584 |
| | | | | human | | | | |
| HLQAS12 | 886180 | 124 | WUblastx.64 | (Q9XTA8) LECTIN-LIKE OXIDIZED LDL | Q9XTA8 | 71% | 690 | 842 |
| | | | | RECEPTOR. | | 52% | 364 | 711 |
| HLYGY91 | 658703 | 128 | WUblastx.64 | (Q9H8N0) CDNA FLJ13386 FIS, CLONE | Q9H8N0 | 94% | 221 | 391 |
| | | | | PLACE1001104, WEAKLY SIMILAR TO MYO | | | | |
| HMDAB29 | 584789 | 129 | WUblastx.64 | (Q9NX17) CDNA FLJ20489 FIS, CLONE | Q9NX17 | 72% | 1186 | 890 |
| | | | | KAT08285. | | | | |
| HMEDE24 | 837027 | 131 | WUblastx.64 | (Q9BVH9) SIMILAR TO GLUCOSE | Q9BVH9 | 94% | 188 | 1159 |
| | | | | REGULATED PROTEIN, 58 KDA. | | 42% | 101 | 742 |
| HMEDI90 | 840077 | 132 | WUblastx.64 | (Q9HBA3) RAB3 INTERACTING PROTEIN | Q9HBA3 | 100% | 81 | 794 |
| | | | | VARIANT 4 (FRAGMENT). | | | | |
| HMQAI38 | 589964 | 136 | WUblastx.64 | immune-responsive gene 1 - mouse (fragment) | pir\|I54546\|I54546 | 71% | 11 | 1363 |
| HMUAN45 | 833072 | 138 | WUblastx.64 | (BAB55441) CDNA FLJ14993 fis, clone | BAB55441 | 70% | 684 | 1238 |
| | | | | Y79AA1001874, w | | 65% | 239 | 955 |
| | | | | | | 100% | 1247 | 1516 |
| HMVBC31 | 825598 | 139 | WUblastx.64 | (O60725) PROTEIN-S ISOPRENYLCYSTEINE | ICMT_HUMAN | 80% | 747 | 938 |
| | | | | O-METHYLTRANSFERASE (E | | 87% | 121 | 789 |
| HMWBL03 | 822861 | 140 | WUblastx.64 | (Q9BWT1) C-MYC TARGET JP1. | Q9BWT1 | 85% | 137 | 1240 |
| HMWCG28 | 847413 | 141 | WUblastx.64 | (Q9P1S9) KINASE DEFICIENT PROTEIN KDP | Q9P1S9 | 84% | 35 | 892 |
| | | | | (FRAGMENT). | | | | |
| HNFCY57 | 877653 | 143 | WUblastx.64 | (AAL12497) Cryopyrin. | AAL12497 | 91% | 8 | 2203 |
| HNGAK51 | 603910 | 145 | WUblastx.64 | (O60448) NEURONAL THREAD PROTEIN | O60448 | 61% | 563 | 601 |
| | | | | AD7C-NTP. | | 67% | 733 | 915 |
| | | | | | | 65% | 702 | 878 |
| | | | | | | 74% | 714 | 914 |
| HNGJB41 | 852178 | 151 | WUblastx.64 | probable oxysterol-binding protein DJ430N08.1 - | pir\|T02435\|T02435 | 100% | 128 | 9 |
| | | | | human (fragment) | | | | |
| HNHCT47 | 634691 | 156 | WUblastx.64 | (Q9H728) CDNA: FLJ21463 FIS, CLONE | Q9H728 | 46% | 434 | 396 |
| | | | | COL04765. | | 56% | 621 | 448 |
| HNHKI74 | 777856 | 157 | WUblastx.64 | (Q9BGX7) HYPOTHETICAL 13.0 KDA | Q9BGX7 | 64% | 350 | 541 |
| | | | | PROTEIN. | | | | |
| HOACG07 | 792928 | 159 | WUblastx.64 | (Q9GZN8) DJ1009E24.3 (A NOVEL PROTEIN) | Q9GZN8 | 99% | 183 | 704 |
| | | | | (CDNA FLJ14158 FIS, CLONE NT2R | | | | |
| HOEBK60 | 789396 | 161 | WUblastx.64 | (Q9H916) CDNA FLJ13081 FIS, CLONE | Q9H916 | 98% | 132 | 1916 |
| | | | | NT2RP3002033. | | 100% | 14 | 109 |
| | | | | | | 88% | 106 | 159 |
| HOFMO16 | 596835 | 162 | HMMER | PFAM: 3-beta hydroxysteroid | PF01073 | 68.3 | 149 | 346 |
| | | | 2.1.1 | dehydrogenase/isomerase family | | | | |
| | | | WUblastx.64 | (Q9BSN9) 3 BETA-HYDROXY-DELTA 5-C27- | Q9BSN9 | 75% | 11 | 184 |
| | | | | STEROID OXIDOREDUCTASE. | | 83% | 349 | 438 |
| | | | | | | 94% | 290 | 346 |
| HOFNB74 | 762821 | 163 | WUblastx.64 | (Q99JH1) HYPOTHETICAL 17.7 KDA PROTEIN. | Q99JH1 | 72% | 44 | 187 |
| | | | | | | 97% | 199 | 471 |
| HOHBO66 | 853375 | 164 | WUblastx.64 | (Q9NY61) DED PROTEIN (APOPTOSIS | Q9NY61 | 94% | 1322 | 828 |
| | | | | ANTAGONIZING TRANSCRIPTION FACTOR). | | 88% | 844 | 212 |
| HORBV76 | 839270 | 166 | WUblastx.64 | (Q9Y2B2) PHOSPHATIDYLINOSITOL | Q9Y2B2 | 91% | 30 | 761 |
| | | | | GLYCAN, CLASS L (EC 3.5.—.—) (PIG-L PRO | | | | |
| HOSDO75 | 862049 | 167 | WUblastx.64 | (Q9D099) 1110057L18RIK PROTEIN. | Q9D099 | 89% | 11 | 202 |
| | | | | | | 88% | 259 | 630 |
| HOUDE92 | 580866 | 169 | WUblastx.64 | (Q9HBT2) HYPOTHETICAL 17.2 KDA | Q9HBT2 | 96% | 21 | 245 |
| | | | | PROTEIN. | | | | |
| HPCAL26 | 762822 | 170 | WUblastx.64 | (O95084) SERINE PROTEASE | O95084 | 98% | 398 | 640 |
| | | | | (HYPOTHETICAL 43.0 KDA PROTEIN) | | 76% | 135 | 497 |
| | | | | (PROTEASE, S | | | | |
| HPFCI36 | 855966 | 173 | WUblastx.64 | (Q9NX47) CDNA FLJ20445 FIS, CLONE | Q9NX47 | 100% | 9 | 320 |
| | | | | KAT05170. | | | | |
| HPMCV30 | 612870 | 177 | WUblastx.64 | (Q9BVD9) UNKNOWN (PROTEIN FOR | Q9BVD9 | 76% | 384 | 334 |
| | | | | MGC: 5149). | | 68% | 590 | 399 |
| HPRBH85 | 695752 | 178 | WUblastx.64 | (BAB55300) CDNA FLJ14784 fis, clone | BAB55300 | 62% | 2 | 616 |
| | | | | NT2RP4000713. | | 86% | 534 | 1085 |
| HPRCD35 | 853551 | 179 | WUblastx.64 | hypothetical protein DKFZp762L1710.1 - human | pir\|T50629\|T50629 | 100% | 320 | 613 |
| | | | | (fragment) | | 57% | 2 | 499 |
| HPRCM72 | 813512 | 180 | WUblastx.64 | (Q9D3K9) 2810468K05RIK PROTEIN. | Q9D3K9 | 45% | 296 | 526 |
| HPTRE80 | 884167 | 181 | WUblastx.64 | (O43819) SCO2 PROTEIN HOMOLOG | SCO2_HUMAN | 85% | 779 | 39 |
| | | | | PRECURSOR. | | | | |
| HPTRI42 | 655362 | 182 | WUblastx.64 | (Q9BVA7) UNKNOWN (PROTEIN FOR | Q9BVA7 | 85% | 3 | 611 |
| | | | | MGC: 5621). | | | | |
| HPTRM02 | 812879 | 183 | WUblastx.64 | (Q9UJU6) SRC HOMOLOGY 3 DOMAIN- | Q9UJU6 | 92% | 332 | 940 |
| | | | | CONTAINING PROTEIN HIP-55 (DREBRIN F). | | 97% | 2 | 106 |
| | | | | | | 96% | 98 | 190 |
| HPTVI96 | 636064 | 185 | WUblastx.64 | (Q9H5X3) HYPOTHETICAL 13.8 KDA | Q9H5X3 | 77% | 42 | 416 |
| | | | | PROTEIN. | | | | |
| HRDAI17 | 560720 | 187 | WUblastx.64 | (Q9NUM6) CDNA FLJ11267 FIS, CLONE | Q9NUM6 | 59% | 1305 | 1475 |
| | | | | PLACE1009174. | | | | |
| HRDDQ39 | 840405 | 188 | WUblastx.64 | (Q9NX85) CDNA FLJ20378 FIS, CLONE | Q9NX85 | 53% | 582 | 436 |
| | | | | KAIA0536. | | 65% | 775 | 578 |
| HRDEX93 | 816046 | 189 | WUblastx.64 | (Q9UBV8) PEFLIN. | Q9UBV8 | 100% | 313 | 864 |
| HRTAP63 | 780698 | 190 | WUblastx.64 | (Q9Y3C9) CGI-127 PROTEIN. | Q9Y3C9 | 100% | 498 | 860 |
| HSAWZ40 | 634000 | 193 | WUblastx.64 | (O00549) ORF2-LIKE PROTEIN (FRAGMENT). | O00549 | 64% | 951 | 610 |
| | | | | | | 60% | 613 | 8 |
| HSHAX04 | 812178 | 196 | WUblastx.64 | peptidylprolyl isomerase (EC 5.2.1.8) A - human | pir\|S66681\|S66681 | 96% | 14 | 916 |
| HSNBM34 | 635131 | 198 | WUblastx.64 | acyl-CoA dehydrogenase (EC 1.3.99.—) very-long- | pir\|S54183\|S54183 | 84% | 1548 | 1979 |
| | | | | chain specific - human | | 100% | 251 | 1546 |
| HSRFD18 | 840771 | 199 | WUblastx.64 | (Q9H941) CDNA FLJ13033 FIS, CLONE | Q9H941 | 100% | 437 | 559 |
| | | | | NT2RP3001126. | | | | |
| HSSEF77 | 658725 | 200 | WUblastx.64 | (O95637) WW DOMAIN BINDING PROTEIN-1. | O95637 | 42% | 10 | 246 |
| | | | | | | 83% | 296 | 829 |
| HSYBI06 | 740766 | 203 | WUblastx.64 | (Q9BGV8) HYPOTHETICAL 10.0 KDA | Q9BGV8 | 69% | 916 | 954 |
| | | | | PROTEIN. | | 78% | 821 | 913 |
| HT5GR59 | 801930 | 205 | WUblastx.64 | (O60496) DOCKING PROTEIN. | O60496 | 72% | 70 | 1284 |
| HTDAA78 | 566861 | 206 | WUblastx.64 | (Q9D8E7) 5830443F10RIK PROTEIN. | Q9D8E7 | 58% | 84 | 302 |
| HTEAG62 | 812332 | 207 | WUblastx.64 | (Q9Y5Z7) HOST CELL FACTOR 2. | Q9Y5Z7 | 60% | 1 | 57 |
| | | | | | | 93% | 14 | 2011 |
| | | | | | | 30% | 107 | 631 |
| HTECB02 | 806305 | 208 | WUblastx.64 | (AAK39520) BTB domain protein (Fragment). | AAK39520 | 95% | 33 | 1211 |
| HTEJD29 | 695798 | 211 | WUblastx.64 | (Q60713) REVERSE TRANSCRIPTASE. | Q60713 | 42% | 1115 | 1285 |
| | | | | | | 47% | 874 | 1089 |
| HTENR63 | 877952 | 213 | WUblastx.64 | (Q9HD71) HYPOTHETICAL NUCLEAR | Q9HD71 | 33% | 1278 | 1358 |
| | | | | FACTOR SBBI22. | | 78% | 26 | 1168 |
| HTGBK95 | 834490 | 214 | WUblastx.64 | (Q9GMX5) HYPOTHETICAL 12.9 KDA | Q9GMX5 | 66% | 126 | 55 |
| | | | | PROTEIN. | | 70% | 235 | 116 |
| HTGGM44 | 842856 | 215 | WUblastx.64 | probable phosphodiesterase I (BC 3.1.4.1) - human | pir\|T43461\|T43461 | 100% | 1400 | 1924 |
| | | | | (fragment) | | 83% | 1925 | 2488 |
| HTLBT80 | 840045 | 217 | WUblastx.64 | (Q9NQQ7) BA394O2.1 (CGI-15 PROTEIN). | Q9NQQ7 | 76% | 1214 | 1405 |
| | | | | | | 74% | 804 | 1223 |
| | | | | | | 47% | 780 | 845 |
| | | | | | | 78% | 313 | 825 |
| HTLCX82 | 847091 | 218 | WUblastx.64 | (Q9BTZ4) SIMILAR TO EXPRESSED | Q9BTZ4 | 100% | 127 | 258 |
| | | | | SEQUENCE 2 EMBRYONIC LETHAL | | 72% | 237 | 629 |
| | | | | (FRAGMENT). | | | | |
| HTLEV48 | 723799 | 220 | WUblastx.64 | (BAB55550) Bk125H2.1 protein. | BAB55550 | 94% | 10 | 825 |
| HTLFA13 | 535937 | 221 | WUblastx.64 | (Q9UHT1) PRO1902 PROTEIN. | Q9UHT1 | 57% | 1118 | 873 |
| HTLGI89 | 835069 | 222 | WUblastx.64 | (Q9BXS5) CLATHRIN-ASSOCIATED PROTEIN | Q9BXS5 | 98% | 104 | 682 |
| | | | | AP47. | | 99% | 675 | 1370 |
| HTNBK13 | 831967 | 223 | WUblastx.64 | (Q9Y3M2) HYPOTHETICAL 14.5 KDA | Q9Y3M2 | 81% | 123 | 500 |
| | | | | PROTEIN. | | | | |
| HTOAM11 | 664508 | 224 | WUblastx.64 | (Q9H5R3) CDNA: FLJ23147 FIS, CLONE | Q9H5R3 | 77% | 428 | 363 |
| | | | | LNG09295. | | 75% | 586 | 425 |
| HTPCO75 | 853645 | 227 | WUblastx.64 | (O00549) ORF2-LIKE PROTEIN (FRAGMENT). | O00549 | 43% | 325 | 26 |
| | | | | | | 36% | 1318 | 1253 |
| HTTCB60 | 853401 | 228 | WUblastx.64 | (Q9HAW0) RNA POLYMERASE III | Q9HAW0 | 90% | 6 | 881 |
| | | | | TRANSCRIPTION INITIATION FACTOR BRFU. | | | | |
| HTTDN24 | 766485 | 229 | WUblastx.64 | (Q9BVN5) HYPOTHETICAL 120.6 KDA | Q9BVN5 | 95% | 628 | 1725 |
| | | | | PROTEIN. | | 32% | 937 | 1593 |
| | | | | | | 95% | 3 | 629 |
| | | | | | | 32% | 1114 | 1596 |
| HTTEE41 | 840950 | 230 | WUblastx.64 | (P78371) T-COMPLEX PROTEIN 1, BETA | TCPB_HUMAN | 98% | 92 | 1696 |
| | | | | SUBUNIT (TCP-1-BETA) (CC | | | | |
| HTWEH94 | 561680 | 231 | WUblastx.64 | (Q9GMX5) HYPOTHETICAL 12.9 KDA | Q9GMX5 | 60% | 1150 | 929 |
| | | | | PROTEIN. | | | | |
| HTXFA72 | 853410 | 234 | WUblastx.64 | (Q9N083) UNNAMED PORTEIN PRODUCT. | Q9N083 | 59% | 1688 | 1557 |
| | | | | | | 66% | 1839 | 1681 |
| HTXJD85 | 840391 | 235 | WUblastx.64 | (Q9HAD8) CDNA FLJ11786 FIS, CLONE | Q9HAD8 | 52% | 1093 | 818 |
| | | | | HEMBA1006036. | | | | |
| HUFCL31 | 801938 | 238 | WUblastx.64 | (Q9D311) 9030623N16RIK PROTEIN. | Q9D311 | 60% | 280 | 1224 |
| HUSCJ14 | 894699 | 240 | WUblastx.64 | tex261 protein - mouse | pir\|S47481\|S47481 | 99% | 74 | 661 |
| HUVDJ48 | 564853 | 241 | WUblastx.64 | SHORT ISOFORM OF Q9P2N4 | sp_vs\|Q9P2N4- | 92% | 1510 | 1668 |
| | | | | | 01\|Q9P2N4 | | | |
| HWBBU75 | 780360 | 242 | WUblastx.64 | (Q9R189) MUNC13-4 PROTEIN. | Q9R189 | 82% | 1454 | 2362 |
| | | | | | | 73% | 913 | 1434 |
| | | | | | | 80% | 194 | 952 |
| | | | | | | 62% | 2229 | 2729 |
| | | | | | | 31% | 1586 | 1711 |
| | | | | | | 34% | 401 | 532 |
| HWBCN36 | 722259 | 243 | WUblastx.64 | (Q9BGW3) HYPOTHETICAL 13.5 KDA | Q9BGW3 | 69% | 1007 | 900 |
| | | | | PROTEIN. | | 57% | 887 | 846 |
| HWBDJ08 | 762860 | 244 | WUblastx.64 | probable pol polyprotein-related protein 4 - rat | pir\|S21348\|S21348 | 47% | 901 | 833 |
| | | | | | | 43% | 1262 | 1131 |
| | | | | | | 53% | 1134 | 904 |
| HWLGP26 | 834770 | 246 | WUblastx.64 | (Q9NP87) DNA POLYMERASE MU. | Q9NP87 | 93% | 674 | 760 |
| | | | | | | 100% | 269 | 298 |
| | | | | | | 94% | 295 | 465 |
| | | | | | | 87% | 432 | 623 |
| | | | | | | 100% | 3 | 254 |
| HILCA24 | 869856 | 247 | WUblastx.64 | (Q9NUU6) CDNA FLJ11127 FIS, CLONE | Q9NUU6 | 95% | 104 | 1171 |
| | | | | PLACE1006225. | | | | |
| HILCA24 | 782450 | 260 | WUblastx.64 | (Q9NUU6) CDNA FLJ11127 FIS, CLONE | Q9NUU6 | 73% | 103 | 159 |
| | | | | PLACE1006225. | | 100% | 168 | 1169 |
| HYABC84 | 865064 | 248 | WUblastx.64 | (Q9H429) DJ756N5.2 (A NOVEL PROTEIN | Q9H429 | 92% | 163 | 618 |
| | | | | (DKFZP727M231) SIMILAR TO TRP4-AS | | | | |
| HYABC84 | 789854 | 261 | WUblastx.64 | (Q99L03) SIMILAR TO TRP4-ASSOCIATED | Q99L03 | 89% | 209 | 553 |
| | | | | PROTEIN TAP1 (FRAGMENT). | | | | |
| HPWTF23 | 844775 | 249 | HMMER | PFAM: TSC-22/dip/bun family | PF01166 | 146.4 | 442 | 621 |
| | | | 2.1.1 | | | | | |
| | | | WUblastx.64 | (Q99576) GLUCOCORTICOID-INDUCED | GILZ_HUMAN | 94% | 271 | 672 |
| | | | | LEUCINE ZIPPER PROTEIN (DEL | | | | |
| HPWTF23 | 843700 | 262 | HMMER | PFAM: TSC-22/dip/bun family | PF01166 | 146.4 | 442 | 621 |
| | | | 2.1.1 | | | | | |
| | | | WUblastx.64 | (Q99576) GLUCOCORTICOID-INDUCED | GILZ_HUMAN | 94% | 271 | 672 |
| | | | | LEUCINE ZIPPER PROTEIN (DEL | | | | |
| HGCAC19 | 851527 | 251 | WUblastx.64 | (Q9UIE9) WUGSC: H_DJ0687K01.2 PROTEIN. | Q9UIE9 | 34% | 984 | 1124 |
| | | | | | | 31% | 1546 | 1863 |
| | | | | | | 96% | 361 | 1047 |
| | | | | | | 24% | 993 | 1124 |
| | | | | | | 22% | 984 | 1124 |
| | | | | | | 40% | 1002 | 1124 |
| | | | | | | 27% | 984 | 1124 |
| | | | | | | 27% | 981 | 1124 |
| | | | | | | 25% | 984 | 1088 |
| | | | | | | 31% | 984 | 1124 |
| | | | | | | 23% | 984 | 1124 |
| | | | | | | 29% | 984 | 1124 |
| | | | | | | 29% | 984 | 1124 |
| | | | | | | 32% | 1023 | 1124 |
| | | | | | | 26% | 586 | 801 |
| | | | | | | 95% | 2017 | 2712 |
| HGCAC19 | 842540 | 264 | WUblastx.64 | (Q9H6A1) CDNA: FLJ22454 FIS, CLONE | Q9H6A1 | 34% | 982 | 1122 |
| | | | | HRC09703 (FRAGMENT). | | 100% | 182 | 208 |
| | | | | | | 31% | 982 | 1122 |
| | | | | | | 29% | 982 | 1122 |
| | | | | | | 40% | 1000 | 1122 |
| | | | | | | 27% | 982 | 1122 |
| | | | | | | 29% | 982 | 1122 |
| | | | | | | 27% | 979 | 1122 |
| | | | | | | 21% | 982 | 1119 |
| | | | | | | 24% | 991 | 1122 |
| | | | | | | 23% | 982 | 1122 |
| | | | | | | 96% | 314 | 1045 |
| HGCAC19 | 801999 | 265 | WUblastx.64 | (Q9H6A1) CDNA: FLJ22454 FIS, CLONE | Q9H6A1 | 34% | 984 | 1124 |
| | | | | HRC09703 (FRAGMENT). | | 100% | 184 | 210 |
| | | | | | | 31% | 984 | 1124 |
| | | | | | | 29% | 984 | 1124 |
| | | | | | | 40% | 1002 | 1124 |
| | | | | | | 27% | 984 | 1124 |
| | | | | | | 29% | 984 | 1124 |
| | | | | | | 27% | 981 | 1124 |
| | | | | | | 21% | 984 | 1121 |
| | | | | | | 24% | 993 | 1124 |
| | | | | | | 23% | 984 | 1124 |
| | | | | | | 96% | 316 | 1056 |
| HEQBJ01 | 876546 | 252 | WUblastx.64 | (Q9LVQ7) ZINC FINGER PROTEIN. | Q9LVQ7 | 34% | 424 | 849 |
| HEQBJ01 | 861786 | 266 | WUblastx.64 | (Q9LVQ7) ZINC FINGER PROTEIN. | Q9LVQ7 | 34% | 424 | 849 |
| HE8FD92 | 901142 | 254 | WUblastx.64 | (Q9UJI9) HYPOTHETICAL 105.9 KDA | Q9UJI9 | 76% | 31 | 480 |
| | | | | PROTEIN. | | 56% | 31 | 411 |
| | | | | | | 67% | 217 | 408 |
| | | | | | | 67% | 217 | 408 |
| | | | | | | 63% | 217 | 411 |
| | | | | | | 63% | 217 | 411 |
| | | | | | | 60% | 217 | 411 |
| | | | | | | 53% | 217 | 411 |
| | | | | | | 59% | 31 | 126 |
| | | | | | | 56% | 31 | 126 |
| | | | | | | 56% | 31 | 126 |
| | | | | | | 56% | 31 | 126 |
| | | | | | | 39% | 58 | 126 |
| HE8FD92 | 869847 | 270 | WUblastx.64 | (Q9UJI9) HYPOTHETICAL 105.9 KDA | Q9UJI9 | 74% | 4 | 609 |
| | | | | PROTEIN. | | 59% | 4 | 540 |
| | | | | | | 50% | 1 | 255 |
| | | | | | | 63% | 346 | 540 |
| | | | | | | 63% | 346 | 540 |
| | | | | | | 60% | 346 | 540 |
| | | | | | | 49% | 1 | 255 |
| | | | | | | 48% | 1 | 255 |
| | | | | | | 53% | 346 | 540 |
| | | | | | | 41% | 4 | 255 |
| | | | | | | 33% | 40 | 255 |
| HE8FD92 | 856544 | 271 | WUblastx.64 | (Q9UJI9) HYPOTHETICAL 105.9 KDA | Q9UJI9 | 84% | 419 | 1414 |
| | | | | PROTEIN. | | 71% | 2 | 1060 |
| | | | | | | 76% | 419 | 1345 |
| | | | | | | 61% | 2 | 613 |
| | | | | | | 45% | 203 | 1060 |
| | | | | | | 40% | 449 | 1345 |
| | | | | | | 52% | 2 | 328 |
| | | | | | | 33% | 605 | 1345 |
| | | | | | | 46% | 47 | 328 |
| HBDAB91 | 864374 | 255 | WUblastx.64 | (O00370) PUTATIVE P150. | O00370 | 40% | 907 | 833 |
| | | | | | | 35% | 849 | 307 |
| HBDAB91 | 789532 | 273 | WUblastx.64 | (O00370) PUTATIVE P150. | O00370 | 40% | 587 | 513 |
| | | | | | | 34% | 529 | 5 |

RACE Protocol for Recovery of Full-Length Genes

[0101] Partial cDNA clones can be made full-length by utilizing the rapid amplification of cDNA ends (RACE) procedure described in Frohman, M. A., et al., Proc. Natl. Acad. Sci. USA, 85:8998-9002 (1988). A cDNA clone missing either the 5′ or 3′ end can be reconstructed to include the absent base pairs extending to the translational start or stop codon, respectively. In some cases, cDNAs are missing the start codon of translation, therefor. The following briefly describes a modification of this original 5′ RACE procedure. Poly A+ or total RNA is reverse transcribed with Superscript II (Gibco/BRL) and an antisense or complementary primer specific to the cDNA sequence. The primer is removed from the reaction with a Microcon Concentrator (Amicon). The first-strand cDNA is then tailed with dATP and terminal deoxynucleotide transferase (Gibco/BRL). Thus, an anchor sequence is produced which is needed for PCR amplification. The second strand is synthesized from the dA-tail in PCR buffer, Taq DNA polymerase (Perkin-Elmer Cetus), an oligo-dT primer containing three adjacent restriction sites (XhoI, SalI and ClaI) at the 5′ end and a primer containing just these restriction sites. This double-stranded cDNA is PCR amplified for 40 cycles with the same primers as well as a nested cDNA-specific antisense primer. The PCR products are size-separated on an ethidium bromide-agarose gel and the region of gel containing cDNA products the predicted size of missing protein-coding DNA is removed. cDNA is purified from the agarose with the Magic PCR Prep kit (Promega), restriction digested with XhoI or SalI, and ligated to a plasmid such as pBluescript SKII (Stratagene) at XhoI and EcoRV sites. This DNA is transformed into bacteria and the plasmid clones sequenced to identify the correct protein-coding inserts. Correct 5′ ends are confirmed by comparing this sequence with the putatively identified homologue and overlap with the partial cDNA clone. Similar methods known in the art and/or commercial kits are used to amplify and recover 3′ ends.

[0102] Several quality-controlled kits are commercially available for purchase. Similar reagents and methods to those above are supplied in kit form from Gibco/BRL for both 5′ and 3′ RACE for recovery of full length genes. A second kit is available from Clontech which is a modification of a related technique, SLIC (single-stranded ligation to single-stranded cDNA), developed by Dumas et al., Nucleic Acids Res., 19:5227-32 (1991). The major differences in procedure are that the RNA is alkaline hydrolyzed after reverse transcription and RNA ligase is used to join a restriction site-containing anchor primer to the first-strand cDNA. This obviates the necessity for the dA-tailing reaction which results in a polyT stretch that is difficult to sequence past.

[0103] An alternative to generating 5′ or 3′ cDNA from RNA is to use cDNA library double-stranded DNA. An asymmetric PCR-amplified antisense cDNA strand is synthesized with an antisense cDNA-specific primer and a plasmid-anchored primer. These primers are removed and a symmetric PCR reaction is performed with a nested cDNA-specific antisense primer and the plasmid-anchored primer.

RNA Ligase Protocol for Generating the 5′ or 3′ End Sequences to Obtain Full Length Genes

[0104] Once a gene of interest is identified, several methods are available for the identification of the 5′ or 3′ portions of the gene which may not be present in the original cDNA plasmid. These methods include, but are not limited to, filter probing, clone enrichment using specific probes and protocols similar and identical to 5′ and 3′ RACE. While the full length gene may be present in the library and can be identified by probing, a useful method for generating the 5′ or 3′ end is to use the existing sequence information from the original cDNA to generate the missing information. A method similar to 5′ RACE is available for generating the missing 5′ end of a desired full-length gene. (This method was published by Fromont-Racine et al., Nucleic Acids Res., 21(7):1683-1684 (1993)). Briefly, a specific RNA oligonucleotide is ligated to the 5′ ends of a population of RNA presumably containing full-length gene RNA transcript and a primer set containing a primer specific to the ligated RNA oligonucleotide and a primer specific to a known sequence of the gene of interest, is used to PCR amplify the 5′ portion of the desired full length gene which may then be sequenced and used to generate the full length gene. This method starts with total RNA isolated from the desired source, poly A RNA may be used but is not a prerequisite for this procedure. The RNA preparation may then be treated with phosphatase if necessary to eliminate 5′ phosphate groups on degraded or damaged RNA which may interfere with the later RNA ligase step. The phosphatase if used is then inactivated and the RNA is treated with tobacco acid pyrophosphatase in order to remove the cap structure present at the 5′ ends of messenger RNAs. This reaction leaves a 5′ phosphate group at the 5′ end of the cap cleaved RNA which can then be ligated to an RNA oligonucleotide using T4 RNA ligase. This modified RNA preparation can then be used as a template for first strand cDNA synthesis using a gene specific oligonucleotide. The first strand synthesis reaction can then be used as a template for PCR amplification of the desired 5′ end using a primer specific to the ligated RNA oligonucleotide and a primer specific to the known sequence of the gene of interest. The resultant product is then sequenced and analyzed to confirm that the 5′ end sequence belongs to the relevant gene.

[0105] The present invention also relates to vectors or plasmids which include such DNA sequences, as well as the use of the DNA sequences. The material deposited with the ATCC (e.g., as described in columns 2 and 3 of Table 1A, and/or as set forth in Table 1B, Table 6, or Table 7) is a mixture of cDNA clones derived from a variety of human tissue and cloned in either a plasmid vector or a phage vector, as described, for example, in Table 1A and Table 7. These deposits are referred to as “the deposits” herein. The tissues from which some of the clones were derived are listed in Table 7, and the vector in which the corresponding cDNA is contained is also indicated in Table 7. The deposited material includes cDNA clones corresponding to SEQ ID NO:X described, for example, in Table 1A and/or Table 1B (ATCC Deposit No:Z). A clone which is isolatable from the ATCC Deposits by use of a sequence listed as SEQ ID NO:X, may include the entire coding region of a human gene or in other cases such clone may include a substantial portion of the coding region of a human gene. Furthermore, although the sequence listing may in some instances list only a portion of the DNA sequence in a clone included in the ATCC Deposits, it is well within the ability of one skilled in the art to sequence the DNA included in a clone contained in the ATCC Deposits by use of a sequence (or portion thereof) described in, for example Tables 1A and/or Table 1B or Table 2, by procedures hereinafter further described, and others apparent to those skilled in the art.

[0106] Also provided in Table 1A and Table 7 is the name of the vector which contains the cDNA clone. Each vector is routinely used in the art. The following additional information is provided for convenience.

[0107] Vectors Lambda Zap (U.S. Pat. Nos. 5,128,256 and 5,286,636), Uni-Zap XR (U.S. Pat. Nos. 5,128,256 and 5,286,636), Zap Express (U.S. Pat. Nos. 5,128,256 and 5,286,636), pBluescript (pBS) (Short, J. M. et al., Nucleic Acids Res. 16:7583-7600 (1988); Alting-Mees, M. A. and Short, J. M., Nucleic Acids Res. 17:9494 (1989)) and pBK (Alting-Mees, M. A. et al., Strategies 5:58-61 (1992)) are commercially available from Stratagene Cloning Systems, Inc., 11011 N. Torrey Pines Road, La Jolla, Calif., 92037. pBS contains an ampicillin resistance gene and pBK contains a neomycin resistance gene. Phagemid pBS may be excised from the Lambda Zap and Uni-Zap XR vectors, and phagemid pBK may be excised from the Zap Express vector. Both phagemids may be transformed into E. coli strain XL-1 Blue, also available from Stratagene.

[0108] Vectors pSport1, pCMVSport 1.0, pCMVSport 2.0 and pCMVSport 3.0, were obtained from Life Technologies, Inc., P.O. Box 6009, Gaithersburg, Md. 20897. All Sport vectors contain an ampicillin resistance gene and may be transformed into E. coli strain DH10B, also available from Life Technologies. See, for instance, Gruber, C. E., et al., Focus 15:59-(1993). Vector lafmid BA (Bento Soares, Columbia University, New York, N.Y.) contains an ampicillin resistance gene and can be transformed into E. coli strain XL-1 Blue. Vector pCR®2.1, which is available from Invitrogen, 1600 Faraday Avenue, Carlsbad, Calif. 92008, contains an ampicillin resistance gene and may be transformed into E. coli strain DH10B, available from Life Technologies. See, for instance, Clark, J. M., Nuc. Acids Res. 16:9677-9686 (1988) and Mead, D. et al., Bio/Technology 9: (1991).

[0109] The present invention also relates to the genes corresponding to SEQ ID NO:X, SEQ ID NO:Y, and/or the deposited clone (ATCC Deposit No:Z). The corresponding gene can be isolated in accordance with known methods using the sequence information disclosed herein. Such methods include preparing probes or primers from the disclosed sequence and identifying or amplifying the corresponding gene from appropriate sources of genomic material.

[0110] Also provided in the present invention are allelic variants, orthologs, and/or species homologs. Procedures known in the art can be used to obtain full-length genes, allelic variants, splice variants, full-length coding portions, orthologs, and/or species homologs of genes corresponding to SEQ ID NO:X or the complement thereof, polypeptides encoded by genes corresponding to SEQ ID NO:X or the complement thereof, and/or the cDNA contained in ATCC Deposit No:Z, using information from the sequences disclosed herein or the clones deposited with the ATCC. For example, allelic variants and/or species homologs may be isolated and identified by making suitable probes or primers from the sequences provided herein and screening a suitable nucleic acid source for allelic variants and/or the desired homologue.

[0111] The polypeptides of the invention can be prepared in any suitable manner. Such polypeptides include isolated naturally occurring polypeptides, recombinantly produced polypeptides, synthetically produced polypeptides, or polypeptides produced by a combination of these methods. Means for preparing such polypeptides are well understood in the art.

[0112] The polypeptides may be in the form of the secreted protein, including the mature form, or may be a part of a larger protein, such as a fusion protein (see below). It is often advantageous to include an additional amino acid sequence which contains secretory or leader sequences, pro-sequences, sequences which aid in purification, such as multiple histidine residues, or an additional sequence for stability during recombinant production.

[0113] The polypeptides of the present invention are preferably provided in an isolated form, and preferably are substantially purified. A recombinantly produced version of a polypeptide, including the secreted polypeptide, can be substantially purified using techniques described herein or otherwise known in the art, such as, for example, by the one-step method described in Smith and Johnson, Gene 67:31-40 (1988). Polypeptides of the invention also can be purified from natural, synthetic or recombinant sources using techniques described herein or otherwise known in the art, such as, for example, antibodies of the invention raised against the polypeptides of the present invention in methods which are well known in the art.

[0114] The present invention provides a polynucleotide comprising, or alternatively consisting of, the nucleic acid sequence of SEQ ID NO:X, and/or the cDNA sequence contained in ATCC Deposit No:Z. The present invention also provides a polypeptide comprising, or alternatively, consisting of, the polypeptide sequence of SEQ ID NO:Y, a polypeptide encoded by SEQ ID NO:X or a complement thereof, a polypeptide encoded by the cDNA contained in ATCC Deposit No:Z, and/or the polypeptide sequence encoded by a nucleotide sequence in SEQ ID NO:B as defined in column 6 of Table 1C. Polynucleotides encoding a polypeptide comprising, or alternatively consisting of the polypeptide sequence of SEQ ID NO:Y, a polypeptide encoded by SEQ ID NO:X, a polypeptide encoded by the cDNA contained in ATCC Deposit No:Z, and/or a polypeptide sequence encoded by a nucleotide sequence in SEQ ID NO:B as defined in column 6 of Table 1C are also encompassed by the invention. The present invention further encompasses a polynucleotide comprising, or alternatively consisting of, the complement of the nucleic acid sequence of SEQ ID NO:X, a nucleic acid sequence encoding a polypeptide encoded by the complement of the nucleic acid sequence of SEQ ID NO:X, and/or the cDNA contained in ATCC Deposit No:Z.

[0115] Moreover, representative examples of polynucleotides of the invention comprise, or alternatively consist of, one, two, three, four, five, six, seven, eight, nine, ten, or more of the sequences delineated in Table 1C column 6, or any combination thereof. Additional, representative examples of polynucleotides of the invention comprise, or alternatively consist of, one, two, three, four, five, six, seven, eight, nine, ten, or more of the complementary strand(s) of the sequences delineated in Table 1C column 6, or any combination thereof. In further embodiments, the above-described polynucleotides of the invention comprise, or alternatively consist of, sequences delineated in Table 1C, column 6, and have a nucleic acid sequence which is different from that of the BAC fragment having the sequence disclosed in SEQ ID NO:B (see Table 1C, column 5). In additional embodiments, the above-described polynucleotides of the invention comprise, or alternatively consist of, sequences delineated in Table 1C, column 6, and have a nucleic acid sequence which is different from that published for the BAC clone identified as BAC ID NO:A (see Table 1C, column 4). In additional embodiments, the above-described polynucleotides of the invention comprise, or alternatively consist of, sequences delineated in Table 1C, column 6, and have a nucleic acid sequence which is different from that contained in the BAC clone identified as BAC ID NO:A (see Table 1C, column 4). Polypeptides encoded by these polynucleotides, other polynucleotides that encode these polypeptides, and antibodies that bind these polypeptides are also encompassed by the invention. Additionally, fragments and variants of the above-described polynucleotides and polypeptides are also encompassed by the invention.

[0116] Further, representative examples of polynucleotides of the invention comprise, or alternatively consist of, one, two, three, four, five, six, seven, eight, nine, ten, or more of the sequences delineated in column 6 of Table 1C which correspond to the same Clone ID (see Table 1C, column 1), or any combination thereof. Additional, representative examples of polynucleotides of the invention comprise, or alternatively consist of, one, two, three, four, five, six, seven, eight, nine, ten, or more of the complementary strand(s) of the sequences delineated in column 6 of Table 1C which correspond to the same Clone ID (see Table 1C, column 1), or any combination thereof. In further embodiments, the above-described polynucleotides of the invention comprise, or alternatively consist of, sequences delineated in column 6 of Table 1C which correspond to the same Clone ID (see Table 1C, column 1) and have a nucleic acid sequence which is different from that of the BAC fragment having the sequence disclosed in SEQ ID NO:B (see Table 1C, column 5). In additional embodiments, the above-described polynucleotides of the invention comprise, or alternatively consist of, sequences delineated in column 6 of Table 1C which correspond to the same Clone ID (see Table 1C, column 1) and have a nucleic acid sequence which is different from that published for the BAC clone identified as BAC ID NO:A (see Table 1C, column 4). In additional embodiments, the above-described polynucleotides of the invention comprise, or alternatively consist of, sequences delineated in column 6 of Table 1C which correspond to the same Clone ID (see Table 1C, column 1) and have a nucleic acid sequence which is different from that contained in the BAC clone identified as BAC ID NO:A (see Table 1C, column 4). Polypeptides encoded by these polynucleotides, other polynucleotides that encode these polypeptides, and antibodies that bind these polypeptides are also encompassed by the invention. Additionally, fragments and variants of the above-described polynucleotides and polypeptides are also encompassed by the invention.

[0117] Further, representative examples of polynucleotides of the invention comprise, or alternatively consist of, one, two, three, four, five, six, seven, eight, nine, ten, or more of the sequences delineated in column 6 of Table 1C which correspond to the same contig sequence identifier SEQ ID NO:X (see Table 1C, column 2), or any combination thereof. Additional, representative examples of polynucleotides of the invention comprise, or alternatively consist of, one, two, three, four, five, six, seven, eight, nine, ten, or more of the complementary strand(s) of the sequences delineated in column 6 of Table 1C which correspond to the same contig sequence identifier SEQ ID NO:X (see Table 1C, column 2), or any combination thereof. In further embodiments, the above-described polynucleotides of the invention comprise, or alternatively consist of, sequences delineated in column 6 of Table 1C which correspond to the same contig sequence identifier SEQ ID NO:X (see Table 1C, column 2) and have a nucleic acid sequence which is different from that of the BAC fragment having the sequence disclosed in SEQ ID NO:B (see Table 1C, column 5). In additional embodiments, the above-described polynucleotides of the invention comprise, or alternatively consist of, sequences delineated in column 6 of Table 1C which correspond to the same contig sequence identifier SEQ ID NO:X (see Table 1C, column 2) and have a nucleic acid sequence which is different from that published for the BAC clone identified as BAC ID NO:A (see Table 1C, column 4). In additional embodiments, the above-described polynucleotides of the invention comprise, or alternatively consist of, sequences delineated in column 6 of Table 1C which correspond to the same contig sequence identifier SEQ ID NO:X (see Table 1C, column 2) and have a nucleic acid sequence which is different from that contained in the BAC clone identified as BAC ID NO:A (See Table 1C, column 4). Polypeptides encoded by these polynucleotides, other polynucleotides that encode these polypeptides, and antibodies that bind these polypeptides are also encompassed by the invention. Additionally, fragments and variants of the above-described polynucleotides and polypeptides are also encompassed by the invention.

[0118] Moreover, representative examples of polynucleotides of the invention comprise, or alternatively consist of, one, two, three, four, five, six, seven, eight, nine, ten, or more of the sequences delineated in the same row of Table 1C column 6, or any combination thereof. Additional, representative examples of polynucleotides of the invention comprise, or alternatively consist of, one, two, three, four, five, six, seven, eight, nine, ten, or more of the complementary strand(s) of the sequences delineated in the same row of Table 1C column 6, or any combination thereof. In preferred embodiments, the polynucleotides of the invention comprise, or alternatively consist of, one, two, three, four, five, six, seven, eight, nine, ten, or more of the complementary strand(s) of the sequences delineated in the same row of Table 1C column 6, wherein sequentially delineated sequences in the table (i.e. corresponding to those exons located closest to each other) are directly contiguous in a 5′ to 3′ orientation. In further embodiments, above-described polynucleotides of the invention comprise, or alternatively consist of, sequences delineated in the same row of Table 1C, column 6, and have a nucleic acid sequence which is different from that of the BAC fragment having the sequence disclosed in SEQ ID NO:B (see Table 1C, column 5). In additional embodiments, the above-described polynucleotides of the invention comprise, or alternatively consist of, sequences delineated in the same row of Table 1C, column 6, and have a nucleic acid sequence which is different from that published for the BAC clone identified as BAC ID NO:A (see Table 1C, column 4). In additional embodiments, the above-described polynucleotides of the invention comprise, or alternatively consist of, sequences delineated in the same row of Table 1C, column 6, and have a nucleic acid sequence which is different from that contained in the BAC clone identified as BAC ID NO:A (see Table 1C, column 4). Polypeptides encoded by these polynucleotides, other polynucleotides that encode these polypeptides, and antibodies that bind these polypeptides are also encompassed by the invention.

[0119] In additional specific embodiments, polynucleotides of the invention comprise, or alternatively consist of, one, two, three, four, five, six, seven, eight, nine, ten, or more of the sequences delineated in column 6 of Table 1C, and the polynucleotide sequence of SEQ ID NO:X (e.g., as defined in Table 1C, column 2) or fragments or variants thereof. Polypeptides encoded by these polynucleotides, other polynucleotides that encode these polypeptides, and antibodies that bind these polypeptides are also encompassed by the invention.

[0120] In additional specific embodiments, polynucleotides of the invention comprise, or alternatively consist of, one, two, three, four, five, six, seven, eight, nine, ten, or more of the sequences delineated in column 6 of Table 1C which correspond to the same Clone ID (see Table 1C, column 1), and the polynucleotide sequence of SEQ ID NO:X (e.g., as defined in Table 1A, Table 1B, or Table 1C) or fragments or variants thereof. In preferred embodiments, the delineated sequence(s) and polynucleotide sequence of SEQ ID NO:X correspond to the same Clone ID. Polypeptides encoded by these polynucleotides, other polynucleotides that encode these polypeptides, and antibodies that bind these polypeptides are also encompassed by the invention.

[0121] In further specific embodiments, polynucleotides of the invention comprise, or alternatively consist of, one, two, three, four, five, six, seven, eight, nine, ten, or more of the sequences delineated in the same row of column 6 of Table 1C, and the polynucleotide sequence of SEQ ID NO:X (e.g., as defined in Table 1A, Table 1B, or Table 1C) or fragments or variants thereof. In preferred embodiments, the delineated sequence(s) and polynucleotide sequence of SEQ ID NO:X correspond to the same row of column 6 of Table 1C. Polypeptides encoded by these polynucleotides, other polynucleotides that encode these polypeptides, and antibodies that bind these polypeptides are also encompassed by the invention.

[0122] In additional specific embodiments, polynucleotides of the invention comprise, or alternatively consist of a polynucleotide sequence in which the 3′ 10 polynucleotides of one of the sequences delineated in column 6 of Table 1C and the 5′ 10 polynucleotides of the sequence of SEQ ID NO:X are directly contiguous. Nucleic acids which hybridize to the complement of these 20 contiguous polynucleotides under stringent hybridization conditions or alternatively, under lower stringency conditions, are also encompassed by the invention. Polypeptides encoded by these polynucleotides and/or nucleic acids, other polynucleotides and/or nucleic acids that encode these polypeptides, and antibodies that bind these polypeptides are also encompassed by the invention. Additionally, fragments and variants of the above-described polynucleotides, nucleic acids, and polypeptides are also encompassed by the invention.

[0123] In additional specific embodiments, polynucleotides of the invention comprise, or alternatively consist of, a polynucleotide sequence in which the 3′ 10 polynucleotides of one of the sequences delineated in column 6 of Table 1C and the 5′ 10 polynucleotides of a fragment or variant of the sequence of SEQ ID NO:X are directly contiguous Nucleic acids which hybridize to the complement of these 20 contiguous polynucleotides under stringent hybridization conditions or alternatively, under lower stringency conditions, are also encompassed by the invention. Polypeptides encoded by these polynucleotides and/or nucleic acids, other polynucleotides and/or nucleic acids encoding these polypeptides, and antibodies that bind these polypeptides are also encompassed by the invention. Additionally, fragments and variants of the above-described polynucleotides, nucleic acids, and polypeptides are also encompassed by the invention.

[0124] In specific embodiments, polynucleotides of the invention comprise, or alternatively consist of, a polynucleotide sequence in which the 3′ 10 polynucleotides of the sequence of SEQ ID NO:X and the 5′ 10 polynucleotides of the sequence of one of the sequences delineated in column 6 of Table 1C are directly contiguous. Nucleic acids which hybridize to the complement of these 20 contiguous polynucleotides under stringent hybridization conditions or alternatively, under lower stringency conditions, are also encompassed by the invention. Polypeptides encoded by these polynucleotides and/or nucleic acids, other polynucleotides and/or nucleic acids encoding these polypeptides, and antibodies that bind these polypeptides are also encompassed by the invention. Additionally, fragments and variants of the above-described polynucleotides, nucleic acids, and polypeptides are also encompassed by the invention.

[0125] In specific embodiments, polynucleotides of the invention comprise, or alternatively consist of, a polynucleotide sequence in which the 3′ 10 polynucleotides of a fragment or variant of the sequence of SEQ ID NO:X and the 5′ 10 polynucleotides of the sequence of one of the sequences delineated in column 6 of Table 1C are directly contiguous. Nucleic acids which hybridize to the complement of these 20 contiguous polynucleotides under stringent hybridization conditions or alternatively, under lower stringency conditions, are also encompassed by the invention. Polypeptides encoded by these polynucleotides and/or nucleic acids, other polynucleotides and/or nucleic acids encoding these polypeptides, and antibodies that bind these polypeptides are also encompassed by the invention. Additionally, fragments and variants of the above-described polynucleotides, nucleic acids, and polypeptides, are also encompassed by the invention.

[0126] In further specific embodiments, polynucleotides of the invention comprise, or alternatively consist of, a polynucleotide sequence in which the 3′ 10 polynucleotides of one of the sequences delineated in column 6 of Table 1C and the 5′ 10 polynucleotides of another sequence in column 6 are directly contiguous. Nucleic acids which hybridize to the complement of these 20 contiguous polynucleotides under stringent hybridization conditions or alternatively, under lower stringency conditions, are also encompassed by the invention. Polypeptides encoded by these polynucleotides and/or nucleic acids, other polynucleotides and/or nucleic acids encoding these polypeptides, and antibodies that bind these polypeptides are also encompassed by the invention. Additionally, fragments and variants of the above-described polynucleotides, nucleic acids, and polypeptides are also encompassed by the invention.

[0127] In specific embodiments, polynucleotides of the invention comprise, or alternatively consist of, a polynucleotide sequence in which the 3′ 10 polynucleotides of one of the sequences delineated in column 6 of Table 1C and the 5′ 10 polynucleotides of another sequence in column 6 corresponding to the same Clone ID (see Table 1C, column 1) are directly contiguous. Nucleic acids which hybridize to the complement of these 20 lower stringency conditions, are also encompassed by the invention. Polypeptides encoded by these polynucleotides and/or nucleic acids, other polynucleotides and/or nucleic acids encoding these polypeptides, and antibodies that bind these polypeptides are also encompassed by the invention. Additionally, fragments and variants of the above-described polynucleotides, nucleic acids, and polypeptides are also encompassed by the invention.

[0128] In specific embodiments, polynucleotides of the invention comprise, or alternatively consist of, a polynucleotide sequence in which the 3′ 10 polynucleotides of one sequence in column 6 corresponding to the same contig sequence identifer SEQ ID NO:X (see Table 1C, column 2) are directly contiguous. Nucleic acids which hybridize to the complement of these 20 contiguous polynucleotides under stringent hybridization conditions or alternatively, under lower stringency conditions, are also encompassed by the invention. Polypeptides encoded by these polynucleotides and/or nucleic acids, other polynucleotides and/or nucleic acids encoding these polypeptides, and antibodies that bind these polypeptides are also encompassed by the invention. Additionally, fragments and variants of the above-described polynucleotides, nucleic acids, and polypeptides are also encompassed by the invention.

[0129] In specific embodiments, polynucleotides of the invention comprise, or alternatively consist of a polynucleotide sequence in which the 3′ 10 polynucleotides of one of the sequences delineated in column 6 of Table 1C and the 5′ 10 polynucleotides of another sequence in column 6 corresponding to the same row are directly contiguous. In preferred embodiments, the 3′ 10 polynucleotides of one of the sequences delineated in column 6 of Table 1C is directly contiguous with the 5′ 10 polynucleotides of the next sequential exon delineated in Table 1C, column 6. Nucleic acids which hybridize to the complement of these 20 contiguous polynucleotides under stringent hybridization conditions or alternatively, under lower stringency conditions, are also encompassed by the invention. Polypeptides encoded by these polynucleotides and/or nucleic acids, other polynucleotides and/or nucleic acids encoding these polypeptides, and antibodies that bind these polypeptides are also encompassed by the invention. Additionally, fragments and variants of the above-described polynucleotides, nucleic acids, and polypeptides are also encompassed by the invention.

Table 3

[0130] Many polynucleotide sequences, such as EST sequences, are publicly available and accessible through sequence databases and may have been publicly available prior to conception of the present invention. Preferably, such related polynucleotides are specifically excluded from the scope of the present invention. Accordingly, for each contig sequence (SEQ ID NO:X) listed in the fifth column of Table 1A and/or the fourth column of Table 1B, preferably excluded are one or more polynucleotides comprising a nucleotide sequence described by the general formula of a-b, where a is any integer between 1 and the final nucleotide minus 15 of SEQ ID NO:X, b is an integer of 15 to the final nucleotide of SEQ ID NO:X, where both a and b correspond to the positions of nucleotide residues shown in SEQ ID NO:X, and where b is greater than or equal to a +14. More specifically, preferably excluded are one or more polynucleotides comprising a nucleotide sequence described by the general formula of a-b, where a and b are integers as defined in columns 4 and 5, respectively, of Table 3. In specific embodiments, the polynucleotides of the invention do not consist of at least one, two, three, four, five, ten, or more of the specific polynucleotide sequences referenced by the Genbank Accession No. as disclosed in column 6 of Table 3 (including for example, published sequence in connection with a particular BAC clone). In further embodiments, preferably excluded from the invention are the specific polynucleotide sequence(s) contained in the clones corresponding to at least one, two, three, four, five, ten, or more of the available material having the accession numbers identified in the sixth column of this Table (including for example, the actual sequence contained in an identified BAC clone). In no way is this listing meant to encompass all of the sequences which may be excluded by the general formula, it is just a representative example. All references available through these accessions are hereby incorporated by reference in their entirety.

TABLE 3

| cDNA | SEQ ID | Contig | EST Disclaimer | | |
|---|---|---|---|---|---|
| Clone ID | NO: X | ID: | Range of a | Range of b | Accession #'s |
| H6EDM64 | 11 | 841331 | 1-2596 | 15-2610 | AL529288, AL514648, AL523579, AL523918, AL530571, AL528848, AL523917, AL523578, BE795355, BE614208, AL529287, |
| | | | | | BE797988, BE747962, BE798201, AL530750, BF689293, BE884814, BF508994, |
| | | | | | BE798313, BE613450, BE787266, AW131835, AL530749, BG248495, BE386285, BF526775, BE873469, |
| | | | | | BE299650, AL042569, BE621187, BG168950, AW410458, BE883794, BE869375, BF348689, |
| | | | | | AW239351, BE737181, BE734276, BF309636, BF129214, BG180549, AW410610, AW601905, |
| | | | | | BE621858, AA689552, BF310547, AW960649, BF953086, AL045821, BE882424, BF724804, BE019151, |
| | | | | | AW246108, BG179779, AW374338, AW675186, BE279317, BG011956, AI475847, AI394166, AI142042, |
| | | | | | AW068652, AI539419, AI970048, AI792316, AA536006, AW272491, BG012645, AI827847, BG254459, |
| | | | | | AI673493, AW007399, AI719374, AA994188, BG176564, AI707847, AW104963, AI220974, AA022523, |
| | | | | | BF807054, BG012634, BF803094, N24911, AW665019, AI458806, AA689495, AA480131, AI808412, |
| | | | | | N41812, W17347, BE772562, BG012642, BF807055, BE772573, BG011957, BG012641, AL514647, |
| | | | | | F22287, AI160580, AI149344, BE772556, AI870582, BE772568, AW801577, BG176616, AW801325, |
| | | | | | AW068651, AI197831, BE265961, AA483525, BE772566, BE772574, BE693737, AA687509, BE839398, |
| | | | | | BF799200, AA687451, AI201450, BF896481, BE772569, BE244158, BE772576, BE826728, AI452812, |
| | | | | | BE772561, AA317941, AA308425, AA745895, AW751437, BG256219, AA782657, BF373198, |
| | | | | | AA364848, AL039960, AA405870, AW963550, BE300303, N78953, AA112404, BE826586, AI061434, |
| | | | | | AI143698, AW087863, AI382254, AW731818, BE788591, AW304748, AI589259, AA357514, BF663656, |
| | | | | | AW673017, AW664622, AA524482, AW246627, BE831243, BE831271, BG055766, AI749023, |
| | | | | | AA380438, BF746714, BE839346, AW084279, AA113160, BF529848, AI160508, BF764174, BF752908, |
| | | | | | AA053148, AW842671, F32117, AI190107, BF752929, BE547478, AA977756, AA360528, AA022454, |
| | | | | | BF808843, BF813892, AI917965, BG011699, BG012316, BF373193, BG122581, AA622680, BF688484, |
| | | | | | BE772558, AA053706, AA733114, BG012318, AW880294, AA482098, BE256450, BE831281, |
| | | | | | BF765811, BF803085, BE243388, AA774840, AA576098, BE831236, BE772816, AF024631.2, |
| | | | | | BC007198.1, BC009285.1, AF096303.1, U73627.1, AF061779.1, AC004923.2, AF238378.3, AC000385.1. |
| H6EEU40 | 12 | 757048 | 1-937 | 15-951 | AL534759, AL521087, AL523775, AL518427, AL518354, AL517326, BE741563, BF569745, BF337372, |
| | | | | | BF570471, BF969174, BG032740, AL536265, BF026597, BE274743, BE546314, AL522079, BE538554, |
| | | | | | AW960892, BE395781, BE465235, BG167967, BE275462, AI160737, BF804270, BE538514, AA653290, |
| | | | | | BG163271, AI341701, W94467, AW084148, AI634272, AI634641, AI266283, AI366893, AW409760, |
| | | | | | AW075307, BF223869, AA604286, AI262840, AA479733, AI985719, W94359, AI271832, AW439127, |
| | | | | | AI740653, AI500535, AI674680, AW245294, BF032823, BE350203, AI869835, R85540, BF437722, |
| | | | | | AI394604, AA825592, AW469385, R60570, AI620873, AW470050, AA788601, BE300983, R72347, |
| | | | | | N77923, AA939017, R72299, R87968, R85120, Z41206, T16501, AA482633, H40664, AA297447, |
| | | | | | AA081389, R85549, AA558602, AW175922, AA987713, AI628307, AI199953, BG056252, AI382799, |
| | | | | | AA968853, AA148651, AI289139, AI281228, AA298765, F09249, W94940, AI282067, AI262509, |
| | | | | | AI200241, AV735503, AI921784, AI628244, T32046, AA302912, AI417848, AI468747, AW055372, |
| | | | | | AA857797, AA244103, AI581120, AA679586, AI634273, AA694158, AA946762, AA608791, AI124016, |
| | | | | | H46898, W46963, AA584396, AI797302, AL518355, AL523776, H27881, AL518428, H84434, N99004, |
| | | | | | AI540357, D31570, BF765616, AA132303, AA814926, BE812370, AW404688, AL532367, AL534760, |
| | | | | | AA887999, AL530884, AL526404, BE937700, R46056, AL517327, AL536266, R40219, AW468110, |
| | | | | | H24286, AA522908, AI567331, H26975, T81176, AW369400, T80775, AI952287, AW797699, |
| | | | | | BE782422, AA872110, BE613072, AW269694, BE870596, AA490287, AI336931, BE937686, BE741460, |
| | | | | | BE937697, AI910098, AI583322, BE962616, BE932414, AL533205, AI905196, AL521088, AA479862, |
| | | | | | AK000120.1, AL096714.1, BC007519.1. |
| HACBJ56 | 13 | 847112 | 1-874 | 15-888 | AA157001, BE348653, AW027639, AA534339, AW001883, AA363258, AW959379, T71037, |
| | | | | | AW953765, BE048583, BF878388, T67200, AW393348, AW393350, AW384705, AW386713, |
| | | | | | AA156760, AW055343, BF892732, BE140594. |
| HACBS22 | 14 | 847113 | 1-3225 | 15-3239 | AU124073, BG253611, AW965191, BG115564, BF032820, AW965203, BF306517, BF304908, |
| | | | | | BF306593, BF982389, BF033269, AW890326, BF983369, AI302793, BF591498, AI567467, AV711792, |
| | | | | | AA429582, AI422294, AI859789, AA433987, AA814217, AA252998, AA279301, AA411385, AI342153, |
| | | | | | BE328862, BF127455, BF223404, BE073310, AW131093, AI061457, AW886431, BF316718, AI418930, |
| | | | | | AI126382, BF334564, BF115589, BF229901, AI199632, AI083697, AI076499, AI565545, AI083759, |
| | | | | | AW168955, AI075711, AA451848, AI832008, AA278862, AA406270, AA039587, AA603155, AI654833, |
| | | | | | AI217940, T67815, AA004762, BG056988, AW166397, W48835, AA857111, AA099992, AI283878, |
| | | | | | AA156539, AI268898, AA311784, AA625982, AW081237, AI431333, AW337580, AA157697, |
| | | | | | AI142910, AA434158, AW953535, AA281247, AI886152, AA099991, AI222819, AA279346, AA464193, |
| | | | | | AW902181, H41843, AA292181, T41156, T41125, AA918848, AV725329, AW237010, R20286, |
| | | | | | AA864669, H53657, BG008052, R22827, AA366602, AA456430, AA323466, AA897397, AA399222, |
| | | | | | BG002413, AA278539, R15382, BF899835, BE746477, R73996, AW663090, F03040, BG005938, |
| | | | | | R23319, BG002290, F06777, AA431990, AA884057, AI696614, BG002306, AA743065, AW805802, |
| | | | | | T40225, AA004763, H41803, T26456, R49943, H78738, AA598528, H78725, BE242201, AW769702, |
| | | | | | H79499, AW804514, H79512, AW589498, R08207, AA446922, BG008055, R42123, AI040559, H53618, |
| | | | | | BE938610, R23242, BF943906, T41091, W49816, BG007599, BF746451, T40268, BF943900, BE242322, |
| | | | | | T26457, BG007600, AA779288, AA620918, AA345630, T67965, BF943907, BF230057, T40261, |
| | | | | | AL120752, R43626, AA159388, H69584, AA252997, BE247168, R73903, R46015, AW189448, |
| | | | | | BE241991, AI868154, AI953925, AI421607, BF869086, BE939781, AA894421, AA039586, AA324932, |
| | | | | | AI498022, AW965271, AW300921, AW965468, BF871875, W68610, BE242008, BF829222, AA333777, |
| | | | | | R08258, AA400456, BE769384, AA332944, BE267667, AI147721, R49942, BG121728, W42651, |
| | | | | | BF243188, BG170063, AA815037, BE257390, BE790941, BF808078, AW977805, AW291305, T81704, |
| | | | | | AB011083.1, AF033861.1, AK027857.1, AK027859.1, AF087963.1, BC002870.1. |
| HACBT91 | 15 | 789939 | 1-827 | 15-841 | AW957974, AW003857, AI820045, AI523911, AW084836, AI983096, AI333432, AW188197, BF338099, N41047, AI433769, AI379333, |
| | | | | | AW438811, AA927750, BE139611, AI435307, BF436802, AW613586, |
| | | | | | R71675, AA678318, AA748856, AA301830, AI337423, AW243869, AA577365, AI382805, AI926335, |
| | | | | | AA568182, R47922, AA057770, R50081, BE247721, AI539624, AI698267, AI224055, BE244865, |
| | | | | | AI365443, N47137, AA903242, AV707146, AW955723, AV702790, AV701751, AW962407, AV705416, |
| | | | | | AI535639, AV705047, AW954994, AV703012, AW957544, BF380516, AV729076, AV707458, |
| | | | | | AV706060, AV704785, AV701728, AV709232, AW957628, AW954206, AV709235, AV707753, |
| | | | | | AV686390, AW955616, AW961393, AV725497, AV729376, AV728436, AV697196, AW958846, |
| | | | | | AW963660, AW951562, AW949999, AI535660, AV728733, AV692600, AV727314, AV703766, |
| | | | | | AV705319, AW959907, AW950888, AV656903, AW956199, AW957853, AV704180, AV696106, |
| | | | | | AV706223, AW963378, AW964540, AV727238, AV705869, AV705811, AW953969, AV689111, |
| | | | | | AW961593, AV695545, AV702266, AW952064, AV704955, AW963868, AV705135, AI525856, |
| | | | | | AW949731, AW958280, AV686420, AV686100, AV726103, AV695752, AV693523, AV709551, |
| | | | | | AV702861, AW951707, AV694674, AV709101, AV698429, AV702372, AV697498, AW950597, |
| | | | | | AW952223, AV692691, AV706229, AW958916, AV701067, AV658334, AV728670, AV705562, |
| | | | | | AW949729, AW955152, AV684962, AV729378, AW949523, AW957102, AV705134, AV685966, |
| | | | | | AW955662, AI536138, AW956637, AV653325, AV705693, AV702498, AW950199, AV708203, |
| | | | | | AW964369, AV701643, AW950172, AV707002, AV725153, AV706136, AI557602, AW955904, |
| | | | | | AV727916, AW950411, AV707024, AW949529, AV706147, AW963601, AW953788, AV647006, |
| | | | | | AV702035, AV705520, AW954782, AW951743, AW957682, AV702172, AW966604, AV705453, |
| | | | | | AW952368, AW956762, AW962384, AV654287, AV708025, AV728309, AW950079, AV708980, |
| | | | | | AW965813, AW958901, AW959980, AW955841, AV705959, AV725697, AW950395, AV706910, |
| | | | | | AW959982, AW950443, AW950248, AV708850, AV707329, AV703635, AW954237, AV704798, |
| | | | | | AV703030, AV703542, AW959543, AW963011, AW963750, AW950671, AW955713, AV725948, |
| | | | | | AW949451, AW966756, AV729132, AV701881, AW949927, AV653809, AW955609, AV649672, |
| | | | | | AW950446, AW949351, AV702673, AW957110, AW954372, AV728874, AV685955, AW949530, |
| | | | | | AW959828, AW964111, AW960601, AV705185, AW966444, AW950012, AW962444, AV725001, |
| | | | | | AV703494, AW959806, AV705981, AW952403, AW957987, AW966603, AV726789, AV661704, |
| | | | | | AV706893, AW964673, AV727978, AV706459, AW953797, AV707414, AK025994.1, U94592.1, |
| | | | | | Y08991.1, Z30183.1, AF217994.1, U45328.1. |
| HADDJ13 | 16 | 827273 | 1-2304 | 15-2318 | AW575129, AW022897, AA010299, AU144131, AA669573, F11929, AL138228, AA634252, T66105, |
| | | | | | AA219059, R91924, R51726, AA856981, AA782322, AC079383.17, AC004552.1, Z95118.1, |
| | | | | | AF224669.1, AC018797.4, AC003035.1, AL161436.12, AC008625.5, AC002565.1, AC002350.1, |
| | | | | | AL390738.4, AC073593.13, AL354932.26, AC004491.1, AC011497.6, AC051619.7, AC008440.8, |
| | | | | | AF205588.1, AC007546.5, AC005250.1, AC016594.6, AC006038.2, AL031120.1, AC020658.6, Z84469.1, |
| | | | | | AC018719.4, AC006080.1, AF324890.1, AL354873.19, AL391259.15, AL162615.13, AL034372.33, |
| | | | | | AC018639.8, AL132777.4, AC004605.1, AL352978.6, AL160269.14, AL136000.4, AC024168.4, |
| | | | | | AL080275.20, AC090942.1, AC004685.1, AC008901.5, Z82198.2, AL121578.1, AC013734.4, |
| | | | | | AL133286.9, AC002091.1, AL356575.8, AC007934.7, AC005035.1, AL031311.1, AC005840.2, |
| | | | | | AL117337.25, AL035400.13, AC068724.7, AC007225.2, AL499604.9, AC005208.1, AL139785.5, |
| | | | | | AC002368.1, AC011484.4, AL162233.14, AC018637.3, AC091493.1, AL035555.10, AL136231.12, |
| | | | | | AP001714.1, AC044797.5, AC006211.1, AC009779.18, AL160155.19, AP000512.1, AC079754.4, |
| | | | | | AL391987.15, AP001732.1, AC083861.2, AC024060.5, AC025262.27, AL158069.16, AB023051.1, |
| | | | | | AC087311.22, AC078833.3, AC005670.1, AL391136.9, AL163267.2, AL080315.18, AC022201.4, |
| | | | | | AL138721.16, AC007318.4, AC005529.7, AL121594.6, AL136300.22, AL391114.12, AC006285.11, |
| | | | | | AL079342.17, AL031293.1, U82671.3, AC011310.3, U52111.2, AC018812.5, AL136365.9, AC078846.2, |
| | | | | | AL356379.10, AC007358.2, AL162231.20, AC000085.5, AC072061.8, AC010234.5, AC007151.2, |
| | | | | | AL445669.9, AL079340.7, AL445928.8, AC007363.3, Z94056.1, AC012377.5, AC006195.1, |
| | | | | | AL139109.14, AC002312.1, AC012368.6, AL022164.1, AC027124.4, AC005884.1, AC016574.6, |
| | | | | | AC010735.11, AL358815.12, AC008009.4, AL109964.20, AL161793.9, AL139092.12, AC010326.6, |
| | | | | | AC003950.1, AC002351.1, AC022468.5, AE000658.1, AC009484.3, AL031659.9, AC009247.12, |
| | | | | | AL138836.15, AL121595.5, AC004674.1, AC007386.3, AL355339.7, AC025168.7, AC021188.6, |
| | | | | | AP001731.1, AL138832.10, AC007228.1, AL355530.6, AJ009612.5, AP001671.1, AC015853.8, |
| | | | | | AC073607.19, AL137230.3, AL031295.1, AL122125.4, AC018641.3. |
| HADMA77 | 17 | 783049 | 1-1899 | 15-1913 | BE886986, AL118575, BF963505, BE896957, AA019981, AI871227, AW958870, AI148306, AI090074, |
| | | | | | AA594961, AI620245, N62115, AI499838, BE139496, AA253149, H37934, AW953772, AA398760, |
| | | | | | BE883579, AW008316, R17479, AI934670, AA253150, AI436173, AI446137, D59581, AI128007, |
| | | | | | R54297, H42535, D61056, D80139, R61184, AI197892, AA729655, D51488, H55864, H55771, AI075689, |
| | | | | | AA911710, AA292804, H86756, BF963502, T57670, AI961860, H42534, D51454, D81542, T34704, |
| | | | | | D80154, D81775, AA001440, T59256, D59479, R42975, R61185, AA994602, D51481, D51437, D59463, |
| | | | | | D59482, R46039, R51909, AA359928, AA659063, N79566, Z40268, R25021, R42826, D52193, Z42365, |
| | | | | | AA358058, T57710, AV656695, AL048093, R43779, AW276733, AA365016, AL048094, F01883, |
| | | | | | AA708838, C14366, N78346, AI601109, W16551, R18081, C00235, BF663261, BC007974.1. |
| HADMB15 | 18 | 847116 | 1-316 | 15-330 | AW136268, BG056888, AI131328, AI174443, AI091646, AW117296, AW168872, AI082447, AI432175, AI290911, AI741489, AI682685, |
| | | | | | AI142536, BG059892, AW149659, AW071935, AA233541, AI183690, |
| | | | | | BG056462, AI689641, AA599916, BF196591, BF196843, AA199743, AW136277, N77910, AA564806, |
| | | | | | AA243035, AA779709, AV722133, AI032138, AA844525, AI467910, AW965361, AA852418, AI982751, |
| | | | | | AI282445, AI982761, T03902, AI420648, AW167499, H08108, BE328548, AW068986, C15651, D52660, |
| | | | | | AW665899, AI246702, AI538705, AI271662, AI435112, AI288692, BE466948, AI690048, D55112, |
| | | | | | AA779042, AL536118, D53747, D54101, AA486941, D53384, W07076, AA232504, AA486765, |
| | | | | | BF832290, AI038647, AW497637, BF947006, AU155428, T05461, AL136582.1, BC001207.1, |
| | | | | | AB040527.1, AB058762.1, AB040528.1, AB040529.1. |
| HAGBQ12 | 19 | 722205 | 1-729 | 15-743 | AI332690, AI374724, AI285345, AA876359, AA987498, AI702600, AI079453, AI382918, C04098, |
| | | | | | R63800, AI697895, H87363, R67068, BE673734, R73892, BF432849, R68633, R68632, R66112, H03322, |
| | | | | | AA340294, H87907, AP000350.1, AC007363.3, AC003969.1, AC005948.14, AP000360.1, AC004066.1, |
| | | | | | AC000053.2, AC002060.3, AL450169.1, AL033522.1. |
| HAGCC87 | 20 | 638587 | 1-1578 | 15-1592 | AA587370, AA351604, AA661545, R22639, R22638, R18189, AA650370, AI459585, AI810301, R17880, |
| | | | | | BF434228, BE811111, BE701381, AA572974, BF857849, T50676, AL120282, AW168846, AI192440, |
| | | | | | AA714288, AI268019, AI745335, BF681619, BF828236, AU117483, BE147135, AA503298, AW513071, |
| | | | | | BE675695, AI811846, AI203527, AI079823, AI826761, AA634991, AI355007, AW769654, AI249365, |
| | | | | | AA704040, AA602951, AA652834, AV762430, W02749, AA836552, AF236698, AA492105, AA747977, |
| | | | | | AA948670, AI523316, AW337805, AI565126, AI610737, AA405726, AW512528, AI499954, AW013787, |
| | | | | | AA565232, AI917636, AI869797, AI133083, BG056992, AI887235, AA483075, AI366555, BE906142, |
| | | | | | AA425924, N33184, AA282951, AA773473, BF868994, AA833896, AA775188, AA251356, AA833875, |
| | | | | | BF845126, T17332, AW589345, AA736488, AW747980, BE677126, AA713705, AA904211, H91062, |
| | | | | | BF991881, AW194325, BF447461, BF032064, AL118612, AL034430.4, AL138878.10, AL133332.12, |
| | | | | | AL117380.28, AL161725.13, AP000143.1, AC004650.1, AL160155.19, AL035086.12, AL512310.3, |
| | | | | | AL450265.11, AL022393.1, AC004166.12, AC024167.5, AL390918.7, AL135960.1, AJ131016.1, |
| | | | | | AL035683.9, AF196969.1, AP001695.1, AL049795.20, AC079174.20, AP000090.1, AC002542.1, |
| | | | | | AC087777.2, AP000893.5, AL365364.19, AL118525.17, AC003962.1, AC004540.1, AL022238.1, |
| | | | | | AC003665.1, AC005042.1, AC007597.3, D87675.1, AC004662.1, AP001972.4, AP003438.2, |
| | | | | | AL365223.19, AC010223.5, AC000379.1, AL161670.4, AP001694.1, AC004820.2, AL035594.7, |
| | | | | | AC004776.1, AC008537.5, AL138759.20, AC002312.1, AL360270.18, AC083884.6, AL031663.2, |
| | | | | | AC006213.1, AL139322.13, AL356017.3, AC008906.5, AL031726.22, AL355385.15, AC012170.6, |
| | | | | | AL158147.17, AL138761.12, AL360089.13, AC000085.5, AC079141.7, AL109938.8, AP002847.2, |
| | | | | | AL512430.14, Z86064.1, AC006511.5, AC055745.23, AL138784.30, AC004987.2, AF168787.1, |
| | | | | | AC023600.19, AP001718.1, AP000171.1, AP000056.1, AL512658.12, AL031774.1, L78833.1, Z82190.1, |
| | | | | | AC034186.4, AL031319.5, AP000124.1, AL121902.13, AC012368.6, AL133418.4, AL121997.7, |
| | | | | | AC005856.1, AL137800.12, AC078961.23, AP001706.1, AL163210.2, AC009996.7, AC026164.5, |
| | | | | | AL050349.27, AC006251.3, AC020604.9, AC011003.7, AC023510.16, AC005913.2, AJ400879.1, |
| | | | | | AC007367.3, AL360230.20, AP000330.1, AL132986.4, AL590611.7, AL445489.10, AC026203.3, |
| | | | | | AL031427.15, AL033378.12, AL031577.1, AC090514.1, AC024093.46, AC026202.6, AC009220.10, |
| | | | | | AC006455.2, AC005047.3, AL031584.1, AC008685.7, AC006039.2, AC009499.4, AC005091.1, |
| | | | | | AC005924.2, AL358354.16, AL031123.14, AC002044.1, AC018821.4, AL139274.17, AC013468.12, |
| | | | | | Y10196.1, AC067941.7, AC010340.7, AC068102.4, AC003108.1, AC006023.2, AC084865.2, |
| | | | | | AC018686.7, AC006928.15, AC007130.2, AL117330.6, AL031594.9, AL392044.7, AC068724.7, |
| | | | | | AL450344.4, AL118520.26, AL121929.17, AC073927.9, AC005358.1, AL034346.31, AL445590.4, |
| | | | | | AP001728.1, AF205588.1, AC022116.5, AP000851.4, AL034372.33, AC005098.2, AP001432.1, |
| | | | | | AC025540.7, AL357912.10, AC005065.1, Z95116.1, AL139021.6, AL590037.7, AP000462.2, |
| | | | | | AC007955.4, AP000151.1, AL139125.18, AB017654.1, AL159140.4, AC005343.1, AC090950.1, |
| | | | | | AC018641.3, AL117337.25, AL034421.7, AL160471.5, AL080243.21, AC022469.5, AL590073.6, |
| | | | | | AC023114.5, AL031295.1, Z86061.1, AC007458.13, AL163195.5, AL049832.3, AC012519.9, |
| | | | | | AL022069.1, AL162551.3, AC007005.3, AC004167.1, AL358434.16, AC005099.1, AL138876.23, |
| | | | | | AC006460.3, AC004477.1, AL445217.3, AP002015.3, AL138958.18, AC004802.1, AC007254.3, |
| | | | | | AC016579.5, AL391262.3, AC018752.4, AL022329.9, AL133453.3, AP001646.4, AC007270.2, |
| | | | | | AP000469.2, AL359645.15, AC011246.6, AC003043.1, AC005971.5, AC009032.7, AL353752.6, |
| | | | | | AC004911.1, AC034207.4, AL356057.12, AC009482.4, AC083868.2, AC007256.5, AC069262.24, |
| | | | | | AL353741.16, Z98200.8, AP001708.1, AL391839.9, AL118556.4, AL137072.8, AC015971.4, |
| | | | | | AC010553.6, AC012634.7, AP001717.1, AP000567.2, N55064. |
| HAGFJ67 | 21 | 861680 | 1-2108 | 15-2122 | AW976110, AA214080, AI769673, AW069286, AA722813, AA503101, AI131547, AI378850, AI378385, |
| | | | | | BE503917, N49844, AI367840, AA443026, AA426172, AW150828, AA453753, AW969343, AL523084, |
| | | | | | AI335682, AA430073, AA463468, AW016254, AI033532, AA425541, W93005, AI373438, AA454019, |
| | | | | | AI076112, AA747308, AI471960, Z44094, AI434535, R53526, AA291531, AI280478, W93006, |
| | | | | | AW016405, R50852, AI081696, AI219348, R35192, AI698625, BE698931, T89701, AW594327, T16616, |
| | | | | | Z40118, AW865791, AW947328, H01675, W42758, AW466986, AA760631, AI830647, AL523085, |
| | | | | | H13648, H13649, T89799, W42701, AW969345, AW969483, AW865604, BG113370, AA451809, |
| | | | | | AV699404, H10264, AV699118, AW938833, AV699156, AV662268, AV725100, AV749106, AV728821, |
| | | | | | AV662225, AV726109, AF109907.1, AC004846.2. |
| HAGFS57 | 22 | 847120 | 1-860 | 15-874 | BF893958, AL079477, BE221875, AL532698, AI299412, R51649, AL040440, AA339493, F12505, |
| | | | | | F05649, Z43527, F06606, R12847, BF690787, R25251, T74335, AW382934, AB020663.1. |
| HAGHN57 | 23 | 773286 | 1-2426 | 15-2440 | AL533248, AU118622, AU119331, AU133909, AU119469, AU118182, BE794468, BE791529, BG176702, BE280450, |
| | | | | | BE729801, BF663566, BF970116, BE257176, BG032912, AL516224, BG121097, |
| | | | | | BE784191, BG249033, BE727671, BE881192, BE745390, BF792305, BF037862, AV710149, BE617085, |
| | | | | | AV751361, AW291174, BG163346, AI686123, BG033409, AV762315, AV704873, BE540243, |
| | | | | | BF344980, AV707943, BF671351, BE394881, AW070780, BE538770, BF303671, BE541947, |
| | | | | | AW963773, BF303913, AW299817, BE378370, AW299807, BF107096, AW515893, AI338838, |
| | | | | | BE254836, AW402330, AA455894, AI436127, AL516223, BF001973, AI392820, W31025, W28207, |
| | | | | | BE535313, BE258523, BF109189, AA182513, BE617702, AW275883, AW674662, BG169977, |
| | | | | | BE711218, AA134574, AW304388, AA588768, BE868534, AU144819, AA455892, BF802948, |
| | | | | | BF222585, AW902162, H16095, AI034153, AU145137, AI905391, AI985354, BG011776, AW612879, |
| | | | | | BE711276, AV659416, AU150558, BE702340, BF055535, BE711244, AA652292, AW271981, |
| | | | | | AA780056, AI624858, AA319693, AA604113, AV744893, AW771218, AV742941, AA837954, T60588, |
| | | | | | AA150957, AA151047, AI991761, AI912891, AI628783, AI434787, AW072744, AA716130, BF807693, |
| | | | | | AA181782, AI554969, AA916968, AA101864, AI473865, AA362607, AW338509, AI525459, BE244147, |
| | | | | | AI928082, AI433249, BF062859, AI910904, AA285264, BE711295, AI354885, AW006732, AI950274, |
| | | | | | AU144122, AI990867, AI922170, AA115829, AA806393, BE672240, AU156842, BE243206, AI633602, |
| | | | | | W01852, BE711219, AI280611, AA707161, AA301320, BF197637, AI695111, AW966603, BF447153, |
| | | | | | F29695, BE378061, AA336840, AI424341, AA385049, AI307649, N58884, AA131117, AI205138, |
| | | | | | BF431130, BF807685, N98771, AA602492, BE711204, BF438567, F34557, AA748737, T60437, |
| | | | | | AA745028, AW891490, AW673414, AI630237, AW378199, AW779341, BE172988, BE172375, |
| | | | | | AA101187, AA781579, AI478435, BE699167, R57333, AI927982, R92570, BE764834, BF818234, |
| | | | | | AA648053, BE464290, AK000994.1, AC004668.1, AL050216.1, AA227675. |
| HAGHR18 | 24 | 655435 | 1-1128 | 15-1142 | AA678513. |
| HAJAA47 | 25 | 534670 | 1-1223 | 15-1237 | BF991208, BF743765, AW021917, T74524, T57767, AI491765, N22058, AA904275, AA228349, |
| | | | | | AI689019, AA054085, AU131834, BE256101, AW270771, AL119691, AI284543, AU118852, BE062478, |
| | | | | | AI859946, BF769528, AW873261, AW152178, AC009318.11, AL161656.20, AC011811.42, AC018462.4, |
| | | | | | AL023799.5, AC012170.6, AL137796.6, AP000704.2, AL499628.1, AC007934.7, AC005082.3, |
| | | | | | AC006111.3, AP001711.1, U91323.1, AC002407.1, AL031680.20, AL356244.12, AL391280.15, |
| | | | | | AC008526.5, AE006639.1, AC009131.6, AL132987.4, AP000103.1, AL158207.15, AL049540.11, |
| | | | | | AC013434.8, AP000269.1, AC008755.6, AC008592.4, AL355336.15, AK024933.1, AC090518.2, |
| | | | | | AE006640.1, AP000212.1, AL133211.9, AC008924.5, AL035422.12, AP000280.2, AC011471.6, |
| | | | | | AC018719.4, AC005200.1, AC005000.2, AC017079.5, AC004858.2, AL133163.2, AC011472.7, |
| | | | | | AC009488.5, AF045555.1, AC009756.9, AC007546.5, Z98044.13, AP000107.1, AC008267.6, |
| | | | | | AC005520.2, Z98050.1, AL121933.15, AC002994.2, AC009137.6, AL133174.15, U47924.1, AP000031.1, |
| | | | | | AP000354.1, AC011224.8, AL162430.15, AC008450.5, AL021154.1, AC011449.6, AP000039.1, |
| | | | | | AC000025.2, AC004526.1, AP000355.1, AL356057.12, AL137798.8, AC012085.4, AC004383.1, |
| | | | | | AC004998.2, AL049713.20, AC005077.5, AC011485.6, AC004253.1, AL449209.2, AP000065.1, |
| | | | | | AP000134.1, AC008521.5, AP000446.5, AC004477.1, AC022173.7, AL356915.19, AL031432.1, |
| | | | | | AC026172.3, AP001727.1, AL139415.10, AC012351.3, AC011442.5, AC009412.6, AC005920.1, |
| | | | | | AL157858.5, AC010271.6, AC010636.6, AL513550.9, AL009183.10, AC020983.7, AL109811.39, |
| | | | | | AL109797.18, AL022237.1, AC069262.24, AC024078.4, AC004232.1, AC007371.16, AL157882.5, |
| | | | | | AC011470.5, AC008753.8, AL590762.1, AC005484.2, AF109907.1, AC009155.3, AC004882.2, |
| | | | | | AL109827.8, AC011452.6, AL121891.22, AL109804.41, AC011465.4, U63721.1, AL357515.26, |
| | | | | | AL512347.14, AC008738.6, Z81364.1, AC025280.4, AL138878.10, AL050308.9, AL117380.28, |
| | | | | | AP000471.2, AC002487.1, AL161659.17, AC008764.7, AC005480.3, AC005841.3, AC003070.1, |
| | | | | | AL022163.1, AJ224877.1, Z93017.6, AC005220.1, AC004821.3, AC005755.1, AC005944.1, AC010319.7, |
| | | | | | AF157623.1, AJ012824.1, AL353701.15, AL135783.6, AL359236.4, AL122020.5, AL133264.10, |
| | | | | | AC007366.4, AP001714.1, AL352979.4, U62293.1, AC003959.1, AL359092.14, AC008403.6, |
| | | | | | AC004968.1, AC011475.6, AC008747.5, AC005409.1, AC027644.9, AC020916.7, AL139353.3, |
| | | | | | AP001752.1, AL160397.17, AL022312.7, AC005231.2, AC020904.6, AC018663.3, AC010170.3, |
| | | | | | AL356378.17, AL137073.13, AC005288.1, AL049872.3, AL133405.17, AC008249.14, AC002389.1, |
| | | | | | AC002492.1, AL139405.11, AL136126.34, AL009179.1, AC073517.5, AC007057.3, AC013356.8, |
| | | | | | AL137852.15, AL138707.10, AL049775.2, AL135744.4, AC011816.17, AL135752.6, AC007345.5, |
| | | | | | AC073073.2, AL034402.9, AL160175.5, AJ277546.2, AC020552.4, AC011742.3, AL353777.18, |
| | | | | | AC008805.7, AL139317.5, AC002301.1, AC010458.5, AC009965.9, AP001719.1, Z98200.8, AC007163.3, |
| | | | | | AP000167.1, AP000052.1, AC072052.6, Y15994.1, AC002430.1, AL021940.1, Z98752.16. |
| HAJAY92 | 26 | 845601 | 1-2331 | 15-2345 | AI208943. |
| HAJBV67 | 27 | 866415 | 1-2522 | 15-2536 | BG252656, BF732416, AV713753, BE905485, BF062374, BF445098, BF110352, BG252894, BE620095, |
| | | | | | BG249923, BE867752, AW606977, BG171028, AW576585, BE868698, BF671587, AW860769, |
| | | | | | BF941584, BF986308, AW305358, BF037687, BE541890, AW958924, AW974216, BF105260, |
| | | | | | AL048954, BF434917, AA057428, AW860733, BF664978, AI040432, BF984881, BF114918, BE872774, |
| | | | | | BE349491, AW263003, BF697715, BF382321, BE938703, AI378631, BF447674, AA446149, AA044378, |
| | | | | | BG114831, BF815345, BF085497, BF815237, BF210190, AA579908, BF132467, AA437015, AW860753, |
| | | | | | AI741531, AI742016, AI963805, AV748930, AA457625, BF815346, N31845, AI927889, BF699623, |
| | | | | | AA587067, AA831367, AI038411, AA442844, AI382172, BF084350, AW993684, AW407667, BF029928, |
| | | | | | AW028681, BE327066, BF887305, AV695738, BE222425, AV696527, BF755168, BE876090, BE167030, |
| | | | | | AI768063, BE000825, H12700, AV708152, AW001069, H03274, BF063098, BE933732, BF815719, |
| | | | | | BF594797, AW974217, N93209, N23944, AI290752, BF802746, AA557778, AA604449, Z32781, |
| | | | | | BE004621, AA910221, AA226865, R78864, BF326913, BG179582, AI370350, BE719765, BE768063, |
| | | | | | BE932712, AA780882, T31498, AW798498, AI635435, BF088211, BF817478, Z28655, BF943308, |
| | | | | | Z24930, BE932705, BF126152, AI015125, BF981166, AI684725, T36185, H12701, R37535, AW952059, |
| | | | | | AI689130, AA296931, AW798657, AW364905, R79351, H03275, BE768230, AW206046, AA081583, |
| | | | | | AA936681, BG104571, BE176285, AW993023, W69607, R31681, AI479514, BE696398, AA716370, |
| | | | | | BE463676, AW366456, BE869217, BF064127, BF001446, AW884802, AW999085, BG104993, |
| | | | | | AI039088, R31723, AW366514, BE871677, AI241206, AI743907, AA306185, BF037794, D61175, |
| | | | | | AA852523, AW365573, BF799275, AA129989, BF985004, AW838470, BF802748, R36687, BE001097, |
| | | | | | AA723997, BE932064, AW366145, BF230069, AW999007, AW993306, BF733961, AA508532, |
| | | | | | AW972441, AW972636, BE932056, BE086739, AA164808, BE064535, BF986296, BF095055, |
| | | | | | AW408116, BE184804, BE184805, BE184738, BE695142, BE184803, BE172976, BE184743, BF984676, |
| | | | | | BE184732, BF741954, AI366900, AW082623, AW118518, AI698391, BF871314, AI954504, BF753053, |
| | | | | | AI679312, BE967260, BF207979, AL515195, AW050850, AW089844, AW151136, AL515191, |
| | | | | | BE965599, AI619607, AI687568, AI540674, AI345688, AL513817, AI590043, BG032036, AA806028, |
| | | | | | AL043168, AA329665, AI923989, AI670002, AA641818, AI866770, AI679321, AI591420, AI473451, |
| | | | | | AI445165, AW051088, BF812961, AL514093, AI521560, AI633125, AL514871, AI915291, AW152182, |
| | | | | | AI247082, AI582932, AI889189, AI587121, BE875959, AA743012, BF814412, AW193894, AL515413, |
| | | | | | BF911554, AI918449, AF269150.1, AK027788.1, AK000756.1, AF116347.1, AK027438.1, AF160213.1, |
| | | | | | AF124819.1, BC009311.1, BC001967.1, AB048975.1, AL137478.1, BC002733.1, AB056421.1, |
| | | | | | AL133560.1, AK027129.1, U42766.1, AL080118.1, BC001969.1, AK026927.1, U38847.1, AB047878.1, |
| | | | | | AK025857.1, BC004264.1, BC004899.1, AL137529.1, AK000323.1, BC005858.1, M92439.1, |
| | | | | | AL122100.1, BC006458.1, BC001964.1, AL353956.1, AL137557.1, AF132676.1, AL133640.1, |
| | | | | | AF061836.1, AL137533.1, AK027164.1, AJ406939.1, AL049430.1, AB056427.1, AK027173.1, |
| | | | | | BC007571.1, BC003122.1, AL136784.1, AF245044.1, BC001215.1, BC004324.1, AF252872.1, |
| | | | | | AL389935.1, AL136752.1, BC003410.1, AL137560.1, BC008037.1, AL137555.1, AK026649.1, |
| | | | | | AL136767.1, AK000206.1, BC003658.1, AK026057.1, BC008284.1, AL136786.1, AL110225.1, |
| | | | | | AL133623.1, AF078844.1, AF353396.1, AB050407.1, AL049938.1, BC007391.1, AF090903.1, |
| | | | | | AL136747.1, AL050138.1, AL137550.1, D83032.1, BC007053.1, AL512704.1, AK027113.1, |
| | | | | | AK024588.1, BC001774.1, AL137258.1, AL390184.1, AK000310.1, AL096744.1, BC006136.1, |
| | | | | | AB060914.1, Y16645.1, BC003619.1, BC008781.1, AL389939.1, AF028823.2, AL110196.1, AK025435.1, |
| | | | | | AB046642.1, AB050431.1, AK024944.1, AK000414.1, BC000054.1, AB052191.1, AL117435.1, |
| | | | | | AL110218.1, AK026534.1, BC008780.1, AL136622.1, AL049283.1, BC002697.1, AF069506.1, |
| | | | | | AF141289.1, BC004958.1, AB063079.1, BC003548.1, BC001056.1, AK025113.1, AJ010277.1, S76508.1, |
| | | | | | AK000160.1, U72621.3, AK026857.1, AK027096.1, BC003614.1, AL137271.1, AL137459.1, |
| | | | | | AB063088.1, S77771.1, AF036268.1, BC004556.1, AL157433.1, AK024622.1, AB049852.1, BC004292.1, |
| | | | | | AK027082.1, AK026749.1, AB063093.1, AB044547.1, BC008078.1, AL110224.1, BC009294.1, |
| | | | | | BC001082.1, AK027111.1, AL157482.1, AL122104.1, AB050410.1, BC000714.1, AB063087.1, |
| | | | | | AL080140.1, AL442082.1, AL137488.1, AF056191.1, AK025465.1, AL122050.1, AL133606.1, |
| | | | | | AL136882.1, AL133559.1, AC008250.23, BC000725.1, AK027116.1, AK026547.1, AK027121.1, |
| | | | | | BC007456.1, AF232009.1, AB055352.1, AB056420.1, AL136644.1, BC006525.1, AK025312.1, |
| | | | | | AL133016.1, AL080074.1, AL512765.1, AL359620.1, BC001844.1, AY026527.1, AL050172.1, |
| | | | | | BC007499.1, AK026462.1, AL117635.1, AK027114.1, BC003104.1, AL050277.1, BC006091.1, |
| | | | | | BC008899.1, AB060879.1, AK026959.1, AK000083.1, AK027160.1, AK000618.1, BC007420.1, |
| | | | | | AL133568.1, AL050393.1, AF227198.1, AK000653.1, AL049347.1, AL162002.1, AL137480.1, |
| | | | | | AL162079.1, AB062942.1, AL390154.1, AB060897.1, AL110296.1, AL136893.1, AL080148.1, |
| | | | | | AL122121.1, AL133112.1, AK026593.1, AB049892.1, AL122110.1, AK026542.1, AF100781.1, |
| | | | | | BC005825.1, AK024992.1, AK026894.1, AL512684.1, X83544.1, BC004290.1, AK026541.1, |
| | | | | | AF183393.1, AL512746.1, AB051158.1, AF106697.1, AB063071.1, AK000421.1, BC003590.1, |
| | | | | | AK000257.1, AB060917.1, AF090900.1, BC007680.1, AK027188.1, AL023657.1, AL137292.1, |
| | | | | | AL133637.1, AL049324.1, S78453.1, BC008416.1, BC008836.1, AJ299431.1, AB047941.1, BC007460.1, |
| | | | | | AK026613.1, U55017.1, X676881, BC004336.1, AL390139.1, AL110221.1, AF262032.1, BC003602.1, |
| | | | | | BC002476.1, AL110222.1, AL137521.1, BC006181.1, AL137479.1, BC006807.1. |
| HAQBG57 | 28 | 837545 | 1-1034 | 15-1048 | BE562515, AI742455, AI961996, AA507216, AI190639, AA731364, AI673081, AA593594, AI003558, BF528073, BF885284, AI435334, |
| | | | | | AW438908, AI381200, R69327, AI204170, AI739035, AI401755, |
| | | | | | AI591140, AA432147, AA251459, AW967618, AA446655, AI682154, AW613695, AI500259, |
| | | | | | AA398391, R79970, AI149747, H97579, AI263813, AA401707, BE350370, R69328, AA670245, |
| | | | | | AA643922, AA852081, BF345349, AA889222, BE782687, BF034010, BF038771, BC008671.1. |
| HARAE26 | 29 | 560598 | 1-1231 | 15-1245 | |
| HATCD80 | 30 | 826098 | 1-1795 | 15-1809 | AW936395, AA382841, BF380111. |
| HBAGD86 | 31 | 838799 | 1-1699 | 15-1713 | AI658681, BE466145, AI806836, AI653272, AA004211, BE302094, BF970406, BE018485, AA418617, |
| | | | | | AA594901, AI580148, BF589715, AI804211, AI669907, AI342168, AI810310, AA506350, AW022528, |
| | | | | | H10330, AA721162, AA452114, W03931, AW953290, AI262137, R61309, AA680147, N62384, H10331, |
| | | | | | AI264925, AA765972, BF086698, AW275301, AA485210, C15277, N79353, AA350799, AI867727, |
| | | | | | AI474438, AI129224, AA093047, D60782, AI535847, AA897480, AA350798, AV714899, AW956763, |
| | | | | | AV728867. |
| HBGBC29 | 32 | 691473 | 1-1842 | 15-1856 | BF223021, BF036281, AI341667, AA180986, AU153625, AU151704, AI093197, BE855464, BE018834, |
| | | | | | BE616741, BF684563, AI694268, AA031711, AI469856, N63041, N50125, AI150599, AI597740, |
| | | | | | AI985206, AI671591, W72535, BF431270, AI741942, AA037642, AA180865, AA031648, AA436065, |
| | | | | | AI800796, AA129939, BF056140, AW002265, AU157670, AI074205, AA830493, BF063800, AI056532, |
| | | | | | AI656721, W00519, AI275143, AI337739, AW172525, AA443349, AA043021, AA446926, AI655558, |
| | | | | | AI769027, AA101851, AA917703, W93307, AA526333, AI689128, AA777090, AW002829, BE295568, |
| | | | | | AW139517, AI128702, AI276137, AW801873, AA873711, AW892754, N98234, W76109, AI631104, |
| | | | | | AA856832, W92810, AA042939, H87505, AA129938, AI688779, AA693329, AI676108, T87624, |
| | | | | | AA570072, AA037641, AI186390, AW515672, AA031685, AA037500, R82703, AA037234, AW380430, |
| | | | | | AA985191, AU131994, BE302396, H87506, AA938640, AI926907, AU118291, AI696069, T74071, |
| | | | | | AA102060, AW057528, AI671894, AI962374, AI695458, AA046964, BE869607, BF814627, F12449, |
| | | | | | AA725452, AI968837, AA917824, AA054749, BF437316, F10070, AA917678, BE218382, BE669660, |
| | | | | | AI916503, AW612381, AA683581, AI984598, AA937814, AI932475, AA046963, AA053281, AI801723, |
| | | | | | BE858841, AI499751, AA031686, AI074981, AI341558, AI478279, BF735972, AK001006.1, |
| | | | | | BC004523.1, AF020920.1, AF038662.1, AB024436.1, AF022367.1. |
| HBHAA05 | 33 | 603174 | 1-676 | 15-690 | AI572680, AW631267, BF970107, AA632355, AI433952, AI753969, AA629668, AA493546, AU158457, |
| | | | | | BF589864, AL044966, AW518882, AI570067, AI828721, BF028225, M77888, AI884404, AI547110, |
| | | | | | BF724416, AI434103, AV683406, AW836225, BE391183, N55076, AA610644, AV731938, AA313025, |
| | | | | | AA748071, AV743067, AI065031, AW148964, AI280566, AI732690, AA601376, AI311796, AI268465, |
| | | | | | T03928, AU158814, AW504667, AW880986, AI819419, AA018258, AA524800, AW971342, AI791659, |
| | | | | | AW020612, AV759022, AV712092, AA935827, AA773560, AA425283, AI376687, AA493245, |
| | | | | | AA847341, BF942991, BF944618, AW303052, AI174703, BE392753, BG034698, BG223498, BE152006, |
| | | | | | AI683079, AA826166, AI590404, AI285651, AC004531.1, AL049780.4, AC006013.3, AC005971.5, |
| | | | | | AC005522.2, AL138713.11, AC011445.6, AC008403.6, AP001725.1, AC010458.5, AC009412.6, |
| | | | | | AP001726.1, AP001715.1, AL022323.7, AC008569.6, AL138976.5, AC005015.2, AC005081.3, |
| | | | | | AL022316.2, AC008738.6, AL590762.1, AL445222.9, AC004967.3, AC004991.1, AC020552.4, |
| | | | | | AP001716.1, AL109965.34, AC006211.1, AC011514.3, AC011485.6, AJ003147.1, AC018755.3, |
| | | | | | AC011510.7, AC006057.5, AC016995.4, AL353692.14, AC006334.3, Z97054.1, AC006449.19, |
| | | | | | AC005940.3, AC004383.1, AL034422.24, AC087071.2, AL133229.40, AL079342.17, AC004051.1, |
| | | | | | AL359397.3, AC018719.4, AP001712.1, AP001724.1, AC020716.3, AC073316.6, AC024561.4, |
| | | | | | AC010422.7, AC009488.5, AC020908.6, AC000353.27, AL513366.11, AC006487.8, AC020906.6, |
| | | | | | AC008066.4, AL354735.14, AC006530.4, U95742.1, AL162426.20, AC007731.14, AP000289.1, |
| | | | | | AL389925.10, AC005500.2, AC002527.1, AP000042.1, AP000110.1, AF001549.1, AL135905.6, |
| | | | | | AC007637.9, AL161732.7, AC067941.7, Z98941.1, AC032011.14, AP000688.1, AC005377.2, |
| | | | | | AL050335.32, AC090937.1, AC007256.5, AF053356.1, AC079602.15, AC008623.4, AL163032.3, |
| | | | | | AC011490.7, AC006040.3, AC004821.3, AC007216.2, AC005881.3, AL133545.10, AC008891.7, |
| | | | | | AL109825.23, AL138756.23, AL355102.5, AC004703.1, AF312032.1, AL445664.14, AL354696.11, |
| | | | | | AC005529.7, AC005077.5, AL158207.15, AF168787.1, AC003982.1, AC013449.8, AC021019.5, |
| | | | | | AC005914.1, AC004032.7, AL158052.10, AL353752.6, AB003151.1, AC005052.2, AC005291.1, |
| | | | | | AC004867.5, AL023583.25, AC020931.5, AC008752.6, AL023693.25, AC004887.2, AL078639.5, |
| | | | | | AL031651.33, AC005098.2, AC008551.5, AL136304.10, AL023807.6, AL356756.4, AC005921.3, |
| | | | | | AC005874.3, AF134471.1, AP001714.1, AC004906.3, AP001748.1, AC004166.12, AC020744.4, |
| | | | | | AL031118.21, AL139109.14, AC011895.4, AC006312.8, AL049537.48, AC007374.6, AP001630.1, |
| | | | | | AC007383.4, AC010616.5, AL109797.18, AC006970.6, AC005399.19, AC018711.4, AL020997.1, |
| | | | | | AC087311.22, AC005632.2, AC005578.1, AC018462.4, AC004522.1, AF243527.1, AC010605.4, |
| | | | | | AP000563.1, AC026464.6, AP003476.2, AC006511.5, AC004796.2, AC004000.1, AL356113.8, |
| | | | | | AC011005.7, AP001711.1, AC008857.5, AL138885.21, AC010319.7, AC073347.3, AC002472.6, |
| | | | | | U52112.1, AP000211.1, AP000133.1, AC009131.6, AC074121.16, AC004263.1, AL449223.7, |
| | | | | | AJ400877.1, AL161670.4, AC008812.7, AL445071.14, AL117336.22, AC007298.17, AL139343.9, |
| | | | | | AF207550.1, AL359092.14, AC004963.2, AL096840.25, AC012170.6, AC025593.5, AC022384.4, |
| | | | | | AL035089.21, AC008969.5, AL355512.22, AP001646.4, AC073542.4, AL359382.23, AC011495.6, |
| | | | | | AC005562.1, AC002565.1, AL034449.1, AL034549.19, AC008892.5, Z98200.8, AC005102.1, |
| | | | | | AC012450.9, AC006538.1, AL445483.13, AL354720.14, AC069285.8, AL034548.25, AC002432.1, |
| | | | | | AC008982.5, AC025166.7, AC005618.1, AL109804.41, AC012085.4, AC008481.7, AC020913.6, |
| | | | | | AC022432.4, AC005520.2, AC005627.2, AL021395.16, AL117380.28, AC008543.7, AL158824.11, |
| | | | | | AL109935.39, AL161802.15. |
| HBHAA81 | 34 | 846465 | 1-1633 | 15-1647 | AL138080, AL138081, BG056111, AW117532, AI885223, BF724275, AW051808, AI332809, AI564820, |
| | | | | | N63569, AW207494, AI866785, AW148811, AI954565, AI199326, AI199105, N38888, AI243422, |
| | | | | | H09138, AI986175, AW381536, Z25110, AI991904, Z18300, F31192, Z28916, AW381528, Z41646, |
| | | | | | AI954371, N38887, AI033629, Z28784, AW381480, N94825, F25740, F00372, AW380848, F16581, |
| | | | | | AW381481, AA197180, AW104762, BF887537, AB042554.1, AB032999.1, AC006059.3. |
| HBJAB02 | 35 | 837309 | 1-1679 | 15-1693 | AL529646, AL529645, BE898304, BG112747, BF791411, BG036058, BE392384, BE621757, BE548173, |
| | | | | | BE895853, BG034671, AA808894, BE901085, BE278873, AW152607, BE795658, AW166898, |
| | | | | | BG122141, BE782474, BF972826, BE793716, BE140314, AW750993, AA826362, AW517942, |
| | | | | | BE714673, T59668, BE731030, BF939314, BE732766, BE745104, AI290469, BF477770, AI805651, |
| | | | | | AI961329, AA581089, BE902575, AW197375, AA974066, AI950259, BF802171, W27729, AV693783, |
| | | | | | AA877530, AA715365, AI968889, AA885542, AA160748, AA386371, AA335719, BF873961, W73105, |
| | | | | | BF223151, BE740826, AL120854, BE548914, AA318192, AA501478, BF125073, AI948815, AA581100, |
| | | | | | AA658457, AI621069, T59802, AA468534, AA503715, BF850755, AW956069, AW841506, AI144504, |
| | | | | | AA352215, BE897964, BF883404, BF373009, BE090290, BE168997, AW855521, AW820855, |
| | | | | | BG230749, BF376598, BE622839, AV699089, AV647789, AI567702, AV726156, AW961037, |
| | | | | | AW411235, AV726058, AW020397, AV706279, AV702427, AV651955, AV702026, BE393551, |
| | | | | | AV727787, AV660608, AV687176, AW021717, AV698545, AV687909, AV709256, AV708438, |
| | | | | | AV656903, AV661704, AV696106, AV697196, AW409775, AW951263, AV689111, AV655280, |
| | | | | | AV728157, AV692345, AV659322, AV654908, AV656478, AV708893, AV709314, AV708381, |
| | | | | | AV660728, BG168549, AV659536, AV691080, AY706219, AV695545, AV652001, AV705159, |
| | | | | | AV648263, AV703169, AV728518, AV707541, AW952409, AV709660, AV726624, AV706854, |
| | | | | | AV729220, AV709604, AV687035, AV696866, AV728997, AV704955, AV726816, AV725920, |
| | | | | | AV652156, AV701707, AV656283, AV704234, AV708025, AV707933, AV684604, AV729378, |
| | | | | | AV708980, AV692691, AV701914, AV708723, AV702516, AV693523, AV709407, AV705693, |
| | | | | | AV708992, AV729263, AV726103, AV708704, AV727029, AV726520, AV728733, AV725826, |
| | | | | | AV702021, AV725134, AV705280, AV645906, AV683415, AW265004, AW964228, BE047925, |
| | | | | | AV705076, AV707792, AV729259, AA127565, AW022102, AV686064, AV701067, AV704124, |
| | | | | | BC000131.1, AK000069.1, AC015651.18, AF147378.1, AK027463.1, AF097996.1, AF217986.1, |
| | | | | | AF217994.1, BC000090.1, BC003658.1, BC008282.1, AL356376.9, S71381.1, AK026494.1, BC006378.1, |
| | | | | | BC004362.1, AL137283.1, AK000212.1, AY026527.1, Y08991.1, BC007199.1, AF218004.1. |
| HBJAC40 | 36 | 841235 | 1-1753 | 15-1767 | BF345048, AW958511, BF530417, BF975837, BE253816, BG250686, BE887472, BF527935, BE263703, BE909332, BF527878, BE881895, |
| | | | | | BF194837, BF972454, AW025541, AL048612, BF525861, AI859062, |
| | | | | | BF835934, AI199762, BF955165, AI052782, H12219, BF955173, AW015231, BE379375, AI681619, |
| | | | | | BF364391, AI379848, AI363268, BF740272, AA703554, R60286, BF955168, R52740, BE258881, |
| | | | | | AA448130, R90880, W46453, BF090044, R25794, R22673, R52690, H08245, H08001, AA447988, |
| | | | | | AA912056, AI245669, R36729, AI290546, H07130, M78974, BE179040, T77037, AA070715, H08144, |
| | | | | | R58852, H38448, Z44633, H49103, W46520, R09542, R85342, AI879032, AI590525, R43378, R90851, |
| | | | | | T31004, R67310, F13258, BE164925, AA364956, F08103, T32340, BE907755, Z40495, C03430, |
| | | | | | BF884758, R85671, T35911, T30880, F28188, BF115735, AW161049, AW072139, BF820428, R60889, |
| | | | | | R60792, AA694126, AI086328, BF961135, AI272235, BE258962, AI363035, F04345, R46793, |
| | | | | | AA095937, BF952087, F10861, H06622, BF841177, BF925698, AA401578, BF820431, BF945162, |
| | | | | | BF772214, AA095307, R54673, BE677392, AW027215, AI360330, AF072812, T16940, AL035745, |
| | | | | | R09655, BF945153, BE081049, BE179106, AA382430, W23297, AW162615, AA946598, AI017807, |
| | | | | | AI220189, AW002147, R85343, H41244, BF527814, AI863690, AA394215, AW961330, AV652536, |
| | | | | | AV652547, AW963011, AV654689, AW954779, AW958365, AW954506, AV708498, AW957970, |
| | | | | | AW950179, AW963847, AV709494, AV725063, AV706850, AV725970, AF131218.1, BC002882.1, |
| | | | | | AL136698.1, AF195661.1, BC007604.1. |
| HBJCR46 | 37 | 815649 | 1-3194 | 15-3208 | BE980168, BF001800, BF221545, BE180558, BG117357, BG165887, BE747286, BE867206, BE559905, |
| | | | | | BF029089, BE884542, BE180560, BE882087, BF672818, BE180608, BG255311, BF695020, AI765879, |
| | | | | | AV701340, AI832097, AV701354, BG164080, BE568492, BF979546, BE268392, BE180559, AI927915, |
| | | | | | AI675415, BF195785, BF662916, BE673547, AI086866, AI956035, BF671543, AU146956, AA479515, |
| | | | | | BF063974, W19888, AW992096, BE504075, AW069858, AW992159, AA626631, BE019647, BE221636, |
| | | | | | AA479513, BF575729, AU144777, AA973047, AA936602, BF671187, BE545703, AV701112, |
| | | | | | AU144811, AU160319, AI472144, AI263407, BE019684, AU118130, AW614133, AI954073, AI767153, |
| | | | | | BF445898, AW087744, AI913738, BE397963, AI628089, AI675273, AA447852, AI635143, AW129685, |
| | | | | | AI287605, AA486193, W00613, AW135604, AI754985, AI334344, BF062454, AW119185, AW576204, |
| | | | | | BE041839, N54388, BF354864, AI275063, BE175440, AA883965, AI554276, AI082201, BE718001, |
| | | | | | AW771023, AI274243, AW337565, AA150018, BE175441, AW771580, AA447700, AW052155, |
| | | | | | AW771203, AA085991, AA085621, AI954014, AW068250, BF725222, AA486299, BF087209, |
| | | | | | BF834780, AA971016, AW854246, AA150083, H08089, BF735392, BE180609, AV683146, AA677738, |
| | | | | | AI220075, AV701437, AA740363, AA909807, H71626, R61225, N49411, AV689665, C05160, |
| | | | | | AA888983, AI026772, AV692963, AW580238, AI816858, AA340276, BE180555, AW862217, R61226, |
| | | | | | H82142, AW068158, H08090, BF997557, AW862230, AI565387, AI824475, T32511, BE169765, |
| | | | | | BE002988, AI004624, AW514293, AA775740, T31977, AI660017, AA347780, N63302, AW468684, |
| | | | | | AA908821, AA953180, AA897589, AI217393, AI536640, AA337664, BF364138, BE816022, AA652646, |
| | | | | | Z19403, C04239, H71627, AA347779, R14260, AW168255, BF833756, Z42097, AV655482, AI431630, |
| | | | | | BE088874, BF348891, H82048, AA130053, AA781872, BE544862, Z28501, AI434730, BF575085, |
| | | | | | AA328725, BF084834, R96217, AU155530, Z38367, AA301061, AA370106, AI810366, AW836437, |
| | | | | | AA371349, AI991790, H54404, AW015692, Z42140, AI905103, AW242449, BF327421, AI824674, |
| | | | | | AW195816, BE173133, BF812520, R86231, AI274472, H54488, AW379997, BF476783, D62662, |
| | | | | | AA382472, AW379945, AL079373, AA703490, AW381290, BF328480, AW392784, AI823416, |
| | | | | | BF961200, BF910517, BE728262, BE408949, BE277648, AA458950, BF797287, BE866243, AA923063, |
| | | | | | Z24943, AA236098, BE160734, AA397692, C02287, BF812876, BF444939, AF150734.1, AL136738.1, |
| | | | | | AK000984.1, AF124434.1, AL033531.10, AL031287.3, AL033532.36, Z97876.1, AC007034.4, |
| | | | | | AL035304.1. |
| HBJDW56 | 38 | 520401 | 1-623 | 15-637 | AC005532.1, AL031319.5, AL354933.8. |
| HBJEL16 | 39 | 847030 | 1-736 | 15-750 | AI279501, BE867835, AL528252, AA569392, AW856935, AA071326, AA587712, AA258409, AI341817, |
| | | | | | BE898008, BE696253, AW576885, AA837880, AW576895, AI584147, AL525748, AW383278, |
| | | | | | AA071368, BF330803, AW383120, AI393286, AL513864, C00710, AW857093, AA644480, AL528253, |
| | | | | | AW499908, BF326342, AW749039, BF771813, AA193585, AW383268, BG031591, AL040224, |
| | | | | | AW383242, BE904616, AW751656, AW383266, AW383144, R15553, AW383205, AW383131, |
| | | | | | BF931485, AA258753, AW383275, AW383146, AW886371, AW997055, AW996855, BE929916, |
| | | | | | BE005368, AA188924, BF350669, BF327032, Z99943.1, BC007881.1, AL035308.1, AF087020.1, |
| | | | | | AL035302.1, AF092425.1, AF095727.1, AF092424.1, AF239756.1. |
| HBJFK45 | 40 | 531919 | 1-529 | 15-543 | AA714560. |
| HBJKD16 | 41 | 853358 | 1-1615 | 15-1629 | BG259133, BG258754, BE895955, BE535182, AU119776, BE296370, AW361272, AA205862, |
| | | | | | BE079707, AI743764, BF669591, BF102652, AA768863, AA767455, AA683506, BF374311, W39021, |
| | | | | | AA583062, W94893, BE737722, AI128320, AA703242, AA402965, H12229, AA027163, AI338954, |
| | | | | | W92057, AA769377, AA811137, AW470052, AA027162, AV713020, AI680487, R19758, AA283191, |
| | | | | | AA531492, AI700367, BF946853, AW514119, AA644413, AI004120, AW876599, BE868122, AI831977, |
| | | | | | AI219655, AA197283, H17722, AA890197, N70828, AA164346, AV750338, BF791719, AA164345, |
| | | | | | AA767095, AA393969, AA765421, H17611, BF247968, AI254347, AA253013, AA534905, AA470446, |
| | | | | | AA182675, H12230, H43795, T32973, AW386765, AU146033, AA078964, R51414, AI269757, T33350, |
| | | | | | R45177, AI203452, Z44609, AI041094, AV749975, H43709, BF336945, AI268058, T30703, R85203, |
| | | | | | R51302, R51996, BE738484, W84649, R51995, AA824604, W01425, AA907096, BF801374, BE544754, |
| | | | | | AI469616, AU156273, AW297202, T83337, H14279, BE929477, AA252973, BE242053, T18899, |
| | | | | | AA248529, H14306, BE698663, T33352, BG059012, AA361817, AA236020, AA810717, BE243263, |
| | | | | | AA876139, BF240162, BF893858, BE217859, F13420, H53830, F08935, AA078866, AV727864, |
| | | | | | AA721692, Z40480, AI383780, H52715, H48241, AW751348, T83485, AI567913, AI247225, BE694869, |
| | | | | | BE940539, BE713625, BF858355, BF801742, BF824816, BE713728, BE713771, BE713469, AA463921, |
| | | | | | C01352, AW608887, BE714022, AW876620, AW876628, N89830, BE002346, AA192537, AA319174, |
| | | | | | BE714013, AV709029, AW991462, AI080442, BF993596, N57976, AA034034, BF799178, BF818732, |
| | | | | | AW392976, AW876544, BE568245, AW835734, AK000087.1, AK021899.1, AF217983.1, AC008074.3, |
| | | | | | AK024658.1. |
| HBMUH74 | 42 | 866160 | 1-712 | 15-726 | AI633540, BE999936, AL529110, AI911597, AW016785, AA479308, AI381011, AI057451, AI283542, |
| | | | | | AI224172, AI025510, BF929951, AW589256, AU156824, AU155569, BF063133, R43074, R25758, |
| | | | | | BF818086, AL529111, BE567017, BE077233, H09061, AA479409, AL136843.1, AK001927.1, |
| | | | | | AK027756.1, AK001324.1, AC009318.11. |
| HBQAB79 | 43 | 810542 | 1-1317 | 15-1331 | BE926412, W27043, BG006701, AW500368, AB020689.1. |
| HBXCM66 | 44 | 639039 | 1-996 | 15-1010 | AW970983, AA311432, AA515629, AA515360, AW973992, BF804385, AL046519, AV703785, AA502991, BE968744, |
| | | | | | AA631507, AI206841, AV763026, AV763058, AW613805, AW340905, |
| | | | | | AI431303, AI366555, AW873061, AI284640, AW270258, AW341903, AA809546, AI821716, AI613389, |
| | | | | | AV704541, AI499954, AA533025, AW438542, AL079734, AV655282, AL079645, AL046409, |
| | | | | | AW023672, N23504, AW419262, AV759632, AI061313, AW872736, AI189682, AV738383, AA533176, |
| | | | | | AW193265, AW069227, AW023111, BF725844, BE139139, AI284543, AI254770, AW979087, |
| | | | | | AW026305, AI421950, AI419337, AW872676, AW970981, AL038936, AI634187, AA515351, |
| | | | | | AV762633, AW327624, AI251034, AI223626, AW407578, AI635440, AI003611, AI801482, AI250552, |
| | | | | | AI754170, AW574899, AI251284, AI251203, AW130188, AW303196, BF827410, AV755512, AI355559, |
| | | | | | AV763584, AW845366, AW979241, AI891080, AF123761.1, AP001711.1, AL356805.5, AL122015.17, |
| | | | | | AC019205.4, AL035249.6, AC009247.12, AP000744.4, AL356214.20, AL356915.19, AL133545.10, |
| | | | | | AP001725.1, AP000252.1, AL445222.9, AL133453.3, AL117258.4, AB023050.1, AC005077.5, U80017.1, |
| | | | | | AC012476.8, AC004560.1, AP000557.2, AP000925.5, AC011444.5, AC044797.5, AC005015.2, |
| | | | | | AL355336.15, AP000212.1, AP000134.1, AC011742.3, AJ003147.1, AC007957.36, AL139022.4, |
| | | | | | AC018644.6, AC008771.4, AL121936.17, AL390878.6, AL049713.20, AC002527.1, AC004910.1, |
| | | | | | AC007003.4, AC008012.8, AC022383.3, AC007991.7, AC012170.6, AC023490.5, AC018462.4, |
| | | | | | AC007270.2, AE006467.1, AC020983.7, AL035420.15, AL136305.14, AC005911.6, AL365505.15, |
| | | | | | AL137002.19, AC006077.1, AC000353.27, AC011491.5, AC016554.7, AC009068.10, AC016995.4, |
| | | | | | AC012077.4, AC020934.7, AC007686.5, AC006530.4, AC003098.1, AL356020.3, AC004999.1, |
| | | | | | AC018695.6, AC011480.3, AC067941.7, AC011479.6, AC009220.10, AD000092.1, AL162390.9, |
| | | | | | Z81364.1, AP000031.1, AF053356.1, AC026794.4, AC013434.8, AL357497.17, AC025166.7, |
| | | | | | AJ009613.4, AC005800.1, AB023049.1, AC006121.1, AB003151.1, AC002544.1, AB038653.1, |
| | | | | | AC009144.5, AC005288.1, AC004841.2, AC004166.12, AP000689.1, AL139322.13, AL023553.5, |
| | | | | | AC005839.1, AC005731.2, AL121749.13, AC006167.1, AC007318.4, AL353752.6, AL050335.32, |
| | | | | | AC004965.2, AL022723.4, AL035089.21, AP000556.2, AL021939.1, AC005080.2, AL137230.3, |
| | | | | | AF165926.2, AC004972.2, AC027126.4, AP001748.1, AC004605.1, AC010620.4, AC010469.7, |
| | | | | | AL390239.16, AL121893.21, AL353777.18, Z98200.8, AC004033.3, AC084783.2, AL132825.35, |
| | | | | | AL445483.13, AL118555.6, AL161452.19, AC008555.5, AC010279.4, AL355543.13, AC011461.4, |
| | | | | | AL391827.18, AL139100.9, AC004912.1, AC008440.8, AC011477.5, AC006483.3, AC010913.9, |
| | | | | | AP000555.1, AC006443.1, AC004966.2, AC002504.1, Z94802.1, AC007114.7, AL035415.22, |
| | | | | | AC005921.3, AC008543.7, AL022328.21, AC072052.6, AC010129.3, AC006486.1, AF196972.1, |
| | | | | | AL133353.6, AL135744.4, AP001752.1, AP001860.2, AL137798.8, AL035588.21, AC087225.1, |
| | | | | | AP001732.1, AL355343.18, AP000513.1, AL137019.6, AC008736.6, AP002847.2, AC009506.5, |
| | | | | | AC008747.5, AC006329.5, AC009756.9, AP000511.1, AC011500.7, AL034555.2, AC005037.2, |
| | | | | | AP003357.2, AC034240.4, Z99716.4, AF200465.1, AC073145.8, AL121580.8, AC007216.2, AL139316.5, |
| | | | | | AL137792.11, AC090953.1, AC002319.1, AL049569.13, AC018828.3, AC003108.1, AC008775.6, |
| | | | | | AC005666.1, X53550.1, AC005682.2, AC034193.4, AC009470.4, AC008379.6, AL390241.19, |
| | | | | | AC018641.3, AJ246003.1, AC018808.4, AF111168.2, AC012627.4, AL022318.2, AL158167.15, |
| | | | | | AL161670.4, AC004041.1, AL109627.18, AB001523.1, AC020898.5, AL162740.13, AC026202.6, |
| | | | | | AL136179.15, AL158207.15, AP001760.1, AP002982.2, AC006511.5, AC008040.7, AL021155.1, |
| | | | | | AL161937.13, AC007546.5, AF077058.1, AC011446.6, AC006153.2, AC004583.1, AL139396.17, |
| | | | | | AL035587.5, AC008519.4, AL031276.1, AP000553.1, AC025435.5, AL137061.12, AL365444.11, |
| | | | | | AC005228.1, Z97180.1, AL392166.19, AC008739.5, AC006030.2, AL353668.18, AL033529.25, |
| | | | | | AP000842.4, AL121972.17, AP000471.2, AC007249.5, AC006111.3, AC004904.1, AC002407.1, |
| | | | | | AC011811.42, AC003070.1, AC011526.7, AC012076.4, AL161436.12. |
| HBXCX15 | 45 | 637542 | 1-1205 | 15-1219 | AA595781, AW277007, AI274544, AA548746, AC006329.5, AC009412.6. |
| HCDBO32 | 46 | 831942 | 1-2616 | 15-2630 | AL537440, AL531001, AL531000, AU118775, BE613081, AW976126, BE739778, BE612415, BE886668, |
| | | | | | AW965087, BF671603, BF114976, BF001395, BF104843, BG169691, BF790959, AU145261, AI524826, |
| | | | | | AV700940, BF115561, AI628083, BE501914, BF028814, BG107506, AA456561, BF695399, BF064237, |
| | | | | | AW771567, AI554053, AU152051, AI066556, AI478798, BE962627, AW770611, AW963335, BE739003, |
| | | | | | BF064238, AI801476, AI807830, AA913477, AI424225, AA227589, BF575758, AA625584, AI963182, |
| | | | | | AW771337, AA576069, AI252762, AA070604, BF589915, AV702872, AA428503, AA235962, AI539101, |
| | | | | | AA419520, AA721024, BF700344, AI357722, AA314319, AA310761, AA235961, AA888687, |
| | | | | | AA479915, AW300423, AA304968, AA912243, AI910898, AI521757, AI658537, AI000288, AI244242, |
| | | | | | AA304963, AI583529, AI950641, AI005178, AI254210, AA806032, BE177264, BE769195, H26906, |
| | | | | | AI688879, AA832031, AA081596, BF082553, BE699120, BF588478, AW888693, AW888689, |
| | | | | | AA362983, BE176881, R33476, AI382821, AA614062, AV747748, R34012, AA652453, AV748003, |
| | | | | | AA343918, AA355362, AW965719, AW819087, AA074345, AC004987.2, AK021702.1, AC004884.1, |
| | | | | | AB017707.1, AJ012491.1. |
| HCEDR26 | 47 | 771144 | 1-1405 | 15-1419 | AW809560, BF822291, AW805745, T06675, T41328, AW809450, BF884442, BF773357, BF738231, |
| | | | | | BE163588, BF998055, H00095, BF900030, AA346118, AA644090, BF725844, BF725688, AI919265, |
| | | | | | AI801505, AW103406, AW855803, BF673854, AA833896, AW958962, AA630854, AI798521, |
| | | | | | AW855730, AV702109, AA833875, BF725884, AA513851, AW814024, AI537020, AW474825, |
| | | | | | AW243793, AW275432, AW970064, AC010326.6, AC010645.5, AC010522.3, AL353748.13, |
| | | | | | AC003006.1, AL136418.4, AL139054.1, AL356805.5, AP000501.1, AP001760.1, AC004840.3, |
| | | | | | AC007374.6, AL445184.11, AC018738.4, AC008264.10, AC018641.3, AC005102.1, AC007383.4, |
| | | | | | AC020908.6, AC011497.6, AP000338.2, AC004526.1, AC013356.8, AC011247.10, AL137072.8, |
| | | | | | AP000216.1, AC006011.2, AC020558.4, AL024498.12, U62293.1, AC004913.2, AC020983.7, |
| | | | | | AC002044.1, AL355343.18, AC022148.5, AL022316.2, AL354864.16, AL035400.13, AC005529.7, |
| | | | | | AL109797.18, AC004975.2, AC004895.2, AC002472.6, AP001132.4, AC005881.3, AF258547.1, |
| | | | | | AC002350.1, AL049776.3, AP002028.1, AC027130.5, AC002558.1, U91321.1, AC008891.7, |
| | | | | | AC008745.6, AC020913.6, AC004859.2, AF243527.1, AL589723.7, AL031311.1, AC010742.4, L44140.1, |
| | | | | | AC090950.1, AC026172.3, AL138741.13, AC003048.1, AL137012.6, AC008397.7, AL117352.12, |
| | | | | | AC005081.3, AL109801.13, AL109798.19, AF258545.2, AL163279.2, AL035587.5, AC010422.7, |
| | | | | | AC010789.9, AF045555.1, AC011480.3, AC004491.1, AC022217.5, AC011470.5, AP003357.2, |
| | | | | | AC007283.3, AP001711.1, AC005409.1, AC008812.7, AC008569.6, AF168787.1, AC005082.3, |
| | | | | | AL158207.15, AL118505.17, AL135927.14, AC007227.3, AC020917.4, Z98949.1, Y14768.1, |
| | | | | | AC009412.6, AL121992.24, AL117382.28, AC004156.1, AP001694.1, AC007051.3, Z82215.1, |
| | | | | | AC004796.2, AC073347.3, AC007664.12, AC016776.6, AC020916.7, AP000505.1, AC010328.4, |
| | | | | | AC004804.1, AC009269.6, AJ400877.1, AF111167.2, AC004167.1, AC007536.9, AC007216.2, |
| | | | | | AL365364.19, AP001052.1, AL139099.2, AF283320.1, AC009131.6, AL034420.16, AC004755.2, |
| | | | | | AC000052.16, AC003043.1, AL121891.22, AC002314.1, AC005920.1, AL159977.10, AD001527.1, |
| | | | | | AL021808.1, AC026464.6, AC005702.1, AL355476.12, AC011455.6, AC009244.24, Z85986.1, Z83844.5, |
| | | | | | AC004150.8, AL136980.5, AL158823.11, AL158040.13, AL133367.4, AP002392.3, AC000353.27, |
| | | | | | AC005899.1, AC011489.6, AL035086.12, AC005971.5, AL136087.12, AL445483.13, AL133387.8, |
| | | | | | AP001752.1, AC009220.10, AC008755.6, AC007993.15, AL138883.12, AL353804.22, AL031767.13, |
| | | | | | AC009314.4, AC006252.4, AC007666.12, AC019205.4, AL121886.22, AC010320.9, AC009753.5, |
| | | | | | AC005800.1, AC040160.4, AC004815.2, AL136179.15, AC008536.6, AL096841.6, AC008482.5, |
| | | | | | AC074142.3, AL109921.21, AC011442.5, AC006333.3, AL158830.17, AC003029.2, AC015982.9, |
| | | | | | AC012099.4, AL138733.15, AC005412.6, AC027319.5, AC016742.10, AL359092.14, AC012594.7, |
| | | | | | AL133294.10, AC011005.7, AC007919.18, AL449305.4, AP000744.4, AC005291.1, AC005011.2, |
| | | | | | AC005098.2, AC009068.10, AL356244.12, AL137230.3, AF235097.1, AL132768.15, Z93015.9, |
| | | | | | AP001718.1, AC004019.20, AP001720.1, AP001725.1, AC010378.6, AL132640.4, Z82901.1, |
| | | | | | AL139376.17, AP002852.3, U52111.2, AC002492.1, AC004253.1, AL355353.23, Z82190.1, |
| | | | | | AL008718.23, AL354932.26, AL031657.5, AL445237.16, AL133448.4, AC007225.2, AL353653.19, |
| | | | | | AC007390.3, AC008543.7, AC004738.1, AF288742.1, AC006211.1, AC007739.2, AL133545.10, |
| | | | | | AF111169.2, AL121601.13, AC008474.7, AC004882.2, AC002301.1. |
| HCEEE79 | 48 | 560609 | 1-1038 | 15-1052 | AL353658.33. |
| HCEFG93 | 49 | 745400 | 1-2266 | 15-2280 | AW976010, AW965008, AW342042, AL041706, AL138455, BE061906, BF840676, AW406162, D82290, AW163293, AW574794, |
| | | | | | AL046205, AW419262, BF311000, AI697208, BE908796, AL135377, |
| | | | | | AW576391, AW518220, BG222267, BE049095, AI149478, AA720702, AL046898, BF592311, |
| | | | | | AA493708, AW270270, AI254615, BF592200, AI799642, AA533333, AC018828.3, AC022383.3, |
| | | | | | AL080243.21, AL590763.1, AC005037.2, AC008403.6, AC004099.1, AC027129.5, AC011236.8, |
| | | | | | AC007318.4, AC011442.5, AC004966.2, AL031985.10, AP001720.1, AC002365.1, AC010085.3, |
| | | | | | AL365225.12, AC010289.7, AC018695.6, AL161656.20, AC008755.6, Z83840.7, AC007226.3, |
| | | | | | AL049709.18, AC011481.4, AE006467.1, AB023054.1, AC024561.4, AC005005.1, AC022384.4, |
| | | | | | AL360169.17, AC006211.1, AP001694.1, AL157372.18, AC005844.7, AC010654.8, AL445248.7, |
| | | | | | AL499628.1, AL049795.20, AC012476.8, AP000555.1, AL355312.24, AC008969.5, AC009996.7, |
| | | | | | AL354872.9, AC073321.4, AJ400879.1, AC011484.4, AC004019.20, AC004867.5, AC006538.1, |
| | | | | | AC007374.6, AL049712.12, AL160191.2, AC006965.3, L78833.1, AL590762.1, AC087071.2, |
| | | | | | AL049757.14, AC007707.13, AC025593.5, AL391865.8, AC034193.4, AC067722.21, AL121983.13, |
| | | | | | AL356915.19, AP001718.1, AC008115.3, AC007151.2, AL132838.4, AL031295.1, AC073657.5, |
| | | | | | AL035089.21, AC011299.3, AC015801.25, AC018809.4, AC008372.6, AC004382.1, AL354720.14, |
| | | | | | AC005041.2, AC018808.4, AC011443.6, AC006450.13, AC010792.4, AL031728.12, AC004913.2, |
| | | | | | AC011461.4, AC004971.3, AL034402.9, Z81364.1, AC010530.7, AL109825.23, AC011470.5, |
| | | | | | AC004638.1, AL031685.18, AC002316.1, AC003007.1, AL031311.1, AC011475.6, AC004712.1, |
| | | | | | AC004965.2, AF243527.1, AL391122.9, AC005304.1, AC011489.6, AC018506.4, AL031848.11, |
| | | | | | AL160269.14, AL133367.4, AL117354.12, AL132768.15, AC069262.24, AL117258.4, AL139316.5, |
| | | | | | AF001549.1, AL049776.3, AC000052.16, U95742.1, AC006057.5, AC008521.5, AL157938.22, |
| | | | | | AC018711.4, AL157823.9, AC005077.5, AC004125.1, AL133551.13, AL034420.16, AC010319.7, |
| | | | | | AC005520.2, AC005280.3, AL354864.16, AC018663.3, AC068799.14, AC005225.2, AC005409.1, |
| | | | | | AL137230.3, AL445201.14, AC008155.9, AC069282.6, AC004531.1, AL132780.5, AC007130.2, |
| | | | | | AC004895.2, AC008569.6, AC002350.1, AL137792.11, AL117381.32, AC008745.6, AC008946.6, |
| | | | | | AC009144.5, AC006312.8, AL355517.12, AC002429.1, AP001972.4, AC005295.1, AC007686.5, |
| | | | | | AC005034.1, AC007690.11, AP000330.1, AL354735.14, AC005829.1, AC010422.7, AC005335.1, |
| | | | | | AC003108.1, AP000134.1, AP000212.1, AP000501.1, AL121751.12, Z92846.1, AL391833.10, |
| | | | | | AC004707.1, AB045361.1, AE006463.1, AC015982.9, AC005940.3, AC006205.7, AL513211.15, |
| | | | | | AC009131.6, AC022392.4, AC008622.5, AC018841.3, AC009137.6, D87009.1, AL356299.16, |
| | | | | | AC007298.17, AP002534.1, AC011485.6, AL360230.20, AL031005.1, AC005529.7, AC004089.25, |
| | | | | | AC006480.3, AC013458.5, AC090527.3, AC006343.2, AP001753.1, AL354928.9, AC007597.3, |
| | | | | | AF088219.1, AP001690.1, AL121992.24, AL138976.5, AP002851.2, AL136179.15, AC021016.4, |
| | | | | | AL136123.19, AP001710.1, AC008750.7, AC020983.7, AC007216.2, AL137139.9, AL161731.20, |
| | | | | | AL157789.6, AL121920.21, AL158040.13, AC011477.5, AC005098.2, AC005089.2, AC004622.1, |
| | | | | | AP001477.1, AL133477.16. |
| HCEFZ82 | 50 | 831745 | 1-1797 | 15-1811 | BF981465, BF688419, BF969763, BG178653, BE730527, AI672493, N21040, BE395792, AW386160, |
| | | | | | BE858812, AI672483, BF530193, AI693512, AV751914, BG180158, AI138621, BG104179, AA778387, |
| | | | | | AA173791, BF939691, AW615384, AW960851, AW594109, BF091657, AI022755, AA209239, |
| | | | | | AI077708, AI824069, AI936432, AI038303, N39250, AI927782, AI457926, AI436138, AI056772, |
| | | | | | AI079503, N58793, AI016045, AA210850, AI096581, AA062719, W88815, AA725072, AI375410, |
| | | | | | AA669791, BE300887, BF431891, AA173843, W31742, W88816, AI740977, BE727603, AI086937, |
| | | | | | AA704681, AI190844, AI341909, AI365029, N46695, BF590052, AV749863, AI086941, AI676179, |
| | | | | | AA826493, AA554932, AA789007, BF111593, AA917998, R08679, AA889734, W04647, AA321894, |
| | | | | | AI912831, AV750240, AI239655, BF592139, H71960, AI368377, AA992261, BE277655, H78240, |
| | | | | | H78440, AI470391, R37067, AV694383, AI700804, R44781, AW612991, R10835, H96434, N77482, |
| | | | | | AA314780, R44068, AV751269, R08587, AV697548, AI419628, BE218690, N90646, H65409, BF530646, |
| | | | | | AA836620, W26811, R10834, AV660888, AV747670, AA905784, AI086303, H84253, AI086248, |
| | | | | | AV723953, BE881061, BG110517, BE047952, BG180996, AV682466, BF107905, AI312428, BE876038, |
| | | | | | AW051059, AI538885, AV757598, BF752170, BG113385, BF968903, BG028873, BG113847, |
| | | | | | AW301865, AL036802, BG033199, AV682875, BG178911, AI345612, AV732936, BF924882, |
| | | | | | AW827285, BE966634, BG120492, AI345415, AW827206, BG164371, AW827214, AW827276, |
| | | | | | BF971336, AA568405, BG026714, AL118781, BE965758, BE965192, BE875407, AI581033, AL041573, |
| | | | | | BG260037, BF835240, AV682330, AI343059, AV760102, BG058150, AI361701, BF816811, AV756838, |
| | | | | | AI345416, BF338002, AA614183, AI349933, AI340519, AI349937, AI340603, AW129264, AV681885, |
| | | | | | BE887488, BF341801, AV757639, BE881134, AW022636, AV682787, AV682672, AL036631, |
| | | | | | BE907151, AL040169, BG034564, BF108279, BG110797, BG029053, AV709517, AA572758, BE966699, |
| | | | | | AV757018, BE963838, BE875868, BE905726, AW403717, BG114990, BG110660, BG116387, |
| | | | | | BG036846, BF980991, AI859991, BG119329, BG260187, AV729627, BF915208, AI241901, AW161579, |
| | | | | | BF911517, AI815232, BE895585, AL036396, BF792050, AI064830, AW673679, BG111377, AV734765, |
| | | | | | BF814450, AW935969, AW806761, AL045413, AL119836, AI698391, BE536058, BF968533, BE964614, |
| | | | | | AW302988, AW827289, BF764538, AW778801, AL039086, AV706987, AI433157, BE910005, |
| | | | | | BE048135, AL513943, AV757943, BE892325, BE965621, BE967307, AI349645, BE874133, BF791952, |
| | | | | | BG033267, BE965481, BG105812, BF527014, BF816685, AW834302, AI683395, N71199, AV733682, |
| | | | | | AI312152, BF909758, BC001698.1, AF225418.1, AL133067.1, AL049300.1, AL110196.1, AB055368.1, |
| | | | | | AL122050.1, AL096744.1, AF090934.1, AL137529.1, AK025958.1, BC006201.1, U42766.1, AL133565.1, |
| | | | | | AF218031.1, AL136640.1, AK026784.1, AL117457.1, AK026434.1, BC007199.1, AL136787.1, |
| | | | | | AL389935.1, AL162006.1, S61953.1, AB060908.1, AL136790.1, AF097996.1, BC007926.1, AB062978.1, |
| | | | | | AF218014.1, AF090900.1, AB047631.1, AB047941.1, AL512733.1, AL050393.1, S78214.1, AL357195.1, |
| | | | | | AB060929.1, AL133557.1, BC004908.1, AB055303.1, AB060887.1, AF207829.1, AL133080.1, |
| | | | | | AL133640.1, AF210052.1, BC000090.1, AL359601.1, BC003120.1, AK026518.1, AL137459.1, |
| | | | | | BC001293.1, AK025015.1, AL035458.35, AF078844.1, AL050116.1, BC003683.1, BC008417.1, |
| | | | | | AB052200.1, AL442072.1, AK027868.1, AB060229.1, AK026353.1, AB060873.1, AL512746.1, |
| | | | | | AF111847.1, AL133606.1, AK026542.1, AB056427.1, AK024992.1, BC001967.1, BC004370.1, |
| | | | | | AL049314.1, AB060837.1, AL050146.1, AL442082.1, AK026506.1, AL137527.1, AB049892.1, |
| | | | | | AF022813.1, AL049382.1, AB063008.1, AK027161.1, AL359583.1, AK026741.1, AB048974.1, |
| | | | | | BC006525.1, AK026927.1, AL157431.1, AL162085.1, AF090896.1, AL122121.1, AL162002.1, |
| | | | | | AK026583.1, AL049430.1, AK026797.1, Z37987.1, AL136789.1, AL133016.1, AK000323.1, |
| | | | | | AL122118.1, BC006807.1, AL136749.1, AB055361.1, AL137283.1, Y16645.1, AF090943.1, AK026480.1, |
| | | | | | AF285836.1, AK026522.1, AK026630.1, AK025708.1, AK025484.1, BC008387.1, AB060826.1, |
| | | | | | AK026086.1, AL133093.1, AB063070.1, AK000432.1, AK025339.1, BC004195.1, AF146568.1, |
| | | | | | AL137705.1, AL122123.1, BC003104.1, AK000618.1, BC008836.1, AK026855.1, AL136844.1, |
| | | | | | AB056420.1, AB052191.1, AK025092.1, AL049452.1, AL117460.1, AF090886.1, AF090903.1, |
| | | | | | AL136845.1, AK024538.1, AL137292.1, AL136799.1, AL512719.1, AB047615.1, AK026744.1, |
| | | | | | AB056421.1, AL117583.1, AL442083.1, AK024974.1, AK000212.1, AK000083.1, AB056809.1, |
| | | | | | AL110221.1, BC007680.1, AK026452.1, AB047904.1, AL353956.1, AF056191.1, BC006195.1, |
| | | | | | AL136784.1, AF104032.1, AF091084.1, AL512750.1, AL512718.1, AK026045.1, AB060863.1, |
| | | | | | AF125949.1, AL137488.1, AL390167.1, AL080124.1, AL137276.1, AL050277.1, AB048953.1, |
| | | | | | AL512761.1, AL137271.1, AL359596.1, AB063046.1, AB055366.1, AF120268.1, AJ242859.1, |
| | | | | | AK025632.1, AL080127.1, AB049758.1, AK026924.1, AL137550.1, U72621.3, BC001418.2, |
| | | | | | AK024594.1, AB051158.1, BC006440.1, AL049283.1, Y10936.1, AK025375.1, AK025414.1, |
| | | | | | AK025573.1, AB060852.1, AL512689.1, AL122100.1, AL583915.1, AL110225.1, AL136892.1, |
| | | | | | AY034001.1, AK026600.1, D83032.1, BC007021.1, BC003687.1, AB047878.1, AL136884.1, |
| | | | | | BC008488.1, Y14040.1, BC002839.1, AL389983.1, BC008899.1, AK000137.1, AL049466.1, |
| | | | | | AK026959.1, AB048954.1, AB063088.1, AL136893.1, BC008282.1, BC004119.1, AL136586.1, |
| | | | | | AF090901.1, AL122093.1, BC008893.1, AB060214.1, AL096751.1, BC008365.1, AL080060.1, |
| | | | | | AK027113.1, AB060912.1, AL162083.1, AL136767.1, AL049938.1, AL512684.1, BC002647.1, |
| | | | | | AK000445.1, BC006408.1, AF069506.1, AK025084.1, BC007556.1, AL133075.1, BC003548.1, |
| | | | | | AL137533.1, BC008078.1, AL136864.1, AL137548.1, AF106862.1, BC006832.1, AK026591.1, |
| | | | | | AL133560.1, AK000652.1. |
| HCFLN88 | 51 | 610000 | 1-1420 | 15-1434 | AL526786, BE622815, BE746913, BG167566, BE612603, BE613343, BE543099, AW328570, AI084727, |
| | | | | | AW511229, BE879597, AA643500, AI090381, BE876617, AW055002, AI744096, AA714840, AI148138, |
| | | | | | AA598703, AW340721, BE559510, AI125728, AI830384, AU151986, AI885716, BF432640, AI475597, |
| | | | | | AW339888, AI377299, AI309247, AW005497, AW771450, BE622365, AI139390, AI422379, N95665, |
| | | | | | AI144110, BF341713, AI919264, AI475648, AI189926, BF809564, AI559248, BE396630, AI817016, |
| | | | | | AI640708, AA825735, AV662025, BF526593, AI708507, AA935563, AW939178, AW939138, |
| | | | | | AW939190, AA961207, N66071, N69365, AA603786, AW939128, AI285062, AI826293, AW951255, |
| | | | | | BF512843, AA620317, AW605529, N80991, AI285338, AW381729, BF956527, AI031873, AW381749, |
| | | | | | BG056758, AW371517, AW381756, R78288, AI434319, AI282698, AI343784, AW002119, AW169595, |
| | | | | | N48713, AW371499, AI537993, N26561, R52366, AI916353, R93746, BE828699, AA835499, |
| | | | | | AW072300, W70306, AA907306, AW748173, N68294, AI468129, BG032430, H89920, AI080137, |
| | | | | | AA326474, H69097, AA826574, AW303330, AI858652, AI804227, AA322294, AI342977, AA291513, |
| | | | | | N35677, AI824463, T86711, H49562, Z19236, AI500205, AW966976, AI187820, R78289, AL525884, |
| | | | | | W76006, BE828722, N81088, F37932, R31642, AA905077, AA922535, AA877249, BF957167, |
| | | | | | AA780926, BG055657, AW087260, AI202070, AW129497, AA911554, AA045568, R32359, AA204681, |
| | | | | | AA057054, AA364763, R63145, AI277392, AI886719, BE616036, AW238934, AI082383, BG164867, |
| | | | | | BG150873, BE548567, BG035187, N91393, BF957863, H69096, R88359, AW328569, BF743483, |
| | | | | | BF742356, BC001967.1, BC000956.2, AC005089.2, X89985.1, AJ223979.1. |
| HCHAB84 | 52 | 834326 | 1-1345 | 15-1359 | X84712, BF526942, BF036429, BF035689, BF034330, BE878646, BG117306, BE906856, BE871642, AV703538, AW955111, |
| | | | | | BE729985, BE958344, BE271782, BF698225, BE568321, BG250080, BF826293, |
| | | | | | BE156569, AW579884, BF977502, AA587630, BE621946, BF512422, BF695706, AV764128, AA448786, |
| | | | | | AI032411, AA477231, BF695587, AA641139, BE621432, H02682, H02590, H29948, AW972521, |
| | | | | | AA186733, BF909586, R22544, BE673152, AW405966, AI358557, R22543, BG169787, BF813006, |
| | | | | | BF742389, AW673871, AA327923, AW392393, AA311766, BF916201, BF742334, R70413, AV763358, |
| | | | | | AA505606, AA477230, AW794624, AW674083, AA595661, AA579044, AW265468, AA807704, |
| | | | | | AA642809, AW021674, AA618263, AA405570, BG180320, AA533066, AI702049, AI061313, AI254267, |
| | | | | | AA084439, AA491767, BG059139, AL042667, AL042670, AA187682, AV763460, BF131490, |
| | | | | | AA313025, AL121039, AA557945, AW148821, BF901147, AW402784, AA693484, AV758870, |
| | | | | | AW410844, AW873417, AA601376, AL119909, AI251024, AI444575, BF725761, AW963489, |
| | | | | | BF857486, AI141202, AA776665, AW069110, AA601290, AW469462, AW270385, AI572680, |
| | | | | | AW028376, BF817511, AA809116, BF739035, AI064968, AA640310, AA535216, AI679759, AI753113, |
| | | | | | BF030482, AA600863, AI185160, AW192930, AL138262, BG118544, AW675677, AW023390, |
| | | | | | AW672927, R67038, AI445699, AI312267, AA659832, AV647070, BF804385, AA610644, AI821901, |
| | | | | | AV764383, AW105463, BF770715, R83577, AU157209, AI039257, AA602906, AA809546, AW820105, |
| | | | | | AA502991, AV762112, AI252611, AI567676, AI476049, AA015948, AF126023.1, AF126024.1, |
| | | | | | BC005943.1, U02057.1, AC002492.1, AL365364.19, AP001760.1, Z68276.1, AC008649.6, AC007842.1, |
| | | | | | AL157823.9, AL162587.20, AP001711.1, AC021752.5, AC007405.6, AP000133.1, AP000211.1, |
| | | | | | AC090514.1, AC004922.2, AC013449.8, AL034451.26, AC008891.7, AC020659.5, AL139039.17, |
| | | | | | AF168787.1, AC010463.6, AC003102.1, AL139353.3, AC006261.1, AC009756.9, AC008946.6, |
| | | | | | AP000563.1, AC002310.1, AC008068.4, U47924.1, Z69719.1, AL050349.27, AC003048.1, AL359983.7, |
| | | | | | AC009412.6, AL391839.9, AL031846.2, AL121655.1, Z95331.2, AL389875.1, AC005207.1, AC020716.3, |
| | | | | | AC009137.6, AP000252.1, AC026172.3, AC006111.3, AP001692.1, AC007333.6, AC005821.1, |
| | | | | | AB038653.1, AL035684.25, AC005081.3, AC008745.6, AL136300.22, AC005902.7, AC073073.2, |
| | | | | | AL034418.5, AJ295844.1, AL139317.5, AC020904.6, AF139813.1, AC005519.3, AL445483.13, |
| | | | | | AP003357.2, AC087239.18, AL049869.6, AC020906.6, AC025280.4, L78810.1, AC008567.4, Z83844.5, |
| | | | | | AC008821.5, AC009220.10, AC073898.1, AC009311.3, AC004542.1, AC002306.1, AL031311.1, |
| | | | | | AC016683.7, AL158207.15, AC023105.7, AC006449.19, AL139100.9, AC016594.6, AL356805.5, |
| | | | | | AC008044.4, AL133517.11, AL133541.21, AC016763.8, AC002554.1, AL020993.1, AC008403.6, |
| | | | | | AC005355.1, AL121675.36, AL359695.6, AC005261.1, AL163032.3, AL513550.9, AP000511.1, |
| | | | | | AL589677.6, AC026464.6, AL096712.20, AC024561.4, AC011448.3, AL117348.25, AC010627.5, |
| | | | | | AC073657.5, AC005288.1, AC010271.6, AP001745.1, AL135783.6, AC090950.1, AF334404.1, |
| | | | | | AC007055.3, AC008771.4, L44140.1, AL031427.15, AC010319.7, AC007637.9, AL158158.14, |
| | | | | | AL035086.12, AL451125.7, AC018711.4, AC012085.4, AL135752.6, AC009247.12, Z84466.1, |
| | | | | | AF053356.1, AC008009.4, AC025165.27, AL133211.9, AL158830.17, AC002551.1, AL109984.14, |
| | | | | | AC002477.1, AL159168.15, AF205588.1, AC007383.4, AP000146.1, AC010491.3, AC006483.3, |
| | | | | | AE000658.1, AC004883.2, AC025264.16, AL133230.25, AC007390.3, AF042090.1, AL035455.30, |
| | | | | | AC005280.3, AC008897.7, AC069255.18, AC011495.6, AC005038.5, AC005914.1, AL136228.8, |
| | | | | | AP001709.1, AC022211.5, AL139113.21, Z97181.1, AL022323.7, AL137244.28, AE006462.1, Z98048.1, |
| | | | | | AL133453.3, AF111168.2, AC083884.6, AC010422.7, AP001630.1, AC010458.5, AL353716.18, |
| | | | | | AL109935.39, AL139316.5, Z94160.1, AC008857.5, AL157372.18, AP002007.4, AC005080.2, |
| | | | | | AC005412.6, AC008481.7, AC009123.6, AP000356.1, AL137787.11, AC004854.2, AL121886.22, |
| | | | | | AL133375.25, AC003684.1, AP002392.3, AL121594.6, AC027319.5, AC026185.3, AC005759.1, |
| | | | | | AC004263.1, AC020552.4, AC032011.14, AC004686.1, AL049636.22, AC007957.36, AJ243213.1, |
| | | | | | AL139343.9, AC091394.2, AL117381.32, AL163636.6, AC005527.3, AC008521.5, AP002427.3, |
| | | | | | AL354932.26, AC011891.3, AL138836.15, AC005529.7, AC004975.2, AL442166.1, AB023048.1, |
| | | | | | AC008555.5, AC011445.6, AC005781.1, AC080011.21, AL121712.27, AC020934.7, AC008372.6, |
| | | | | | AL031587.3, AL121601.13, AL133355.12, AC026445.4, Z84488.1, AL050347.1, AL161747.5, |
| | | | | | AP000744.4, AC083876.2, AL359236.4, AL133448.4, AL163284.2, AC008543.7, AC007255.4, |
| | | | | | AL096701.14, AC010203.13, AL157818.12, AL133312.3, AC005180.2, AC010620.4, AF038458.1, |
| | | | | | AC004659.1, AC007277.2, AC000353.27. |
| HCLBK61 | 53 | 845659 | 1-1574 | 15-1588 | AW888225, BE909010, BG179776, BG035454, BG110521, AW961918, AL046940, AW886511, |
| | | | | | BE257058, BG028046, AV704518, AV707665, AA115296, BE778760, BF968134, BG118898, |
| | | | | | AA127752, AV709320, AA482432, BF844844, AI719551, AA115271, AV706611, AA292209, |
| | | | | | AA127675, AI754750, AI817764, AI084658, AI921925, BF215850, AI480051, BG028121, AI720847, |
| | | | | | AI936895, AV704680, BF844824, AI978596, AI973004, AV706575, BE315319, BF930346, BF675963, |
| | | | | | AI754633, W39064, N25471, AA927727, BF667059, AA482579, BF593800, AI142422, N94401, |
| | | | | | AI423383, AA452021, BE810269, AA009997, BF204826, R58555, AA890468, W29031, AA575879, |
| | | | | | AI096965, BF058738, BF038338, AA988949, AA894599, BE881224, AI050691, AW378187, AI139378, |
| | | | | | H63931, AV749480, AI678930, AI086800, N27892, BE272725, AV746711, BF793328, AI081394, |
| | | | | | AI359024, BF130110, AA399442, AA429791, AI378588, AI051332, BE176746, AW043773, AA772301, |
| | | | | | AW771084, AA700495, N33460, AA984550, AA911305, AW378172, AI125344, AI949335, W03369, |
| | | | | | AI300324, AI270397, AI344414, AI337951, AI278254, AA558222, BF726680, AA861332, N20819, |
| | | | | | AI193787, AI084108, AA916406, AI902353, W04346, AA425936, AA643567, W76634, N30542, |
| | | | | | AA938581, AA428805, AI497697, AI057222, BF351642, C03717, AI147178, BF845000, AA028054, |
| | | | | | AA412390, W30996, W69873, AL523500, BF449052, AA470118, AV713038, AA425645, AA047051, |
| | | | | | AI344638, H83544, BF059077, AA532699, N42433, N32467, H28269, H63932, BF726505, W21922, |
| | | | | | AA702306, BF432294, AI873123, H77909, N21060, AA577542, BF798936, H28220, AI085350, |
| | | | | | AA503903, AA740273, AA659072, AI168251, AA039609, BG152771, R96127, BF434642, AI359034, |
| | | | | | T36061, N67698, AI568058, AA494013, N27140, AA421453, AA009998, AW337863, T53377, |
| | | | | | BF763474, AW005163, AI873124, AA326544, AA421485, H63529, AA960770, AA531176, AA856783, |
| | | | | | BF752804, AV751492, BF948183, H63530, AA348414, BF092572, AI095810, H85295, BE767177, |
| | | | | | AA580353, AI217059, N40077, BE706846, H52470, BF832678, AA463191, AA558171, AA463190, |
| | | | | | R01193, AA373286, AA635123, T94569, H29968, H29872, BF751352, BF764314, BF765576, AI669786, |
| | | | | | H52471, AA830715, BF752791, R77247, N89808, AA844445, AA317712, AI332804, BF056933, |
| | | | | | BF764311, AL523501, R55436, BF929262, AW243538, BF092554, H54201, T32427, AA757759, |
| | | | | | AI803744, AA463278, AA355008, BF678579, AA768259, AA724652, H84289, AA330278, BF196615, |
| | | | | | BE706366, H85448, AA361590, BG011029, AW664707, AA319575, R01305, Z25103, AA301933, |
| | | | | | T56761, AA384049, BF813459, N56549, AA861336, T94259, BF752233, BF752225, AC009299.5, |
| | | | | | AC005837.1, T53378, T56762, T93294, T93970, R54987, R77248, H06183, H11502, H11862, H84831, |
| | | | | | H85339, H84970, H85729, H85822, H86001, N40893, N74180, N98765, W73027, W93909, AA018728, |
| | | | | | AA019282, AA035257, AA064779, AA083961, AA112160, AA129076, AA129077, AA234327, |
| | | | | | AA262998, AA583602, AA715448, N56021, N56477, N86983, C03990, AA028053, AA704666, |
| | | | | | AA718987, AI025994, Z28779, Z43917. |
| HCMSX51 | 54 | 788643 | 1-2239 | 15-2253 | AL520206, AL522291, AL520207, BG115714, BG023953, BF343959, AU133571, BE839880, |
| | | | | | AW954438, BE264316, BG261277, BE879757, AU131026, BE265959, BE278903, BF725639, |
| | | | | | AW246741, AA864833, AU148856, BF111640, AA706935, AA431813, N38742, BE857705, BF476344, |
| | | | | | AU152863, AU125122, AA480041, AW170367, AI094797, AU154528, N48379, BF913004, N26479, |
| | | | | | AI803158, AL120744, N35219, AW245159, AI089912, AI927351, N20323, AL046695, AA476664, |
| | | | | | N35530, AI078494, AA015687, AI016568, BE857202, AI587317, AA446620, AW629254, AI433184, |
| | | | | | AA548282, W03412, N27597, W00855, AA825427, AI128747, AI082265, H38927, BF970202, R48359, |
| | | | | | AI569253, N29410, N44883, AW014479, AA934555, N41471, AW974179, R15948, AA573084, |
| | | | | | AA233832, AA017058, W16680, AI312737, R60804, N67483, R15949, Z43237, BE811896, N45053, |
| | | | | | BE832888, T11764, Z43099, AA431409, R48260, AI933045, AW874096, AW105691, AA336676, |
| | | | | | AA044969, BF362640, AW893387, AW892550, AW892516, R60299, N35043, T49574, Z41630, |
| | | | | | AA013473, N35211, AA738419, AA223632, H86402, T49573, AA017209, BF941569, AA635071, |
| | | | | | AA054652, H86066, AI351292, F02575, N79527, T11765, T35773, AW993110, AW194575, BE893541, |
| | | | | | AA448030, AI086309, BF737533, AF001690.1, AF029231.1, U96629.1, AB007042.1, AB011091.1, |
| | | | | | T66574, T66575. |
| HCNCO11 | 55 | 775086 | 1-732 | 15-746 | BF926420, BF926408, BF875996, AV705104, AV726755, AW964429, AW950395, AV703435, AV707451, AV707628, AW961373, |
| | | | | | AV705453, AW964210, AW964423, AV704361, AW952896, |
| | | | | | AW961510, AV726887, AV729165, AW963643, AV707705, AW963965, AV707556, AV702814, |
| | | | | | AW963219, AV704916, AV706906, AV703045, AW950229, AV690921, AV704674, AV728297, |
| | | | | | AV702810, AW960535, AI557262, AW963644, AV708024, AV701594, AV727806, AV727803, |
| | | | | | AW957298, AV650843, AW957682, AV704283, AV708829, AV701751, AW950078, AW950079, |
| | | | | | AW949946, AW961329, AW954386, AW954962, AW957974, AW952228, AV725024, AW960663, |
| | | | | | AW957083, AW950256, AV649266, AV704144, AV703160, AW963857, AW966775, AW958568, |
| | | | | | AW964298, AW958569, AW966684, AW951998, AV704342, AV703361, AV704848, AV703833, |
| | | | | | AV703425, AV705771, AV653846, AV728884, AW960406, AW954104, AW945153, AV650865, |
| | | | | | AV705189, AW958320, AW958316, AV729457, AV728929, AV729285, AV726743, AW949454, |
| | | | | | AW953619, AW955397, AW949863, AV701787, AW945196, AV708035, AV702901, AW961052, |
| | | | | | AV701953, AW963108, AV729170, AW958127, AV703284, AV706964, AV728355, AW963612, |
| | | | | | D50992, AV703367, AV706742, AV703862, AV706047, AV709139, AV652860, AW955394, AV702749, |
| | | | | | AV708590, AV707020, AW951793, AW951816, AW967188, AV705481, AV706133, AV702435, |
| | | | | | AV702958, AW955616, AW954194, AW962970, AV726728, AV705420, AV726770, AV695489, |
| | | | | | AV691061, AW963234, AW955139, AV649942, AW962367, AW964203, AW954242, AW954413, |
| | | | | | AV727101, AV707189, AW966146, AW951740, AW960600, AW952132, AV703632, AW961431, |
| | | | | | AW964278, AW958290, AW959722, AV659467, AV706802, AV705998, AV709332, AV705516, |
| | | | | | AV728913, AV728341, AV709281, AW958045, AW950597, AV707266, AW950411, AW960545, |
| | | | | | AV705267, AV704712, AV704401, AV702819, AV702458, AV702187, AW965827, AV727386, |
| | | | | | AW949731, AV707117, AV702298, AV701626, AV727268, AV703465, AW954783, AW953992, |
| | | | | | AW963581, AW958104, AW950254, AV705154, AW962980, AW957286, AW962378, AW958093, |
| | | | | | AW963811, AW954221, AV727618, AW963652, AV652536, AW962929, AV704033, AW950520, |
| | | | | | AW952361, AV701614, AV705518, AV728428, AV729392, AV702035, AV709623, AV702315, |
| | | | | | AV703266, AV707197, AW945183, AV727756, AV707238, AV706910, AW961377, AW945164, |
| | | | | | AW950681, AV647033, AV647066, AV647129, AW957628, AW952419, AV707649, AW957779, |
| | | | | | AV647144, AV702975, D59751, AV650924, AV693604, AW960143, AW963486, AV704876, AV705321, |
| | | | | | AV652547, AV650877, AW955698, AV707907, AW956167, AW963667, AV703264, AW963401, |
| | | | | | AV653784, AV727589, AW963641, AW955697, AW955632, AW955629, AV728741, AW961403, |
| | | | | | AW949521, U94592.1, Z30183.1. |
| HCNSD29 | 56 | 862314 | 1-1714 | 15-1728 | AU130793, AA902780, BG114197, AA675900, BE548792, BE796388, Z78308, BF973800, BF125408, |
| | | | | | BF382619, BF894864, AA902842, AW083941, BF243278, AW131275, AA155995, AW771771, |
| | | | | | AA938206, BE251257, AI745367, AA448317, AW511804, AA448455, AI370549, BE139488, |
| | | | | | AW176079, AA156223, H73833, BF940408, H73162, AW084204, BF062122, AW028149, BF924722, |
| | | | | | BF433518, AI263130, AA411961, AW071942, BF694503, AA743704, AV764156, BF948901, |
| | | | | | AW082575, R11580, AA412712, BG153595, BG058948, BF893682, AU130757, BF667868, AF049523.1, |
| | | | | | BC000273.1, AF049528.1, AK024810.1, U70667.1, AF049524.1, AK023109.1, R34683, R34788, R63327, |
| | | | | | R63326, R63340, R63341, H15969, H27538, H27547, H27621, H82731, H83344, H83606, H83696, |
| | | | | | N20620, N32195, N33798, N36103, N36549, N41405, N41578, N44109, W19354, W25310, W38906, |
| | | | | | W60991, W73124, N89856, AA027859, AA027925, AA034908, AA034975, AA133603, AA133602, |
| | | | | | AA172294, AA261835, AA262483, AA523928, AA551549, AA563835, AA857095, AA872771, |
| | | | | | AI095007, AI096629, C05812, C15709, AA247765, AA393650, AA400834, AA487693, AA488710, |
| | | | | | AA663750, Z21548, AA843596, AA844473, AI041193, AI083985, Z41640, Z46025, Z44537, F03607, |
| | | | | | D11797, AI262317, AI264408, AI304594. |
| HCQBH72 | 57 | 637548 | 1-1782 | 15-1796 | |
| HCQCC96 | 58 | 845066 | 1-2152 | 15-2166 | BF970581, BG117166, AV695085, AV686338, AI341460, AW173384, AV693976, BF032394, |
| | | | | | BG024316, BE893802, BG254562, AW055235, W39204, BG170478, AW978735, BF572731, AW968956, |
| | | | | | AI909118, AI909124, AW592429, BG171038, AW118938, AI689438, AI419443, AI801242, AW438695, |
| | | | | | AI123971, N59864, AA707755, AA974210, AW130020, AA489046, AA768780, AI146982, AW768627, |
| | | | | | AI093766, AW889585, AW298736, BF111650, AA284319, AA907244, AW874520, AI535676, |
| | | | | | AW579265, AI955386, AA279581, AA983814, BF185409, BE622718, N59886, AI859864, AI498376, |
| | | | | | BG171039, BG116650, W01363, AI699807, AA824487, T86598, AA994605, AW044013, T85108, |
| | | | | | AA489144, AW768600, AA811658, AW271482, BE895361, AI631722, AW021293, R64514, T77523, |
| | | | | | AA736753, H44608, AI955411, AV689519, N90263, AL119283, H94626, T77559, AL119309, T86597, |
| | | | | | AI909117, AW376940, N79005, N77027, AW105078, N62828, AI701272, AI334730, T07505, |
| | | | | | AW848643, AW243861, AI909110, BG007292, BE162291, BE162293, AA532611, AP001816.2, |
| | | | | | AL022153.1, AC004804.1, AC015982.9, AC006840.17. |
| HCUDD64 | 59 | 835082 | 1-388 | 15-402 | BF109963, AI870761, AI149403, BE675981, AI979111, AI590348, AI769440, AA568609, F04371, |
| | | | | | R68556, N24429, R85927, AW973928, W02539, BG150863, R79201, N69412, R79466, T80848, |
| | | | | | AI494453, R28549, AW440020, AL390151.1. |
| HCWAE64 | 60 | 535893 | 1-457 | 15-471 | AL043265, BE895962, BF091850, BF924502, BF930204, AW973724, BE906549, BF972009, AA558125, |
| | | | | | BG163769, AW993087. |
| HDPCW16 | 61 | 840358 | 1-1522 | 15-1536 | AL046424, AL520269, AL530345, AL520270, AL525169, BF337231, BG118238, BE798545, AW246567, |
| | | | | | BF970663, BF965787, BF969366, BE783929, BE793384, BE266986, BF528633, BF347353, AL525170, |
| | | | | | AI815776, BF344880, BF792135, AW793516, BE263579, AW297948, AW296357, BG059919, |
| | | | | | BF968412, BE261945, AW364801, BE070095, AW516100, AI859217, AI205184, BE350228, AW245703, |
| | | | | | AW248385, AW008242, AI674610, AA450134, AA677778, AW191853, AW083410, AI973282, |
| | | | | | BF155249, AI500208, AI359204, BF961380, AI571182, AA593565, BG025370, AW194193, AI214035, |
| | | | | | AV698756, AI659973, H17114, AA225572, AW245580, AW247948, AW954225, AA861285, BF745614, |
| | | | | | AI927559, BE265979, AA775443, AW015750, H18943, AA642634, BF836642, AW732061, AA665550, |
| | | | | | AA678588, AI817267, D60749, AI674941, AF009759, H74159, D60750, Z40715, AI698885, AA564889, |
| | | | | | AA687090, AA225658, AA468959, D51256, AI435027, T91353, BF593487, AI520908, AI597773, |
| | | | | | AI865553, AI694877, AI041194, AW135397, R12563, H17219, AA777103, BF834394, AA337430, |
| | | | | | AA694470, BF916766, BG111049, AI872869, AI572751, AI927445, D81096, AI342344, T30521, T91440, |
| | | | | | T30520, AA662525, AW149871, AI312176, T30121, AA090561, T15863, AI985606, AI053516, N88658, |
| | | | | | AI566726, R09913, R62464, AA339338, AA523081, AW961065, BF222090, AA927388, AW874224, |
| | | | | | AA558682, AA478552, BF111253, BF855358, BF209274, BF677966, M78952, T32904, BF957728, |
| | | | | | AW059622, BE746763, AL047548, AF108658.1, AL050118.1, AC004228.2, AF084559.1, AK027459.1, |
| | | | | | AK027577.1, AK027513.1, AF126799.1, AF139813.1, AC004770.1. |
| HDPDI72 | 62 | 897277 | 1-1536 | 15-1550 | AV717810, AC018828.3, AC011464.5, AC022383.3, AC022384.4, AC034193.4, AC002472.6, |
| | | | | | AC021015.4, AC008119.6, AL356299.16, AC004951.5, AC018808.4, AF003626.1, AP000215.1. |
| HDPGE24 | 63 | 801947 | 1-2611 | 15-2625 | BE876192, AU145980, BE839859, AW953709, AV651029, AW866434, AW866436, AW866430, |
| | | | | | AV687299, AA604920, AA604512, AI887664, AW813014, BE839866, AA164729, AI566037, |
| | | | | | AA602341, AA602613, AA214047, BE839860, AI355441, AW855356, AA506540, AU119708, |
| | | | | | AW855353, AI884345, AV656490, AI049591, AW853687, AW995969, AI963674, BG058784, BF681462, |
| | | | | | BE811870, AA551394, BE081412, BE672638, AV687875, BE564307, AW935217, BE811892, BE145548, |
| | | | | | BE563924, AW577107, AV704081, AA631460, AW380640, AA366464, BG012149, BF694965, |
| | | | | | AW341886, AW866268, AI537997, F29519, AI537504, AI567884, BF874935, AV659506, AW363563, |
| | | | | | AA631500, AI363970, AA669020, AI270484, H78415, BE709511, AA640505, BE178526, AI989765, |
| | | | | | AW866337, AW953693, AA484751, AA342969, BF882965, AA484783, AV659374, BE796439, |
| | | | | | AV695480, AV659391, AW024055, AV659405, AI832956, T81440, AA654981, R70506, BF852810, |
| | | | | | AA484906, AW997573, AW379425, AI932609, AA631380, AA570339, BE708328, AI597820, |
| | | | | | BF694852, BE815355, AW934969, AW902128, AV684943, AA366571, BG260565, AA632800, |
| | | | | | AW007894, AW192258, AI886084, AV764490, H82763, AW131401, T69164, AA605054, AW573583, |
| | | | | | AA834697, AW858120, AW893702, AW573573, AW074527, AV714931, AW820698, AI679343, |
| | | | | | AA558871, BF853927, AW438596, BF883928, Z32833, AA503427, AW393438, AA610678, AA522988, |
| | | | | | AA483882, R95100, AW893701, T59151, AW965008, AA848158, BE067011, T98359, T68422, |
| | | | | | AI679520, BF935516, AA528276, BE839943, BE929829, AL120269, AV759172, H02561, AV760701, |
| | | | | | AW802714, BE541237, N21656, AI457389, BE066950, T30343, AI679960, H78215, AV700663, |
| | | | | | AW978714, AL135377, AA243867, AW151713, AW102955, BF884208, AW157616, BF846275, |
| | | | | | BG034591, BF106210, BG011353, AA161288, BF883454, AC000353.27, AF001893.1, AC006121.1, |
| | | | | | AC005484.2, AP001710.1, AL590762.1, AC009961.11, AL035555.10, AL160411.25, Z83822.1, |
| | | | | | AC022402.4, AL136139.6, AC005291.1, AC007225.2, AC007021.3, AC018828.3, AC010742.4, |
| | | | | | AL391259.15, AC090943.1, AC090514.1, Z98946.15, AL450263.15, AL034372.33, AC008873.4, |
| | | | | | AP002812.3, AF224669.1, AC006030.2, AL031311.1, AL122020.5, AL049759.10, AL117692.5, |
| | | | | | Z94801.1, AC008670.4, AL022318.2, AC008892.5, AC027124.4, AP000555.1, AP001169.1, AC018502.5, |
| | | | | | AC002378.1, AL390074.17, AC083863.2, AC066597.4, AC002091.1, AC079141.7, Z94056.1, |
| | | | | | AC005157.1, AL354720.14, AC026391.6, AP001715.1, AC040160.4, AL139109.14, Z97054.1, |
| | | | | | AC002289.1, AC007450.1, AC007482.7, AE000658.1, AL499604.9, Z84484.1, AP001724.1, |
| | | | | | AL109865.36, AC066608.5, AC073101.7, AC007850.29, AL137139.9, AL079342.17, AC018642.6, |
| | | | | | AC007773.1, AC024163.2, AL162231.20, AC007097.4, AL035685.21, AP000352.2, AL021368.1, |
| | | | | | AF111167.2, AC007363.3, AF088219.1, AC004125.1, AC009137.6, AC018755.3, AL158828.14, |
| | | | | | AC026398.4, AL356652.19, AC005846.1, AC023510.16, AL355096.4, AC034240.4, AL049713.20, |
| | | | | | AC011742.3, AL163853.4, AC015982.9, AL138743.5, AC007907.2, AC091492.1, AC021188.6, |
| | | | | | AC018682.4, AL138878.10, AL390025.1, AC006050.1, AB026898.1, AC011236.8, AC004024.2, |
| | | | | | AC005214.1, AC002464.1, AL139113.21, AC005046.3, AP000246.1, AP000207.1, AC007563.2, |
| | | | | | AC005520.2, AL137128.4, AL031670.6, AL442167.1, AL163285.2, AC011816.17, AC024166.3, |
| | | | | | AC011739.7, AC013734.4, AL021154.1, AC005881.3, AC005697.1, AL022165.1, AL391114.12, |
| | | | | | AL023513.1, Z98044.13, AC000094.3, AP000129.1, AL139415.10, AC011242.8, Z98304.1, AL589693.3, |
| | | | | | AL391122.9, AL445435.11, AC003071.1, AF131216.1, AL360272.23, AC087071.2, AC003962.1, |
| | | | | | AL136123.19, AC020908.6, AP001830.4, AC008450.5, AL445669.9, AJ271736.1, AL034550.31, |
| | | | | | AL118557.5, AC008891.7, AP000782.3, AP000500.1, AC011464.5, AC011311.11, AL158196.24, |
| | | | | | AC025262.27, AL049869.6, Z93341.5, AC022468.5, Z92542.2, AL034384.1, AP001728.1, AL031387.4, |
| | | | | | AC002994.2, AL591807.1, AC022407.6, AL160231.4, AC007065.5, AC005539.1, AL050318.13, |
| | | | | | U91322.1, AL133415.12, AC010252.3, AC068781.18, AL133500.3, AC008011.11, AJ400877.1, |
| | | | | | AL390738.4, AC044797.5, AC006445.11, AP000688.1, AL445071.14, AL133545.10, AL035089.21, |
| | | | | | Z98884.11, AL355535.14, AC007999.12, AC022007.3, AC083871.2, AP000350.1, AL354696.11, |
| | | | | | U80017.1, AP001671.1, AL121997.7, AC007282.4, AL139330.17, AL049779.6, AL163282.2, U82671.3, |
| | | | | | AL445928.8, AP001412.2, AC022392.4, AJ400879.1, AL161454.10, AC090957.1, AP001922.4, |
| | | | | | AC003091.1, AC005971.5, AL121905.23, AL161935.10, AC022267.8, AL158141.14, AC025165.27, |
| | | | | | AL158198.14, AL160036.12, AL136303.15, AC004707.1, AC012450.9, AF131215.1, AL132657.33, |
| | | | | | AC006965.3, AL161937.13, AC005969.4, AC018633.2, AC004764.1, AL359846.11, AL118556.4, |
| | | | | | AF196970.1, AL137787.11, AL360169.17, AC018769.2, AC000052.16, AF190464.1, AL137100.4, |
| | | | | | AL445248.7, AC008738.6, AC018523.9, AC005670.1, AC010605.4, AC007541.9, AL049795.20, |
| | | | | | AL096712.20, AC006057.5, AC004019.20, AC006071.1, AC026166.4, AL132640.4, AC022201.4, |
| | | | | | AC008569.6, AC003049.1, Z84469.1. |
| HDPIE44 | 64 | 899328 | 1-4101 | 15-4115 | AL528314, AU130887, BE780963, BF966718, AL118570, BE739397, AU126476, AU139315, BF512830, |
| | | | | | BG115027, BE880693, AI908306, BF791388, BF035925, BF540985, AU122664, AV724420, AI672418, |
| | | | | | BF665031, BF057158, BF206660, BG120429, BE738855, BF129883, AW959181, BF106186, BF966523, |
| | | | | | BF213412, AI042351, BF211302, AL042137, BF515714, BF206917, BF031857, BF131974, BF129874, |
| | | | | | BE514139, AV696443, BF037314, AV661523, AW130577, AA424461, AW130565, AA902916, |
| | | | | | AU127429, BF677116, AU150429, BF665735, AA983275, AI239435, BE155330, AV705068, BF212900, |
| | | | | | AV710135, BF432386, BF057834, BF211687, AA461260, AA312396, AI627321, AI160503, N63373, |
| | | | | | BE502195, AV751301, AI884925, BE468064, BF513143, AV750990, AA186321, BF184200, BE559625, |
| | | | | | AA749086, AW025721, AU152756, AI418879, AA402517, N26419, AA088855, AI042350, BE268734, |
| | | | | | AI761107, AI819134, AA678020, AU150014, AA113363, AW341372, BF184441, AI457727, AA649198, |
| | | | | | BE674349, AA888970, AA580858, AA199866, BE270920, AV649723, H24854, AA100701, AW025691, |
| | | | | | BE836719, BG010680, BE550985, BE087003, AA326555, R77878, AA424417, AA188173, AL044709, |
| | | | | | H05951, BF792719, BF930036, N56631, N41679, BF923482, H45855, AI218982, AW779309, AV751002, |
| | | | | | BE089649, C17343, BF081703, R81295, AA502426, BE646243, BE931964, AW594429, BE676875, |
| | | | | | R11716, BF748564, H06000, AA460953, BE832883, AV703744, AI265945, AV751157, BE720186, |
| | | | | | AW021533, T09412, BF849176, AA088766, AA437111, AA336899, BE262777, AA358792, BE155518, |
| | | | | | H99315, BG166471, BE270762, BE313275, BF239379, AA888732, BE825194, T89695, D78877, |
| | | | | | AI269641, BG011279, AI469067, AW874055, AW338714, AW874611, N88500, BF445639, AW058314, |
| | | | | | BE677169, AW139207, R17691, T31819, AW513547, AW472793, AA358708, AV660383, AI765491, |
| | | | | | AI582998, AI084965, AA598573, AV750235, AA730781, R44452, D61165, AA716555, AA056000, |
| | | | | | AA322246, R08530, AA333655, BE972774, BE169279, AI870585, BE615699, AI870612, BE169269, |
| | | | | | AI678506, AI640581, AA648833, R08529, BE383572, BE247425, BF155632, R19666, AW993917, |
| | | | | | D62489, BG028138, AL040103, AA360932, AI763357, AI652881, BF088332, BE327501, AL528313, |
| | | | | | AA055971, AV749018, AV748843, AA088700, AI570710, AA004833, AI685231, AA178900, AI886543, |
| | | | | | BE812475, AW166705, BE812487, T89515, AA347000, D60417, BE937678, AW054783, BE812457, |
| | | | | | T48558, AA953749, AI199099, AI769397, AI369907, AA199752, BE701083, BF914380, BF508221, |
| | | | | | BE838996, BE707763, AV646433, BE819207, AV651409, T25765, AA113444, AB018353.1, |
| | | | | | AK022816.1, AK025737.1, AF202724.1, AK022469.1, AF064854.1, AL133074.1, AA188877. |
| HDPIU94 | 65 | 813352 | 1-2182 | 15-2196 | AU140297, AL529544, AL529545, AU124978, AI740820, AU116885, AU126162, AW960772, AI565169, |
| | | | | | BF111956, BG251247, BG177689, BE780814, AI628285, AA482031, BE784432, AA947029, AW954823, |
| | | | | | AW190175, AA315300, AU143854, AA707674, AI332610, N50136, AU148736, AU127152, AW768480, |
| | | | | | BF947113, AA223261, AW955931, AI276839, AA189165, AA804584, AA767472, AA223378, |
| | | | | | AA894857, AA252718, R46372, AA939277, N59367, AA219127, AA774827, AV762911, BE546354, |
| | | | | | N72682, AA219510, AV761697, AA872005, AW188325, W02461, R21326, AI923716, D29223, R68368, |
| | | | | | BF771937, BE769443, AA322537, R08745, AA417592, R08746, AW952240, AA299861, AW377015, |
| | | | | | AA337351, H60482, N76470, BF088734, AA218745, AA336556, BE896274, AI810734, AW118290, |
| | | | | | BF380800, T30177, D29202, BF910258, AA337527, AA336555, R68574, AI167609, AA376922, |
| | | | | | AW968355, BF351657, AI832198, AW972092, AW968356, AW972093, AW968729, AI432644, |
| | | | | | AI623302, AW971740, AI432654, AI432650, AI432653, AW081103, AW858522, AW972091, |
| | | | | | AW969229, BE672759, AW972090, AI432677, AI431230, AI431307, AI431316, AI431328, AI431353, |
| | | | | | AI431312, AI432655, AI431310, AW128900, AI431238, AL045327, AI431354, AI432666, AA580821, |
| | | | | | AI431347, AI431315, BF448552, BE672748, AI432661, AL134524, AI431323, AI431337, AI432675, |
| | | | | | AI431321, AI492519, BE672745, BE672732, AI431246, BE672719, U46344, AI431235, AI431243, |
| | | | | | AI432647, AI432651, BE672738, AI431255, AI432674, AI431330, AI432649, BE672767, AI791349, |
| | | | | | AW601637, AI431248, AI431241, AL042842, AI431254, BE672774, AI431357, AL042729, AI432672, |
| | | | | | AI432665, BE672742, AL042931, BF589777, AI432662, BE672627, AW577201, AI431345, BE672644, |
| | | | | | AL042655, AI431351, AL042508, AI431231, AI431346, AL042853, AI432676, AI432673, AI432658, |
| | | | | | AW128884, AI431257, AW577199, AL042533, AL043166, AL047611, AI431340, AL135012, BE672622, |
| | | | | | BE672792, AI432657, AL042802, AW128846, AI431247, AI432664, AI432645, BE672718, AL042787, |
| | | | | | AL042515, AL042832, AI431751, AL043295, AI431314, AI492520, BE672634, BE672743, AI355008, |
| | | | | | AI492510, AL042898, AI431350, AL043091, AI431318, BE883591, BG167830, BE672749, BE672744, |
| | | | | | AI682915, AL040207, AW128897, AI866786, AW129223, AL042488, AI432643, AL043278, |
| | | | | | AK022626.1, BC001240.1, AK001284.1, AF064854.1, AL133074.1, AL133053.1, AL136763.1, |
| | | | | | AL133049.1, AL133076.1, AL122101.1, AL136755.1, AL136758.1, AL133068.1, AL136825.1, |
| | | | | | AL133051.1. |
| HDPIY31 | 66 | 886159 | 1-1964 | 15-1978 | AL533296, AU142272, BE560264, BG117407, BE407326, BG116397, BE314927, BE315405, BF205715, |
| | | | | | AI935180, BE313422, AW965613, BF315382, AI701496, BF727272, BF115518, AI829152, AW474694, |
| | | | | | H23483, AL040572, AI005000, AA311926, BE297986, AI298282, BE743406, AI675622, AW845300, |
| | | | | | BF306252, AA037364, AI097581, BF308743, BE296105, AW148771, AI339720, AA455474, BE670969, |
| | | | | | H23486, T66744, BE818161, R17317, AI268300, AW070382, AI291626, AW409641, AA834030, |
| | | | | | AI880154, R17812, R13082, AA324613, H23484, T27067, H86644, BF892771, R46701, AA349448, |
| | | | | | R20964, AA923102, H05150, H23485, T87222, N77062, Z43932, H23020, AW136846, AI742491, |
| | | | | | AI372678, T16039, T66743, AI372676, R45314, BF681190, H08379, AW864486, AA732753, BE312682, |
| | | | | | AW864516, H29561, R22677, AA324777, AA774961, R25545, F10589, AI523364, AA379005, T26481, |
| | | | | | BF904678, Z39993, H06774, H24087, AA670426, R20154, Z42195, R44466, R18635, F07975, Z44889, |
| | | | | | R59906, AI560142, R53460, R43016, R20237, AI745398, BF904916, H24300, R41995, R53461, H06899, |
| | | | | | AW801037, T74057, F07778, H08380, AA323177, BF763326, M85501, F12373, BF689358, H08954, |
| | | | | | R44142, F04562, F01724, F04134, F04226, T15999, AA037520, AA677085, BF335984, R40512, R20492, |
| | | | | | AL533261, BF858775, R56265, R13207, AA987631, T34814, R42746, BE747609, F09993, AA099781, |
| | | | | | R63798, R43692, AA902512, AA455473, R55721, F04028, AI984376, AI243094, AA776086, BE504276, |
| | | | | | BE155765, T10103, Z38178, T16439, BF851177, T10102, BF851176, T16686, BF335999, F01506, |
| | | | | | BF851173, BE818200, R14040, BF851221, BE814269, BF851178, BE327839, H06858, AW003241, |
| | | | | | BE394938, BE393786, BF851170, BF884029, H13338, BF858389, AA234656, AW748209, AI393102, |
| | | | | | R47781, R50313, R50305, AA976743, BF851229, BF335998, AV727501, BG165051, AA323766, |
| | | | | | AI758272, BG163618, BG113299, AI922707, BG164558, BF037292, BF341801, AV746964, BF792961, |
| | | | | | BG030364, AA643623, AI702406, BF970449, AW827289, BF921103, BE895585, AW827227, |
| | | | | | AW827206, AI471361, AW050578, AW196105, BG249582, AV682575, BG108406, AL036736, |
| | | | | | BE138658, AI345608, BE620202, AI431909, AI345471, AI805769, AI308032, BG027280, AI344785, |
| | | | | | AL041772, AI452993, AL134999, BG260037, AW983691, AW071417, AI924686, BF753056, BG112718, |
| | | | | | AI608936, AI963216, AW082594, AI335426, AI348777, BE965355, BF885000, AV735098, AI620284, |
| | | | | | R40432, AI269580, AI886124, BF814541, AI802833, AW302992, AI812015, BF343099, BF793644, |
| | | | | | AI799195, AI824576, AW168031, AL118506.27, AK023132.1, AK024508.1, AL137301.1, AK026542.1, |
| | | | | | AL389982.1, AK024538.1, AL359596.1, AF260566.1, AL137550.1, AL442072.1, BC008417.1, |
| | | | | | AL359615.1, BC003687.1, AK000432.1, BC004370.1, AL117585.1, AB063070.1, AK000647.1, |
| | | | | | BC008365.1, AF146568.1, AK026784.1, AF003737.1, AB055366.1, AB063084.1, AL110221.1, |
| | | | | | AK026462.1, AL110225.1, AL136892.1, AK027164.1, AK025967.1, AK026528.1, BC008280.1, |
| | | | | | AK027204.1, AB019565.1, AL359618.1, AK026629.1, AK025391.1, AL122050.1, AB050510.1, |
| | | | | | BC002733.1, AB060916.1, AL359941.1, AF217966.1, AL512754.1, AL117460.1, AK025798.1, |
| | | | | | AB055303.1, AB060887.1, AL136799.1, AF061943.1, AF078844.1, AK024524.1, AL136928.1, |
| | | | | | AB051158.1, BC008070.1, AF090943.1, BC005151.1, AF225424.1, AJ012755.1, AL080060.1, |
| | | | | | BC008382.1, AL137271.1, AB056421.1, AL117583.1, AK000083.1, AB060929.1, AL050277.1, |
| | | | | | BC003548.1, AK026534.1, AF056191.1, AL136805.1, AL512718.1, AF026816.2, AL137556.1, |
| | | | | | AL049452.1, BC006164.1, AL137560.1, AK026045.1, AB055374.1, S78214.1, AL133557.1, AK026593.1, |
| | | | | | AL049382.1, AF271350.1, S61953.1, AF090934.1, AK026526.1, AL390154.1, BC001967.1, AK027116.1, |
| | | | | | AF177336.1, Z82022.1, AF183393.1, AK026630.1, AL389939.1, BC003684.1, AF090896.1, AK026551.1, |
| | | | | | AL110280.1, AF091084.1, BC007326.1, AF097996.1, BC002839.1, BC008899.1, AK026959.1, |
| | | | | | AB060863.1, AB063046.1, AL137459.1, AB048954.1, AK027213.1, BC001045.1, AB052200.1, |
| | | | | | AF125948.1, AL442082.1, AL136845.1, AL122093.1, AB060214.1, BC007199.1, U42766.1, AK026408.1, |
| | | | | | X72889.1, BC008780.1, AL137526.1, AL512719.1, AB055361.1, AK026762.1, AB060825.1, |
| | | | | | AL136768.1, AL583915.1, AK025484.1, AL353956.1, AL133565.1, AL512750.1, BC003683.1, |
| | | | | | AF113222.1, AK026532.1, AL133104.1, AB052191.1, BC009033.1, AK026504.1, AK027096.1, |
| | | | | | AB048953.1, AF162270.1, AF218014.1, AL136786.1, U39656.1, AB056427.1, AB063008.1, BC006440.1 |
| | | | | | X69819.1, BC004951.1, AK025414.1, AK027193.1, AL049464.1, AL137538.1, AK000486.1, |
| | | | | | AL136843.1, AL359601.1, AB055368.1, AK026927.1, BC007198.1, AF111847.1, AL353940.1, U80742.1, |
| | | | | | AL117394.1, AB056768.1, BC006412.1, BC009341.1, AL137480.1, AL136749.1, AK000618.1, |
| | | | | | AK026464.1, AB050534.1, AL133067.1, Y16645.1, AL137557.1, AL110196.1, AK000445.1, |
| | | | | | AB047615.1, AK026642.1, AK025906.1, AK000137.1, AK026947.1, AK025491.1, BC004958.1, |
| | | | | | AB063079.1, AK025573.1, AB060839.1, AF207829.1, AK025312.1, AL359623.1, AK025524.1, |
| | | | | | AK025772.1, AL117440.1, AK000391.1, AF090901.1, AL050393.1, X65873.1, BC008983.1, BC006525.1, |
| | | | | | AK026647.1, AB048964.1, AL080074.1, AK026353.1, AB047904.1, AL049314.1, AL137648.1, |
| | | | | | AB056420.1, AJ242859.1, BC001963.1, AB060852.1, AL512689.1, AF219137.1, AL050149.1, |
| | | | | | AF125949.1, AL050146.1, AL136864.1, AL359620.1, BC008488.1, AL050138.1, AL122123.1, |
| | | | | | AL162002.1, AL122049.1, AB060826.1, AL049300.1, BC005890.1, AK026086.1, AK026480.1, |
| | | | | | AB062942.1, AB060908.1, AL512733.1, BC006807.1, AL122098.1, AL117457.1, AK026855.1, |
| | | | | | AL136787.1, BC005678.1, AL080137.1, BC008387.1, BC003122.1, AL117435.1, AK026744.1, |
| | | | | | AL136844.1, AK026608.1, AL080127.1, AL136789.1, AL162062.1, AF090900.1, AL133016.1. |
| HDPOC24 | 67 | 777493 | 1-1763 | 15-1777 | BE795755, BE799575, BF346049, BE736856, BE735839, BE613439, BE295320, BG165897, BG028052, |
| | | | | | BE904063, BF525670, BG248216, AI762392, BE798809, BE876262, BE538403, BE541775, BE278995, |
| | | | | | BE867896, AI928014, BE735450, BE792862, AI302814, AI417544, AI861926, BE868781, AI620234, |
| | | | | | AI949339, AW292331, AA425932, AI635177, AA716408, BE964527, AI148619, AI188537, AI751315, |
| | | | | | AW298424, AI570424, BE019043, AI333093, BE563878, BG166956, AI679326, AI339585, BE208614, |
| | | | | | AI912361, AI199939, AI638579, BF035843, AA575835, AW562325, AW167212, AA613113, AJ403125, |
| | | | | | BE300704, BG230624, AA631882, AA654351, AI188665, AI744337, AI042080, AA554771, BF205494, |
| | | | | | AI751314, AI357368, N42873, AI623763, BE205782, BG015408, BF061667, AW296851, N73029, |
| | | | | | BE548655, AI080401, AI200653, AI346327, AI804793, AA723378, AI219032, AI923960, AW512977, |
| | | | | | AI334021, BF739379, AI961597, AI933388, AW118019, AI750231, H49782, AW516158, W73379, |
| | | | | | AI682039, AW068519, AI199855, AI858410, AW275973, AW338079, AA856546, AW071218, |
| | | | | | AA428801, AI128328, AW026790, BE673142, AW513049, AA582918, BG056078, AA936754, |
| | | | | | AW513987, AA579898, AW192791, R55015, R80153, BF197452, AI738833, AU157028, AW627680, |
| | | | | | R62188, BG152556, AW516091, BG057769, AI538819, AW085840, AI500700, AW082065, BE614205, |
| | | | | | N34466, C75025, R55153, AW630976, R81484, AI687198, BE271478, AA975810, AI207300, BG253177, |
| | | | | | H13762, BE463629, H13709, AA983929, T97913, AI719056, AI203064, R80154, AI074832, AW104721, |
| | | | | | R47833, AA852278, AA812419, AA088385, R64576, AI362616, AW068781, W73403, R21634, |
| | | | | | AA553687, BE544315, D31024, W44598, BF346027, N33449, AA573257, AA857087, R49975, |
| | | | | | AI915025, AI382413, BF847025, R54690, AW591357, AW953807, N53663, BF752914, AA469380, |
| | | | | | AA469299, BF111939, AW301188, N50673, AW270044, BE549470, BE540690, AI673113, AI380538, |
| | | | | | AA364267, W39364, AW572002, AW080124, R81724, N42422, BE785221, D20947, BE966528, |
| | | | | | W44617, BF829622, W38340, AA948112, BE074077, AL137555.1, AK025951.1, AK025804.1, |
| | | | | | BC001979.1, AL445222.9, AF151783.1, AK023580.1. |
| HDPPD93 | 68 | 637588 | 1-687 | 15-701 | AI767544, BF963878, AW391604, AW371053, AW391605, AW380560, BE150935, AW380557, |
| | | | | | AW609397, AV647627, AW609527, AV647628, BE150882, AA625481, AV647780, AW582425, |
| | | | | | AW582423, AA053357, Z39028, T31703, AI559952, AI962812, AW023035, AW247321, AW594578, |
| | | | | | AW204377, AW135110, AW069029, AA737065, R51075, AW294433, AW291912, BF511819, |
| | | | | | AW292027, AI265783, BF063801, AI274716, AI191509, AA605269, AI768872, BF057534, AI634812, |
| | | | | | AI698531, AA565825, AI275563, AI366661, BE242780, AI538787, AI203337, AI565080, AW008059, |
| | | | | | AW088320, AW073352, W73510, AW242351, AI341846, BF222967, AA513453, AI346467, AA622940, |
| | | | | | AI000935, AA535424, AI022694, BF592958, AA639759, AI679288, AI679864, AI079193, AU147451, |
| | | | | | N56986, AU148991, AI304785, AA134162, AW664542, AI337342, AI245649, AI969305, AW582354, |
| | | | | | AI081970, AI262353, AL079933, AW976197, AI991639, BF349821, AU159502, AW004865, AA665733, |
| | | | | | AI348128, AI094163, AI184073, AU152120, AU149126, AI359191, BE552234, AA632288, AA814449, |
| | | | | | AW362622, AU159545, N75380, N49596, BF869959, H48051, N70679, BF987335, AI864296, |
| | | | | | AA928727, BE963530, AA617935, AI151119, BF680667, AW978110, BE785995, BF913501, AL519088, |
| | | | | | H56669, BF526020, AI668893, AV655645, AV714752, AW087445, AW104724, AI538716, AL045500, |
| | | | | | AI564719, AI802542, BG058398, AW026882, BG031815, AI433157, BG179993, BF812961, AI620284, |
| | | | | | AI524671, AI857296, AI619502, AW118557, AI682841, AI439745, AI934035, AL514129, AL036274, |
| | | | | | AL036361, BG111590, AI560099, BE048071, BG260037, AI445432, AL036802, BG257535, AV732936, |
| | | | | | BF970449, BF812938, BG110517, AA640779, AI536685, AI445025, BG180996, AL514983, AL121365, |
| | | | | | AI521012, AI537677, BE884130, AI475371, BG112718, BG113299, AI702406, BG110684, AI349004, |
| | | | | | AI580984, AI687127, AL513907, BF032868, AW166970, AI687375, AI625079, AI440239, AI349645, |
| | | | | | AI635461, AL119049, AI433976, AW071349, AV753074, AV757018, AI285735, AV758209, BG109270, |
| | | | | | AI271786, BF792961, AI498579, BF882343, AI281762, AI690480, AI815855, BG170430, AI783504, |
| | | | | | AL043975, AI636456, AI687728, AV682093, AV708097, AW302988, AI432969, AW148716, AI800384, |
| | | | | | BG112879, BF924882, AI697137, AL514879, AL036396, AL048656, AI500077, AW827211, AI282655, |
| | | | | | AI962456, AW268253, AV681618, AV756619, AW086113, BF793244, AW129659, BF885675, |
| | | | | | AV758822, BF816811, AV758592, AI799470, AI539780, AI828682, AV681869, AI610307, AI612913, |
| | | | | | AW132056, AI872711, AI818683, AI499393, AI493248, BE887488, AV713079, AV652906, AI340519, |
| | | | | | AI537303, AW071417, AI475451, AL040243, BF107577, AW082040, AL036146, BF038106, BG036846, |
| | | | | | BF726297, AV682849, AK026796.1, AK027770.1, AL391244.11, AF251294.1, AL136882.1, |
| | | | | | AK022241.1, AB051496.1, AK026647.1, BC008387.1, BC006195.1, AF090903.1, AB055361.1, |
| | | | | | AL117394.1, BC008488.1, AB060826.1, AB063070.1, S78214.1, AL117457.1, AK025339.1, AK025092.1, |
| | | | | | AF125948.1, AB060912.1, AL359615.1, AL133606.1, AL122050.1, AL049452.1, AL157431.1, |
| | | | | | BC001967.1, AL049314.1, AL162006.1, AL137459.1, AL512746.1, AL050149.1, AK025958.1, |
| | | | | | AB055303.1, AB060887.1, AL050116.1, AL110225.1, AB048953.1, AB056420.1, AL050277.1, |
| | | | | | AL512733.1, BC008365.1, AF106862.1, BC008417.1, AL442082.1, AL117435.1, AK027096.1, |
| | | | | | AL136749.1, AL133640.1, AL133016.1, BC003687.1, AL136586.1, AL136787.1, AF090934.1, |
| | | | | | AK025084.1, AK026855.1, AL136789.1, AL512719.1, AL137557.1, AL110196.1, AK026741.1, |
| | | | | | AL359601.1, AB049758.1, AF090901.1, AL050393.1, AF104032.1, AL162083.1, AK026959.1, |
| | | | | | AK000083.1, AL133075.1, AL050108.1, AF225424.1, AF090900.1, AL389982.1, BC007021.1, |
| | | | | | AK026592.1, AK026865.1, AL122121.1, AL122123.1, AK000137.1, AL117460.1, AL110221.1, |
| | | | | | AL050146.1, AF090943.1, AL133080.1, AF219137.1, AK026045.1, AL359596.1, AK026452.1, |
| | | | | | AL096744.1, AF090896.1, AB060863.1, AB063046.1, AK000618.1, AL080124.1, AL359941.1, |
| | | | | | AF218014.1, AL512754.1, AL512718.1, AB060916.1, AL049938.1, AL133093.1, AK024538.1, |
| | | | | | AL049466.1, AF078844.1, AL136892.1, U42766.1, AK027868.1, AK026608.1, AB048954.1, |
| | | | | | AK026784.1, AL133560.1, AL390167.1, AB055368.1, AB055315.1, AB019565.1, AL080060.1, |
| | | | | | AL122093.1, AL133565.1, BC003683.1, Y16645.1, AB048964.1, AL389978.1, BC006807.1, AB063008.1, |
| | | | | | AJ242859.1, AF125949.1, AF111847.1, AL442072.1, AB056768.1, AL137527.1, AL359618.1, |
| | | | | | AK026744.1, AF146568.1, AK000445.1, AB060825.1, AK025772.1, BC007199.1, U91329.1, |
| | | | | | AF091084.1, AK025906.1, AL136844.1, AB051158.1, AB047615.1, AL117583.1, AB047801.1, |
| | | | | | AK026534.1, AL136799.1, AK026542.1, AL353940.1, BC004556.1, BC002733.1, BC008899.1, |
| | | | | | AK025491.1, AL133557.1, AL136768.1, X82434.1, BC001045.1, AL117585.1, AK000323.1, |
| | | | | | AL049464.1, AK027113.1, AK026504.1, AF207829.1, AB060908.1, AK000212.1, AB062938.1, |
| | | | | | AL050138.1, AK000432.1, AK026583.1, BC004951.1, AB055366.1, AK026927.1, AL080137.1, |
| | | | | | AK000652.1, AB052200.1, AL137550.1, AK025391.1, AK026353.1, AK026532.1, AL049300.1, |
| | | | | | AK025967.1, AL050024.1, AB060852.1, AL137283.1, AL122098.1, AF097996.1, AL512689.1, |
| | | | | | AL136928.1, AL049382.1, AK026533.1, AK025414.1, AK026528.1, AB056809.1, AB047904.1, |
| | | | | | AL136786.1, AB052191.1, BC008070.1, AL136845.1, BC002839.1, AL049430.1, AK000614.1, |
| | | | | | AF260566.1, AL133113.1, AB056421.1, AK026086.1, AL137271.1, AF177336.1, AK027204.1, |
| | | | | | BC008485.1, AK027164.1, AF183393.1, AK024588.1, AK024524.1, Z82022.1, AK026947.1, |
| | | | | | AL122110.1, BC008382.1, AK026526.1, AL512761.1, AL137648.1, AL137463.1, AL049283.1, |
| | | | | | AK026630.1, AK025484.1, AF271350.1, BC008983.1, AK026480.1, AL359583.1, X72889.1, |
| | | | | | AK027116.1, AK027213.1, AK026629.1, AB060929.1, AK025524.1, AB050510.1, AK025209.1, |
| | | | | | AK000647.1, AL512765.1, AK026597.1, AL512684.1, BC003548.1, AL137538.1, AK026642.1, |
| | | | | | AK000718.1, AL359622.1, AL080127.1. |
| HDPPQ30 | 69 | 684292 | 1-1049 | 15-1063 | AL041375, BE140949, BE077105, BF880881, AA809125, AW177869, AI890297, AW338376, AA171400, BE328286, AA218684, |
| | | | | | AV683406, AI310670, AW902110, AA489390, AI523205, AI792092, |
| | | | | | AI760835, AI821056, AI821805, AI801563, AW901945, AA526542, AW902135, BF876674, AI819419, |
| | | | | | AW022796, AA084320, AI254267, AW504667, AW162314, BF530611, AA661583, AA515727, |
| | | | | | AA935827, AI521525, H62123, AW265006, AW021674, AA324108, AI609992, BF812696, AI174703, |
| | | | | | BG231195, AI310787, AI280535, AA720582, AI753904, AI984168, AA584493, AI349130, AW169183, |
| | | | | | AI609984, AW264548, BE245594, AI797998, AW020150, AW238341, AI568376, AI610012, AI572680, |
| | | | | | AI278440, AI277373, AA232928, AW020094, BE676856, AI609974, AA425283, AI224583, AW192419, |
| | | | | | F23338, AI926102, AW162332, AA555232, AW104161, AA804726, AW021399, BE676988, AA525753, |
| | | | | | AW971320, BF882222, AA167656, BF949151, AA689351, AA584241, AL044701, AW511778, |
| | | | | | AA557945, AW265468, AW328446, BG180320, AA568303, AA493546, AA807684, AA280886, |
| | | | | | AW855527, AI889995, BE063437, BE154909, AA568311, AI345566, AA599712, AW275432, BF870762, |
| | | | | | AA810158, AA182928, R23873, AA492496, BF904892, AI815583, AW674277, AI816537, AA636077, |
| | | | | | BE244308, AA595661, AW084445, AA657808, AW510403, BG152746, BF800073, AW962791, |
| | | | | | AA180056, AW243817, AA604601, F29968, AI344906, AI318548, AW085626, AI369076, AI860423, |
| | | | | | BF681222, AA610381, AV759517, AI915081, AW157128, R73744, AW571716, BF448553, AW303052, |
| | | | | | AA507623, AW129188, AV763650, AA703818, AL042667, AL042670, AA493808, AI733523, |
| | | | | | AA679946, AA578711, AW576299, R92703, AA347203, AW072963, AV706458, AW152439, BF792474, |
| | | | | | BF061241, AV764119, AI567676, H05066, AL022315.1, AC005531.1, AC005080.2, AC011475.6, |
| | | | | | AC008372.6, AC020626.6, AP001630.1, D28126.1, AL137073.13, AL590762.1, AC011444.5, |
| | | | | | AL034548.25, AP001748.1, AC004967.3, AP001717.1, AL354932.26, AC006121.1, AL034377.1, |
| | | | | | AL356299.16, AC002126.1, AC012476.8, AC002544.1, AC007172.6, AP000359.1, AL137787.11, |
| | | | | | AC021016.4, U91326.1, AC007934.7, AC018751.30, AC009516.19, AC008736.6, AL354873.19, |
| | | | | | AC009996.7, X62355.1, AC005996.2, Z93241.11, AL031729.16, AC006071.1, Z68285.2, AC008745.6, |
| | | | | | AC010789.9, AL121652.2, AL049569.13, AL133507.8, AF053356.1, AC005052.2, AL022316.2, |
| | | | | | AC020897.6, AC008403.6, AC008379.6, AL121653.2, AC008569.6, AJ277557.1, AC027319.5, |
| | | | | | AC083866.2, AL008718.23, AC004755.2, AP000045.1, AL031666.6, AC005933.1, AC026464.6, |
| | | | | | AC005632.2, AL136162.17, AF207550.1, AL031255.1, AL050335.32, AC009123.6, AC011005.7, |
| | | | | | AL109923.29, AC000360.35, AP000553.1, AC008392.6, AC005913.2, AL121992.24, AL162426.20, |
| | | | | | AC009314.4, AL158823.11, AC005412.6, AP000346.1, AL121989.12, AC008397.7, AL137012.6, |
| | | | | | AC021396.6, AL499628.1, AC002352.1, L35532.1, AL138784.30, AC010422.7, AC005695.1, |
| | | | | | AL359092.14, AC011533.6, AC072052.6, AC008543.7, AC008427.7, AC002425.1, AF001548.1, |
| | | | | | AC007956.5, AC024561.4, Z95113.2, AC003982.1, AL034422.24, AL135927.14, AC007227.3, |
| | | | | | AL355512.22, AF243527.1, AL589723.7, AL157838.24, AC005696.1, AL136084.11, AL445248.7, |
| | | | | | AC004790.1, AC011495.6, AC005098.2, AC005754.1, AL035684.25, AF190464.1, AP000501.1, |
| | | | | | AC004228.2, AL035405.10, AC005856.1, AC006011.2, AC004884.1, AC008753.8, AL391647.16, |
| | | | | | AF051976.2, AC005180.2, AL023583.25, AL136418.4, AL139054.1, AC011455.6, AP003352.2, |
| | | | | | AC020908.6, AC005071.2, AC008666.5, AL080243.21, AC005874.3, AL109653.14, AF134471.1, |
| | | | | | AC027130.5, AC009412.6, AC007969.3, AC005015.2, AL513008.14, AC018690.5, AL117338.15, |
| | | | | | Z93928.1, AP000345.1, AL096763.14, AC004878.2, AL121601.13, AL139389.16, AC025436.2, |
| | | | | | AC002477.1, L47222.1, Z97056.1, AL133163.2, AC003110.1, AC005488.2, AL136117.12, AC002302.1, |
| | | | | | AC004081.1, AC008812.7, AC009131.6, AC026765.22, AL353706.6, AL392084.6, AL121656.2, |
| | | | | | AC068724.7, AP001711.1, AL050343.17, AF254983.2, AL512883.5, AF134726.1, AL158850.8, |
| | | | | | AP001725.1, AL357515.26, AC008755.6, AC010463.6, AC004144.1, AL133211.9, AC009086.5, |
| | | | | | AC068499.1, AL161747.5, AC007201.1, AP001883.5, AC004802.1, AC008651.7, AC010792.4, |
| | | | | | AC004867.5, AP000512.1, AC005060.3, AL031847.17, AC007003.4, AC008892.5, AC011442.5, |
| | | | | | Z97632.1, AC011994.10, AC005940.3, AC004882.2, AL034423.21, AC003007.1, AL049776.3, |
| | | | | | AC006026.2, AC002416.1, AP002456.3, Z83844.5, AL139339.22, AL137139.9, AC006162.1, |
| | | | | | AC008545.3, AP001710.1, AC004655.1, AF023268.1, AL121983.13, AP000252.1, AC008536.6, |
| | | | | | AL137791.19, AL035588.21, AC004643.1, AL356747.18, AC009309.4, AC005779.1, AC004883.2, |
| | | | | | AL353597.20, AL445071.14, AC004826.3, AP001705.1, AC005533.2, AP000793.5, AP000031.1, |
| | | | | | AL008582.11, AL049760.26, AC020906.6, AB020878.1, AF003626.1, AC084865.2, AL133367.4, |
| | | | | | AL359983.7, AC004816.1, AL163201.2, AC020558.4, AC008752.6, AC004020.1, AL161669.5, |
| | | | | | AL358777.12, AL121897.32, AC009244.24, AL133448.4, AC010319.7, AP000689.1. |
| HDQHM36 | 70 | 852328 | 1-1533 | 15-1547 | AA287570, AA255853, AI361900, AV763026, AV763058, BG164602, BF965394, AW105346, |
| | | | | | BG164455, AI570805, AW088846, AI754653, AA600202, AC003962.1, AC005081.3, AC018809.4, |
| | | | | | AL035658.7, AC007957.36, AC009060.7, AL109984.14, AL590762.1, AL133477.16, AC004671.1, |
| | | | | | AC000134.14, AC002288.1, AC005488.2, AC006483.3, AC011895.4, AC024561.4, AL121928.13, |
| | | | | | AL022476.2, AC005531.1, AC005332.1, AC010311.8, AL096841.6, AC011475.6, AC002310.1, |
| | | | | | AC004686.1, AL050318.13, AC004965.2, AC008440.8, AC020904.6, AC011491.5, AP000555.1, |
| | | | | | AC013355.7, AC004985.2, AC016587.7, AC009412.6, AP000557.2, AC019205.4, AL139150.12, |
| | | | | | AC005919.1, AC011495.6, AC005231.2, AC087071.2, AC009228.4, AC021036.5, AC010605.4, |
| | | | | | Z83822.1, L78833.1, AL049872.3, AL122035.6, D87675.1, ALA45184.11, AF053356.1, AC022007.3, |
| | | | | | AC006120.1, AC005911.6, AC005280.3, AL157938.22, AC020931.5, Z85986.1, AC010530.7, |
| | | | | | AC005015.2, AL022326.1, AL080243.21, AC009123.6, AC015801.25, AC007216.2, AC083866.2, |
| | | | | | AC027319.5, AC004477.1, AC020916.7, AC004408.1, AL034549.19, AP000558.1, AL035072.16, |
| | | | | | AE006462.1, AL121655.1, AL139331.19, AL391827.18, AC020917.4, AL133387.8, AC002316.1, |
| | | | | | AL109825.23, AL451075.15, AP001717.1, AL121845.20, AL139317.5, AC005940.3, AC005702.1, |
| | | | | | AC009516.19, AC005971.5, AB023049.1, AC004812.1, AD000092.1, AL159191.4, AC009756.9, |
| | | | | | AC008805.7, AC008403.6, AL121897.32, AL022328.21, AC008962.8, AC009131.6, AL121753.30, |
| | | | | | AF045555.1, AC008569.6, AC009144.5, AC011485.6, AL359091.10, AC005098.2, AC005071.2, |
| | | | | | AC011811.42, AC009247.12, Z83845.14, AC006449.19, AC004019.20, AC009318.11, AC006160.9, |
| | | | | | AC013429.12, AC011465.4, AP001725.1, AC004253.1, AC006285.11, AC006388.3, AL359382.23, |
| | | | | | AL031311.1, AC006511.5, AC005088.2, AB023048.1, AC004089.25, AC002470.17, AC023490.5, |
| | | | | | AC018751.30, AL033529.25, AC011472.7, AC005899.1, AC018663.3, AF001549.1, AL160269.14, |
| | | | | | AL136137.15, AC007374.6, AC011005.7, L44140.1, AC008753.8, AP000501.1, Z85987.13, |
| | | | | | AC009570.13, AC005077.5, AL121601.13, AP000556.2, AF030453.1, AC004867.5, AC021016.4, |
| | | | | | AC007383.4, AL022313.1, Z82215.1, AC020913.6, AE006465.1, AC008616.6, AC018719.4, AC009314.4, |
| | | | | | AC011464.5, AC024163.2, AC006312.8, U80017.1, AL121890.34, AC018636.4, AL583856.6, |
| | | | | | AF111167.2, AL136131.15, AF196969.1, AL117336.22, AC005682.2, AC008543.7, AC011450.4, |
| | | | | | AF037338.1, AP000511.1, AL033528.19, AL137073.13, AC011461.4, AC011487.5, AC006211.1, |
| | | | | | AC000353.27, Z97832.11, AL121712.27, AL132780.5, AC008745.6, AL096840.25, AC005480.3, |
| | | | | | AL136979.16, U91326.1, AP002812.3, AC004865.1, AL160471.5, AC008760.6, AC004166.12, |
| | | | | | AC018638.5, AP003357.2, AC007850.29, AC016995.4, AC073657.5, U78027.1, AC005696.1, |
| | | | | | AF312032.1, AL356481.16, AC007934.7, AL391280.15, AL139100.9, AC011311.11, AC011484.4, |
| | | | | | AC004703.1, AC016894.7, AL121992.24, AL121972.17, AC011455.6, AC005288.1, AL109804.41, |
| | | | | | AC022211.5, AL022320.23, AL049776.3, AC005057.2, AC008806.4, AP001732.1, AC023344.4, |
| | | | | | AP002852.3, Z99716.4, AL138784.30, AL365364.19, AL031286.1, AC009079.4, AL354707.17, |
| | | | | | AC020915.6, AP001711.1, AC009244.24, AP000030.1, AP000134.1. |
| HDTLM18 | 71 | 836057 | 1-511 | 15-525 | T62863, AL049843.18. |
| HE2CM39 | 72 | 553651 | 1-552 | 15-566 | AW138760, BG236171, AI928443, AI264363, BF432779, AA581388, BF446513, AW170385, AI366182, |
| | | | | | AI970247, AA854958, AI354301, AI081061, AI140964, AW243493, AW104079, AI366181, AA732881, |
| | | | | | AI039682, R46377, AA425694, H11979, AI871576, AI082699, AA428526, AW207325, H72841, |
| | | | | | AI767870, N35990, AW168999, AI537179, AI678150, AW972093, AI283218, AA405499, Z39960, |
| | | | | | AI191091, AA626013, AW139286, F03140, AA890408, AI349325, AI871195, AW088879, AI914847, |
| | | | | | AA192077, AW090285, N95266, AA788656, BE674514, AI634559, AI269823, AA894693, BG109270, |
| | | | | | AW806761, BG029829, BE965355, AI623941, AI537677, AW169784, AW161156, AI918449, AI538885, |
| | | | | | AI521005, BF061283, BF853807, AW059828, AI345688, AV743631, BF342261, AI866820, BE138644, |
| | | | | | AW161579, AI587121, AW302992, BE789764, AI540759, AI348917, AI540674, AI581033, AI349957, |
| | | | | | AI345005, AW827289, BE048087, BF924855, AL120853, BG164558, BG151388, AW827227, BF812936, |
| | | | | | BE964614, BG031664, BE047952, BF751347, AW072719, AI648567, AI621341, AI310940, AL041016, |
| | | | | | AI567582, BE904096, AV750565, BF339322, AW023338, AI698427, AW074869, AA641818, AI859991, |
| | | | | | BE620444, AV736808, AI874166, AI434741, AV756122, AW268302, BE544111, AI310575, BE878735, |
| | | | | | BF750879, BG107576, AI307736, AW089275, AI349645, AI919593, AI799674, AI559872, BE910373, |
| | | | | | AI580674, AW089572, AI568060, AI340533, AI670009, AI921254, AI917963, BE543089, AI890507, |
| | | | | | BE887488, AI690748, AI340511, AI345608, AW162194, AI473451, AI933992, AW302954, AI800473, |
| | | | | | AI572717, AL037558, BF753023, BE256001, BE879396, AI288285, AL040241, AI345253, BF680133, |
| | | | | | AI307494, AI539153, AW151136, AW044029, AI345677, BE138658, AI446373, BE895585, AI340627, |
| | | | | | AW163834, BE974031, BE963286, AW020095, AV741327, AI494201, BF699668, AI538878, |
| | | | | | AW263804, BF339594, AI251830, AI813633, AI345745, AI348854, AI345471, AI696611, AI336582, |
| | | | | | BE886728, BE964683, BE894455, BG114432, AV714085, AV712713, BE965169, N25081, AL037041, |
| | | | | | AV704350, AI345224, AL119863, BE966699, BG001235, AI868204, BF752999, AA761557, AI267185, |
| | | | | | AL048323, AW083778, BG249669, BG029086, AA070889, BF904180, AA464646, BG113299, |
| | | | | | AL048340, AI311892, AW021373, BE621472, AI290153, AL036673, AI335426, AI348777, AW081255, |
| | | | | | AW772685, AI866770, AI345261, AI702301, BF970449, AW301505, T99953, AI273179, AI805769, |
| | | | | | BF572734, AL036772, AL036396, AI610357, AA904121, AW058233, BG254745, BF751710, AI436429, |
| | | | | | BE781369, BF904189, BF726207, BF338002, BF343568, N99092, BE172412, BG166654, AL119791, |
| | | | | | AA127565, AV755793, AI343059, AA572758, N29277, AW834302, BE890131, BF924856, AW946806, |
| | | | | | AB063084.1, AL359620.1, AK024538.1, AB050534.1, AL357195.1, AL137665.1, AK026551.1, |
| | | | | | BC003687.1, AL136844.1, AB048954.1, BC006440.1, AF352728.1, AK026647.1, AL136644.1, |
| | | | | | AL389939.1, AK026855.1, AB044547.1, AB055368.1, BC009294.1, AL389935.1, AF061943.1, |
| | | | | | AL512750.1, AK027144.1, AL359622.1, AF028823.2, AL137478.1, AL137547.1, AY034001.1, |
| | | | | | BC003602.1, AL136768.1, AF090934.1, BC008282.1, AL137463.1, AF026816.2, L19437.2, AK027193.1, |
| | | | | | AK026746.1, BC000090.1, AF061795.1, AF151685.1, AY026527.1, BC001963.1, BC004530.1, |
| | | | | | AB049900.1, L30117.1, AK027146.1, AB056809.1, U80742.1, AK026626.1, AB062750.1, BC004244.1, |
| | | | | | AF205073.1, AL512719.1, BC000051.1, AL136622.1, BC008417.1, AF260566.1, AL050092.1, |
| | | | | | BC003122.1, AL122110.1, AB063093.1, M64349.1, AK026762.1, AL136893.1, AL049465.1, |
| | | | | | AK027614.1, BC007499.1, AF111112.1, AK000418.1, BC001236.1, AK026480.1, AL133640.1, |
| | | | | | AL080154.1, BC001045.1, AF017790.1, BC001056.1, AB049758.1, AF056191.1, BC006133.1, |
| | | | | | AB019565.1, AB049892.1, AF162270.1, BC009311.1, BC004529.1, AL122050.1, BC002535.1, |
| | | | | | AK025084.1, AL512733.1, AB056420.1, AK000647.1, AF217982.1, AL583915.1, AL117394.1, |
| | | | | | M92439.1, AL110218.1, AF271350.1, AL080086.1, BC008196.1, AL512754.1, AL133557.1, S69510.1, |
| | | | | | AL050116.1, AL122045.1, AL512765.1, AL133113.1, BC008893.1, BC006201.1, S76508.1, AB055361.1, |
| | | | | | AL137556.1, AK000247.1, AL162008.1, AL136787.1, AK026597.1, AB048975.1, AL137529.1, |
| | | | | | BC004874.1, AL353940.1, BC006807.1, AF104032.1, X98834.1, BC007053.1, AF051325.1, AK026526.1, |
| | | | | | AL137574.1, AL137550.1, AB063077.1, AK000310.1, BC002466.1, AL117440.1, AK024546.1, |
| | | | | | BC004368.1, AJ006417.1, S77771.1, AK026542.1, AK026534.1, AF091084.1, X82434.1, AL122049.1, |
| | | | | | AL080159.1, AK000432.1, AB050410.1, AK027161.1, BC004362.1, AB060863.1, BC006410.1, |
| | | | | | AK027182.1, AL389957.1, AB060903.1, AK025015.1, Y14314.1, AL133016.1, AL137558.1, |
| | | | | | BC001655.1, AL157482.1, AB056768.1, AL080126.1, AL050138.1, AL096751.1, AL136752.1, |
| | | | | | AL136915.1, BC002733.1, AL389982.1, AL110280.1, U51587.1, AL137476.1, AF230496.1, AK026593.1, |
| | | | | | AF285167.1, S61953.1, BC008780.1, BC007326.1, AF003737.1, BC004945.1, BC006509.1, AF218031.1, |
| | | | | | AK025967.1, AK025391.1, AK027121.1, AL512684.1, AK026057.1, AK025410.1, AF218014.1, |
| | | | | | BC002750.1, AJ299431.1, BC006103.1, AL122106.1, AK000636.1, AF177336.1, AL359583.1, |
| | | | | | AK026744.1, AL117460.1, AK025632.1, BC007567.1, AL133075.1, BC003548.1, AF090900.1, |
| | | | | | AF262032.1, AK027142.1, AF125948.1, AF111847.1, BC008078.1, BC002697.1, BC007732.1, |
| | | | | | AL117435.1, AJ012755.1, AL137479.1, X72889.1, AK027868.1, AK026591.1, AL136799.1, AL080060.1, |
| | | | | | AL080158.1, AK027102.1, AL512718.1, AK026086.1, AB048964.1, AF217966.1, BC006508.1, |
| | | | | | AL390154.1, AL512761.1, BC004370.1, AB060873.1, AB060905.1, AB047941.1, BC008280.1, |
| | | | | | AL133098.1, AK026784.1, AL512746.1, AB047801.1, AF305835.1, AL157431.1, AL133568.1, |
| | | | | | AL133014.1, AF146568.1, BC006412.1, AK027136.1, AF227198.1, BC007346.1, BC008365.1, |
| | | | | | AL050277.1, BC006332.1, BC005073.1, AL133093.1, AK000618.1, AL137560.1, BC006832.1, |
| | | | | | AK026045.1, AF143723.1, BC003650.1. |
| HE6CS65 | 73 | 762960 | 1-1512 | 15-1526 | BG114804, AV718161, BG115294, BG163956, AW362005, AW579708, AA425593, AV732860, |
| | | | | | AA778426, AW367244, AL537244, AW856936, BF377273, BE675130, BG119784, BF978611, |
| | | | | | AA194252, AI937228, AW292921, AI222740, BF349929, AW856088, AI348188, AW665835, |
| | | | | | AA025880, BF333804, AW005582, AI139606, AI126585, AW959277, AI417243, AI339985, AI972128, |
| | | | | | W52543, AA829354, BF333819, AI078819, AV752850, AW857034, BE789386, AI299395, AW675446, |
| | | | | | AI083537, AW516855, AA035526, AW005637, AA932845, AI088259, AI492529, BF375157, AI334135, |
| | | | | | AI682947, AI753237, AI923621, AA425629, BF804458, AI628857, AI635633, AI085676, AI580195, |
| | | | | | AI138968, BE350523, AA005425, BF333807, AW102884, W52544, AI022376, W39677, AI920867, |
| | | | | | BF333811, AI240384, N49885, AA227905, AI087384, AI302240, AI933336, AI670129, N98508, |
| | | | | | AI268859, AA232843, AI221780, AA253379, N71409, AA004925, BF761279, AI066394, BF811217, |
| | | | | | AI302764, AA311893, AW571609, AI080166, AI299456, AA844294, AI342664, AI147714, AA464423, |
| | | | | | T60255, BF807121, AA765193, H29427, AA876118, AW265722, AI074827, AA808646, AA193122, |
| | | | | | H43349, AA233282, AI693779, AI245406, R60024, AA005426, AA995705, AW302271, AA934521, |
| | | | | | AI061151, AW366962, H38317, T90537, AI445689, W44818, H12893, AI446122, AA253378, H78422, |
| | | | | | AW378644, AI753445, R44689, N99734, AW102871, AA719170, AA464422, AA974340, H78222, |
| | | | | | AA934622, AW149309, R68103, AW265649, H40537, AA807276, H43181, AI277059, T34512, |
| | | | | | AA430350, BE539364, AI076849, AA347001, T81330, BE049268, H26609, AW589372, BG231066, |
| | | | | | AI092386, R24873, R43362, Z40090, AA334085, AW378680, N31595, H58243, R68147, AA257048, |
| | | | | | AA004926, H12894, AA886683, BF593823, F02035, AI559907, AW062917, N49990, H43311, |
| | | | | | AA295950, AI364249, R52133, BF748425, BF804455, AA778257, AW379516, T81506, AI080028, |
| | | | | | AA347002, BF377711, T83072, AL134712, H26654, BE082628, BF131565, AA227588, BF092102, |
| | | | | | BE774491, BF092109, AI382725, W63710, BF807108, F01928, BF858654, W31073, AA169731, |
| | | | | | AW367337, AA936648, AA193460, AW378675, H43212, BE082824, BF858661, AW864790, AA946635, |
| | | | | | T61637, AA304629, R17644, BE047631, AI867081, T24808, AA293625, R52222, AW890658, |
| | | | | | AA425423, BF929843, BE888442, C02346, Z99943.1, AK024700.1. |
| HE6FU11 | 74 | 827236 | 1-1986 | 15-2000 | AA992948, AI638341, AW134923, AI038302, H54037, AI581139, AJ007581.1, AK027323.1, |
| | | | | | AF314058.1, AL021578.4, AB027710.1, AB024964.1. |
| HE6FV29 | 75 | 588454 | 1-1512 | 15-1526 | AA984763, AA406303, AA599164, AA600957, BF922107, AL046225, AI623434, BF760969, AI890702, |
| | | | | | D29050, AL449223.7, AP000114.1, AP000046.1, AP001717.1, AC006039.2, AL078463.11, AL035460.15, |
| | | | | | AC060232.5, AL161730.9, AF277315.3, AC010198.8, AC010319.7, AC005099.1, AP003114.1, |
| | | | | | AC020906.6, AL117377.18, AC004841.2, AL161937.13, AC004951.5, AL161781.12, AL157858.5, |
| | | | | | AL391260.13, AL158828.14, AP000302.1, AC007193.1, AF123462.1, AC027644.9, AC006254.10, |
| | | | | | AL035662.65, AL139396.17, AC004084.1, AC015937.7, AF008191.1, AL355916.2, AD001502.1, |
| | | | | | AF283320.1, AC005082.3, AC005399.19, AC003030.1. |
| HE8BQ49 | 76 | 589443 | 1-1861 | 15-1875 | W35257, AC009225.3, U49973.1, AF036938.1, AL445225.9, AC006142.1, AC006077.1, AC008670.4, |
| | | | | | Z74739.1, AL023755.5, AC008780.6, AL445212.9, AL356317.8, AL137244.28, AJ271735.1, U70984.1, |
| | | | | | AF241734.1, AC021506.5, AL391868.15, AL162386.17, AC009312.4. |
| HE8SG96 | 77 | 862016 | 1-2022 | 15-2036 | AV763026, AV763058, AW964231, AI732710, AI732677, AI669589, AW327624, AI061313, AA410788, |
| | | | | | AA829036, AA502991, AV759632, AW328331, AW973992, BF804385, BF526964, AW069227, |
| | | | | | AW873261, AA831426, AL039042, AW974932, AV729929, T11828, BE301584, AW576490, T74524, |
| | | | | | BE138594, AI090377, AW500684, AI821608, AI284543, BG222813, AI244127, H73550, AI755214, |
| | | | | | AI345695, AI284126, AA535216, AI275982, AI380617, AW237905, AI491765, AU147162, AI754105, |
| | | | | | AA831638, AI754567, AW026305, BE062478, AI421950, T05118, AI419337, AI755057, AI223626, |
| | | | | | AI912401, AW516255, AI753672, AI612142, AI056177, R64617, AA683279, AI609972, BF821897, |
| | | | | | AW576251, BF681619, BF868994, AI361090, AL041706, AW969941, AU159116, AW833047, |
| | | | | | AI186438, BE062476, AI826761, AW504224, AI254770, BF821009, AA828047, AI049955, AL079734, |
| | | | | | AW270771, AW468009, AA177011, BE328291, AI251034, BE139139, AI653515, BG223550, BF854308, |
| | | | | | AK025806.1, AL138707.10, AL138784.30, AC002350.1, AC004166.12, AE006639.1, AC004878.2, |
| | | | | | AC005071.2, AC004867.5, AP001724.1, AP000688.1, AL034417.14, AL031708.3, AC005098.2, |
| | | | | | AC007327.1, AC016543.6, AC012596.4, AC004000.1, AC005952.1, AL117341.26, AC005796.1, |
| | | | | | AC005488.2, AC006014.2, AL031904.1, AJ400877.1, AC022436.5, AP001873.3, AC025594.5, |
| | | | | | AL161658.21, AC008394.3, AC005246.1, AL158828.14, AC007003.4, AF168787.1, AL031228.1, |
| | | | | | AL136228.8, AL121834.20, AC090051.8, AL139092.12, AC005529.7, AC005047.3, AC021396.6, |
| | | | | | AL390738.4, AL391122.9, AC010363.6, AC068799.14, AL035464.20, AC006449.19, AL121753.30, |
| | | | | | AC004778.1, AP001432.1, AL121901.20, AL391136.9, AP000010.2, AP000151.1, AL022324.1, |
| | | | | | AC091529.1, AL139415.10, U91320.1, L44140.1, AB038653.1, AL049776.3, AL136123.19, AC008701.5, |
| | | | | | AL136083.7, AC010412.7, AC022509.21, AL022320.23, AL138756.23, AC005565.1, AL353710.7, |
| | | | | | AC009961.11, AL121886.22, AL359091.10, AP001068.1, AL023577.1, AL354808.24, AL121653.2, |
| | | | | | AP000500.1, AC004491.1, AL137141.10, AL078461.38, AL009181.1, AC011450.4, AL138762.20, |
| | | | | | AF111167.2, AC011460.3, AL137229.4, AC018712.5, AC009477.4, AP001728.1, AC010543.8, |
| | | | | | AL022318.2, AC005821.1, AC012309.7, AP001714.1, AC009731.6, AB026899.1, AJ011930.1, |
| | | | | | AL163300.2, AL161781.12, AL354720.14, AL133240.3, AL353802.14, AC074013.5, AC007000.2, |
| | | | | | AL049795.20, AC079347.6, AC011548.4, AF107045.1, AL031659.9, AP001725.1, AC087590.1, |
| | | | | | Z68226.1, AL513008.14, AC020904.6, AL033528.19, AC002326.1, AP001469.1, AC004785.1, |
| | | | | | AL162464.5, Z77249.1, AC069080.12, AP000687.2, AL512590.2, AL133545.10, AC025457.5, |
| | | | | | AL357712.10, AL121652.2, AL033381.2, AC006023.2, AC009481.4, AP000008.1, AC006312.8, |
| | | | | | AC023344.4, AC006236.1, AC010358.5, AC004812.1, AC004824.3, AL049565.3, AL133383.10, |
| | | | | | AL356481.16, AC009996.7, AL391839.9, L47234.1, AL162274.17, AP002982.2, AC004882.2, |
| | | | | | AC008055.6, AL031727.42, AL117334.29, AC010203.13, AL132780.5, AC007687.16, AC004622.1, |
| | | | | | Z93023.1, AL118524.25, AL355916.2, AC007404.4, AL079335.29, AC005387.1, AC011449.6, |
| | | | | | AC005225.2, AC019206.4, AL021977.10, AC011239.5, AL137878.11, AL161899.21, AL158214.33, |
| | | | | | AL591807.1, AL391221.15, AC006435.7, Z67997.1, AL133507.8, AC005914.1, AC008507.8, |
| | | | | | AC012476.8, AC008651.7, AC005386.1, Z93244.1, AC010465.7, AL137059.20, AC003969.1, |
| | | | | | AL117692.5, AL365445.11, AL136039.4, AP001727.1, AC004134.1, AC010598.6, AC006329.5, |
| | | | | | AL049569.13, AL137061.12, AC010473.5, AC018738.4, AL031428.9, AL109749.22, AC005200.1, |
| | | | | | AL133260.12, AC004098.1, AC008536.6, AC007277.2, AP000811.4, AL136159.11, AL033543.6, |
| | | | | | AL158166.12, AC009244.24, AC006057.5, Z81007.1, AC090955.2, AL121992.24, AF274856.2, |
| | | | | | AC008635.6, AL009031.1, AC004089.25, AC006139.1, AL135787.13, AL133485.3, AC007739.2, |
| | | | | | AL035587.5, AC011479.6, AL159168.15, AC006480.3, AL139289.6, AP001748.1, AL139396.17, |
| | | | | | AL161793.9, AC006277.1, AL354760.11, AB014078.1, AC004594.1, AC004976.1, AC012442.7, |
| | | | | | AL391595.14, AL512347.14, AC011471.6, AC008753.8, Z97985.16, AF283320.1, AP000704.2, |
| | | | | | AC010320.9, AL135839.15, AC090954.1, U95742.1, AC009248.6, AC018648.5. |
| HE9EA10 | 78 | 827796 | 1-2100 | 15-2114 | AI990816, BG112919, BE503434, AI797355, AW303578, BE502346, AI750156, BE786552, AA514648, |
| | | | | | AI631128, AU158865, AU148743, AI611129, AU153354, BE540704, AU150538, BF508791, BF223713, |
| | | | | | N77793, AW103270, AI206873, N62886, AI652672, AW003920, AW515809, AW003207, AI055940, |
| | | | | | AI039096, AW205084, AI206877, BE175285, AI522151, BE709434, BF436332, AI365206, AI274835, |
| | | | | | AW798986, AA962334, BF001393, AI220417, AA226874, AA062659, AI696208, AI970440, BF353450. |
| HE9GG20 | 79 | 633719 | 1-662 | 15-676 | AA702942, AA017500, AI590400, AI863074, BF208968, N53688, R50964, H29619, AA053400, M79184, |
| | | | | | R49619, R07891, R11225, D58339, AA022600, AA704234, H44497, BE567097, BE567104, N54769, |
| | | | | | AW949478, AV726590, AW958620, AV708961, AV724987, AW953773, AV727381, AW963671, |
| | | | | | AV702725, AV706223, AV707863, AV703062, AW967188, AV728965, AV706183, AV651920, |
| | | | | | AV727822, AW959830, AV707786, AV698290, AV702738, AV705445, AV705437, AV702798, |
| | | | | | AV704847, AW957653, AW954439, AV660258, AV725618, AV726505, AW962133, AV707663, |
| | | | | | AW964223, AV706279, AW950443, AV697880, AV648364, AW952403, AV726619, AW952751, |
| | | | | | AV701183, AW956075, AV645936, AW954209, AV709587, AW959858, AV705635, AV692600, |
| | | | | | AV650315, AV659389, AV727613, AV725033, AV706527, AW964421, AV727787, AV659294, |
| | | | | | AV725745, AV686060, AW631469, AV660608, AV728148, AV726831, AW950411, AV709314, |
| | | | | | AV653353, AV727377, AW954697, AV691080, AV702385, AW949802, AV652001, AV707979, |
| | | | | | AV709580, AV727003, AV707652, AV708786, AV659547, AV727526, AV728546, AV725577, |
| | | | | | AV728924, AV725617, AW956474, AV704124, AV699089, AV705135, AV701874, AV703501, |
| | | | | | AV704785, AW952042, AV707401, AV709660, AV709935, AV654035, AV707654, AV704042, |
| | | | | | AV654282, AV729220, AV697288, AV694836, AV706882, AV697498, AV727314, AV702954, |
| | | | | | AV727238, AV686420, AV682997, AV696866, AV727126, AV728652, AV655890, AV728997, |
| | | | | | AV706162, AV686390, AV656256, AV686417, AV698429, AV656240, AV655577, AV692972, |
| | | | | | AV694871, AV727459, AV695545, AV703762, AV656283, AV656224, AV694674, AV708025, |
| | | | | | AV684604, AV729378, AV708980, AV692691, AV729131, AV645545, AV706671, AV649758, |
| | | | | | AV728270, AV709256, AV727103, AV693523, AV706532, AV701496, AV707730, AV727807, |
| | | | | | AV705811, AV704592, AV703456, AV727032, AV728642, AV701538, AV727029, AV725001, |
| | | | | | AV702869, AV725380, AV707510, AV727221, AV725956, AV728471, AV726694, AV728985, |
| | | | | | AV708438, AV702861, AV725134, AV702721, AV728436, AW945153, AW959312, AV703669, |
| | | | | | AV702794, AW951768, AV654070, AV650430, AV703437, AV702558, AV703620, AV704585, |
| | | | | | AV651075, AV729077, AV659189, AW960601, AW957068, AW954032, AV651317, AW960779, |
| | | | | | AW949398, AW952183, AW959806, AV656903, AV697196, AV707656, AV684762, AV656250, |
| | | | | | AV726091, AV703034, AV707830, AV655280, AW951239, AV659322, AV654908, AV656478, |
| | | | | | AV698545, AW952885, AV708381, AV660728, AV646808, AV726194, AV703169, AV728715, |
| | | | | | AV728518, AV728360, AV727912, AV702109, AV696931, AV647789, AV729159, AW966044, |
| | | | | | U94592.1, Z30183.1. |
| HEAAW94 | 80 | 847340 | 1-910 | 15-924 | AA578368, AA492135, BE707438, AI88012, AA927112, AW970866, AA368674, AW237957, |
| | | | | | BE560582, BE560540, BE268041, BE513979, BE398109, AI525375, BE270770, AF191611.1, |
| | | | | | AF043045.1, AF042166.1. |
| HEBCI18 | 81 | 831464 | 1-1107 | 15-1121 | BG163565, AA176798, AW978791, BE551966, AA836133, AW469431, AL134496, AI919296, |
| | | | | | AA039788, AA039787, AW188317, AI198382, AI302883, AI057154, AW504498, R82599, R87540, |
| | | | | | AW873029, AW471211, AA912833, BF909811, AI589744, F09143, F10741, R82600, AA984619, |
| | | | | | T75424, BE328429, R39278, AW517852, BE929822, R88273, R87938, BE929796, AA583730, |
| | | | | | AW088089, AW169811, BF812441, F13138, F11483, AW008583, BE934536, T94778, AW135926, |
| | | | | | AW082922, R87937, T63400, T94026, N26157, AI432002, T63545, AI687331, AA983955, AB014522.1. |
| HEBCY54 | 82 | 600355 | 1-1175 | 15-1189 | AL530975, AA747512, AI215061, T15637, Z39819, AA350340, AA866209, R00414, AW074717, |
| | | | | | F08597, AW953260, Z43761, U97145.1. |
| HEBDQ91 | 83 | 840288 | 1-1559 | 15-1573 | AW964157, AI564075, AA167586, AW204637, R85100, AA824367, Z45398, AA324333, AA332411, |
| | | | | | AW341163, T81885, BG055317, AA378561, T05032, BE218722, Z41111, T71210, AV705201, |
| | | | | | AV703158, AW953763, AC008623.4. |
| HEBFR46 | 84 | 847064 | 1-1290 | 15-1304 | BF339246, AW957665, BG258103, AW075995, BF309372, BE868083, AW576203, BF308177, BE881903, BF689190, AI051657, |
| | | | | | AA311371, BG059809, W56301, AW058408, AA102223, BE301190, |
| | | | | | AI091799, R05745, D61582, R01123, AA102222, AA375163, BG029189, AW293550, AI752483, |
| | | | | | AA376452, AW275432, BF812696, AI439525, AW151541, AW084324, AL121039, AW265468, |
| | | | | | AI702049, AW162314, AW327673, AA577706, BE273825, BF940118, AI270280, AW148821, |
| | | | | | AW162332, AA807704, BG059139, AA661583, AW238137, AA601674, BG180320, AV742390, |
| | | | | | BE244308, AW410844, AI433952, AI828721, AA631915, AL079734, BG152746, AW473160, |
| | | | | | AW021399, AW020094, BE677164, AA728954, AI860423, AI039257, BF679568, AW243817, AI049999, |
| | | | | | AW148964, AI538404, AI826857, AI753131, AI690379, BE676856, AI003469, AV758870, BF214695, |
| | | | | | AW502688, AW631267, AI904840, AA603359, AI251696, AI819419, AI090377, AI254508, BE176819, |
| | | | | | AI554399, AA112864, AI355246, AW151848, AW962971, AI028148, AI308529, BF868826, BF970107, |
| | | | | | AA507499, AI751698, AL036896, AC006483.3, BC000787.1, AK024787.1, AC010616.5, AK027150.1, |
| | | | | | AC004659.1, AL078611.1, AK000385.1, AC005519.3, AC009756.9, AC002543.1, AC005052.2, |
| | | | | | AL354836.13, AC016995.4, AL023879.1, AC003108.1, AL139824.22, AL121675.36, AL358777.12, |
| | | | | | AC015651.18, AC011444.5, AC004966.2, AC011526.7, AC010319.7, AL121579.4, AL158040.13, |
| | | | | | AC007421.12, AC005531.1, AL391259.15, AL096701.14, AC002996.1, AC067945.4, AL109923.29, |
| | | | | | Z97183.1, AL133458.19, AC010271.6, AF279660.2, AL035086.12, AP000280.2, AL445184.11, |
| | | | | | AC008440.8, AC008848.7, AL139809.16, AC018663.3, AP000039.1, AP000107.1, AF195658.1, |
| | | | | | AP000557.2, AC004974.1, AC010789.9, AC004552.1, AC004985.2, AL160256.21, AC018633.2, |
| | | | | | AL121897.32, AC090944.1, AC020983.7, AP001715.1, AC007374.6, AL117382.28, AF207550.1, |
| | | | | | AC010422.7, AL137852.15, AC008635.6, AL035659.22, AP000463.2, AB017653.1, AL359236.4, |
| | | | | | AC005358.1, AL035683.9, AL139785.5, AL159168.15, AC000353.27, AC000379.1, L35532.1, |
| | | | | | AL357972.18, AC011479.6, AL159990.12, AL138849.12, AC008891.7, AP000555.1, AC010530.7, |
| | | | | | AC008744.6, AC025212.5, AL451162.14, AF167081.1, AC007240.2, AC003007.1, AL512489.11, |
| | | | | | AC004673.1, AC004752.1, AL138733.15, AL354948.7, AC011740.7, Z85986.1, AC005484.2, |
| | | | | | AC013355.7, AC016596.5, AL031711.30, U73636.1, AC006064.9, U91327.1, AL031680.20, |
| | | | | | AC004089.25, AL132640.4, AL109935.39, AC010326.6, AC007676.19, AL133229.40, AL136228.8, |
| | | | | | AC018797.4, AL033519.42, AL096791.12, AL391139.19, AC002312.1, Z97054.1, Z83840.7, |
| | | | | | AC004821.3, AC002060.3, AL139184.8, AC005280.3, AF107885.2, AB032485.1, AP000256.1, |
| | | | | | AF312032.1, AL035705.22, AC012379.7, AC020904.6, AC008521.5, AL356214.20, AF224669.1, |
| | | | | | AP000691.1, AC018673.4, U07561.1, AC008392.6, AC004263.1, AP002906.2, AL031058.1, |
| | | | | | AL355480.22, AC006530.4, AC009362.8, AF258545.2, AL049759.10, AL035249.6, AL008582.11, |
| | | | | | AJ009616.3, AL050404.3, AL122020.5, AP000098.1, AL133163.2, AC025166.7, AC087311.22, |
| | | | | | AL513366.11, AL353678.11, Z97632.1, AC005041.2, AL121586.31, AC006449.19, AC010412.7, |
| | | | | | AL355336.15, AL022316.2, AL353748.13, AC010526.7, AC005911.6, AC016025.12, AC084864.2, |
| | | | | | AC004066.1, AP001748.1, AC026120.33, AL050307.13, AP000361.1, AL157372.18, AL353710.7, |
| | | | | | AL049780.4, AC011895.4, AC005695.1, AL161937.13, AL354928.9, AC008738.6, AC008372.6, |
| | | | | | AP000503.1, AC002404.1, AC008482.5, AL121967.11, AC010378.6, AL449209.2, AC026672.44, |
| | | | | | AL356805.5, AL031662.26, AL449143.18, AL034369.1, AF134726.1, AL049843.18, AC008623.4, |
| | | | | | AC072061.8, Z98948.1, AC004662.1, U62317.2, AC012476.8, AC008397.7, Z98752.16, AL161670.4, |
| | | | | | AC007957.36, AC009399.5, AC008755.6, AF317635.1, AC009812.17, AC002546.1, AC003043.1, |
| | | | | | AC022211.5, AC007746.3, AL050335.32, AC005015.2, AC022405.5, AC004476.1, AL109804.41, |
| | | | | | AF001549.1, AC016602.6, AL109799.6, AC008044.4, AC004851.2, AL049795.20, AL162505.20, |
| | | | | | Z83851.17, AL359541.11, AL031282.1, AC009470.4, AL034422.24, AL133332.12, AC005365.1, |
| | | | | | AL157789.6, Z98051.6, AC006151.3, AC024561.4, AC009086.5, AC005570.1, AC010679.6, |
| | | | | | AC009469.4, AC008857.5, AC007845.12, AC005091.1, AL132713.11, L78810.1. |
| HEBGE07 | 85 | 798096 | 1-1853 | 15-1867 | AI016066, AC010170.3, AC006515.7, AC008641.6, AC019086.7, AC016587.7, AL078581.11, |
| | | | | | AC037433.6, AL121975.9, AC022267.8, AC009225.3, AC091493.1, AC006257.1, AL160411.25, |
| | | | | | AL033397.7, AL122023.3, AP001671.1, AL121983.13, AL024506.1, AL135785.10, AC079383.17, |
| | | | | | AC024085.5, AC020552.4, AC087069.2, AC008115.3, AL162571.9, AC078841.4, AC008543.7, |
| | | | | | AC083876.2, AC005071.2, AC019041.8. |
| HEBGE23 | 86 | 836129 | 1-405 | 15-419 | AI916699, AI125755, AI569944, AI199740, AW339714, AW629416, AI983107, AW168252, AI709247, |
| | | | | | AW129523, AA932741, AA609646, BG056312, AI760369, AI936750, AI521565, AI440301, AW055303, |
| | | | | | AI479624, AA010077, AA632342, AI147442, F22819, W18188, AW081397, BE222356, W60994, |
| | | | | | AI689599, AI431516, AI885069, BF510349, AW503732, AA889231, AW591734, BF476512, AA878702, |
| | | | | | R20641, AA400446, AI971324, AA868098, AI797356, AI810231, AI468652, AI492286, AA235851, |
| | | | | | N95625, AA954572, AW665137, BE856112, R73152, BF003059, AW002465, AA400572, AW472891, |
| | | | | | AW964023, BF437333, AI202466, H02677, H16169, AI439020, AI435394, AA522469, AI857711, |
| | | | | | AA377384, AW029380, H13164, BF475393, AI823448, H04518, AA613532, Z25127, AW771867, |
| | | | | | AI270235, H03230, AW953787, AA601925, AA165368, AL045450, AW241567, H04020, AI917425, |
| | | | | | AI336145, AA364034, N88039, N66226, AA419377, AI650474, AW237069, W94707, AW316806, |
| | | | | | C01430, AK025939.1, AC006486.1, AB002304.1, AC004987.2, AC004842.2, AL035696.14, AC005627.2, |
| | | | | | AC018638.5, AC073135.3, AL137028.9, AF109718.1, AC010507.5, AL133216.10, AC004916.2, |
| | | | | | AC012441.3, AC006328.5, AC012005.4, AF270605.1. |
| HEGAU15 | 87 | 834379 | 1-1111 | 15-1125 | W92008, W92009, AC009404.5. |
| HFCEI04 | 88 | 692438 | 1-873 | 15-887 | |
| HFEAY59 | 89 | 658685 | 1-1139 | 15-1153 | AA339768, AI150703, BE386477, AC005919.1. |
| HFEBO17 | 90 | 852218 | 1-976 | 15-990 | AW473576, AI089774, AW451782, AW295271, AA749033, BE440149, AI949946, AI469900, N68539, |
| | | | | | AW172942, AI872021, AW243195, BE858872, AI337875, AI376876, BE327191, BF939700, AI363093, |
| | | | | | AI471556, AI767259, BF114982, AI683261, AW028130, AW976177, BE349166, AA974484, AW027661, |
| | | | | | AI683115, AW614790, AI421188, AI281604, AW239182, AI750006, AW235809, AI493809, AA455090, |
| | | | | | BF878349, W37813, AV650898, F09284, AW193169, AA703436, AV649714, AA526238, Z41088, |
| | | | | | AI700797, AW268135, T92246, AV662283, AI916032, T17498, F02060, AV650183, BF768675, F04236, |
| | | | | | AA935093, BE884109, AV649952, AA937505, AV649940, W37230, AA585284, AV649786, AV651140, |
| | | | | | AW976261, AW365708, AL137741.1, AK000272.1, BC001249.1, BC000937.2, AL162084.1, |
| | | | | | AL157494.1, AK027465.1. |
| HFIJA68 | 91 | 847074 | 1-1143 | 15-1157 | AA032221, BE881257, BF573995, BE875216, AI686139, AL048969, BF826830, BE061906, AU157011, |
| | | | | | N49425, BE775020, AV763498, AA974503, AV710762, BF525393, AV696428, BE972379, BF667616, |
| | | | | | AI354847, BF038189, AV691908, AW405593, AV684596, BF916850, BG260565, AC004969.1, |
| | | | | | AC005061.2, AC005053.1, AL109827.8, AF186249.1, AC009144.5, AP003357.2, AC006277.1, |
| | | | | | AC006435.7, AC023105.7, AL050335.32, AF243527.1, AC005323.1, AL022165.1, AC024561.4, |
| | | | | | AC004848.1, AL353807.18, AL445584.16, AP000030.1, AC018638.5, AP000505.1, AC012476.8, |
| | | | | | AL035458.35, Z85987.13, AC009060.7, AP000152.1, AC073657.5, AP000044.1, AP000112.1, |
| | | | | | AC006571.12, AC026888.6, AL022163.1, AC008569.6, Z98742.5, AL118501.22, AP001412.2, |
| | | | | | AC007845.12, Z85986.1, AP001711.1, AL035072.16, AL355392.7, AF045555.1, AL049776.3, Y14768.1, |
| | | | | | Z97985.16, AC011443.6, AL445490.6, AL117336.22, AP001716.1, AC020916.7, AC090426.1, |
| | | | | | AC008753.8, AL359091.10, D88270.2, AL583856.6, AL096791.12, AC007637.9, Z93017.6, |
| | | | | | AL050318.13, AC010150.3, AL365505.15, AC005049.2, AP000692.1, AC005250.1, AC007546.5, |
| | | | | | AC087071.2, AC006285.11, AL033529.25, AL121594.6, AL160269.14, AL136300.22, AL356481.16, |
| | | | | | AL158830.17, AC019205.4, AC007216.2, AL133448.4, AP000501.1, AC018828.3, AP001760.1, |
| | | | | | AL158198.14, AC008892.5, AC022415.5, AL109797.18, AC011497.6, AL132780.5, AC005480.3, |
| | | | | | AC004099.1, AL133249.1, AL121655.1, AC005375.4, AC009961.11, AC005522.2, AC011895.4, |
| | | | | | AC016025.12, AC012170.6, AL356652.19, AL117381.32, AL158823.11, AL138724.12, AC005914.1, |
| | | | | | AL163201.2, AL078461.38, AC034193.4, AC006057.5, AC021999.4, AL139415.10, AC004967.3, |
| | | | | | AL450339.5, AF129756.1, AC005231.2, AC002072.1, AC002070.1, AC005387.1, AL121658.2, U95742.1, |
| | | | | | AL022721.1, AC011484.4, AC010618.7, AC016830.5, AL161670.4, AC006130.1, AL138836.15, |
| | | | | | AL137792.11, AC005778.1, AL121905.23, AL049869.6, AC005081.3, AL359236.4, AC020750.3, |
| | | | | | U95740.1, AL137012.6, AC002350.1, AL121992.24, AL139809.16, AC005519.3, AL121601.13, |
| | | | | | AF196969.1, AC004990.1, AF168787.1, AL136981.22, Z98946.15, AL133373.5, AC005500.2, |
| | | | | | AF254983.2, AL049539.21, AL355094.3, AC010463.6, AL121972.17, AL354707.17, AC010530.7, |
| | | | | | AL022323.7, Z99716.4, AC007193.1, AL121926.24, AC073138.3, AC073073.2, AC005077.5, |
| | | | | | AL360169.17, AC009244.24, AP001728.1, AC005332.1, AL157823.9, AC020931.5, AC018758.2, |
| | | | | | AC005052.2, AC007387.3, AL135927.14, AC007227.3, AL359644.10, AC072052.6, AC005251.1, |
| | | | | | AC018636.4, D86992.1, AC006449.19, AL021397.1, AP001753.1, AC005291.1, AL031846.2, |
| | | | | | AL133517.11, AL359092.14, AC007242.3, AB038653.1, AC018711.4, AC022148.5, AL136137.15, |
| | | | | | AC025168.7, AC011005.7, AC004867.5, AL136126.34, AC025588.1, AC009087.4, AP001714.1, |
| | | | | | AC018506.4, AC034240.4, AC073866.16, AC007991.7, AC011465.4, AL121886.22, AC007731.14, |
| | | | | | AL356915.19, AL109654.22, AC008610.6, AJ246003.1, AF134726.1, AC008543.7, AC004883.2, |
| | | | | | AC005736.1, AL391114.12, AC069255.18, AL135839.15, AC006345.4, AL391749.4, AC007488.15, |
| | | | | | AL137918.4, AP001731.1, AL157373.23, AC000360.35, AC004873.3, AP002428.3, AC005399.19, |
| | | | | | AC005280.3, AC005200.1, AL391137.11, AL080242.11, AC007263.4, AL110502.1, AC026464.6, |
| | | | | | AL031311.1, AC020983.7, AL136980.5, AC026448.5, AC004643.1, AC024166.3, AL136295.3, |
| | | | | | AL139317.5, AC002091.1, AC073136.6, AC008403.6, AP000134.1, AP000212.1, AC004686.1. |
| HFKES05 | 92 | 827572 | 1-1871 | 15-1885 | AL523262, AL529538, BE899393, AW084916, BE747028, BF311012, BE728739, BE312851, AL040564, |
| | | | | | BE742382, BE735998, AI381488, AI146820, AW161993, BF529932, BE383932, BE259400, AV710840, |
| | | | | | BE382374, BE744761, AL043582, AW439423, AL043581, BE646448, BG171573, BE677335, BE677477, |
| | | | | | AI554451, AA131317, AW088167, BF314148, BE261821, BG166503, BE279879, AW168887, |
| | | | | | BE646180, BF316303, BE046496, BF197687, AA744952, BE745721, AI218269, BE312818, BF314164, |
| | | | | | BF594180, BF314798, BF593719, AI151026, AA194202, AI418964, AI453314, AI873815, AW130388, |
| | | | | | BF913893, AA195161, AI269934, AA719396, AA625370, BE312619, BE252921, BE207433, AA492412, |
| | | | | | AI042024, AW250536, BF573185, BF037936, BG179218, BE302543, AA194044, AI147243, AW340657, |
| | | | | | AA947438, AI091020, AW117635, BF570164, AI445860, AL045225, AA115998, AI021898, AW732559, |
| | | | | | AI421387, AU152077, AA968905, AW662299, AA837991, AA131418, BF812798, AA194939, |
| | | | | | AL043070, AI948633, AW249876, AA195538, AA506433, T16224, AI589527, AA936491, AW016162, |
| | | | | | AA883810, AW118179, R54823, AV690033, AI560986, AV688867, AA459190, AA354156, C18845, |
| | | | | | AA378263, AA862775, H61307, AW806534, R45155, AW263382, AI277162, BG254511, W79694, |
| | | | | | AA458974, T31333, H39688, T34870, AA456441, AA301052, R40792, AL523263, C18401, R87505, |
| | | | | | AA063352, BE140370, R13315, D20272, BF568555, BE242030, BF033566, AI364386, BF940389, |
| | | | | | AA301053, AW419282, AW274389, H62348, BE938508, BE832988, BF569370, R87587, T65226, |
| | | | | | AI940182, BF844052, BE243197, AW886929, D61554, AI254353, T65265, AU124203, BE207881, |
| | | | | | AA194949, AA569639, AV762557, AV762552, AA862769, H18657, D83782.1, AK027402.1. |
| HFKFX64 | 93 | 566835 | 1-765 | 15-779 | AI202664, AB051500.1. |
| HFPCZ55 | 94 | 840840 | 1-2721 | 15-2735 | AV714494, BG257295, AU137860, AA455877, AA999864, AW880615, N98831, BE048764, AW954901, |
| | | | | | BE348449, N66571, AL045243, AI420623, AI817146, AW271213, AU157344, W44682, BF955185, |
| | | | | | BE223107, AI355752, AA455880, R54821, BF589210, AI924033, AI887849, N63487, AW601474, |
| | | | | | AI923020, N63481, AW903942, AA975919, AI306145, BE767078, AA256290, R72348, N94787, |
| | | | | | BF948057, AI919421, AW880496, AW005707, AI584169, AA669696, BF754698, H10056, AI250173, |
| | | | | | AA318076, AI440227, BF001047, AW244040, H10110, N94780, N44348, AA312915, R55120, |
| | | | | | BF944396, AI358104, AW883910, AI886676, AI418315, BE838574, AI570333, BF588691, AW880645, |
| | | | | | BF909132, BF932028, BG153080, AV758808, AI345677, AI866820, AI345608, AI340533, AI348995, |
| | | | | | BG029829, AW268261, AI623941, AW020592, AI348847, AI310582, AI310606, AI345527, AI340511, |
| | | | | | BE393551, AI307569, AI524654, AL119791, AW079334, AA575874, AI336503, AW238688, BF680133, |
| | | | | | AI249877, AI344819, AI336633, AI345397, AI345567, AL515047, AI345261, AI345253, AI348870, |
| | | | | | AI345471, BE011880, BF672397, AL037582, AL037602, AA502794, AW151136, AI310940, AW265004, |
| | | | | | BF885082, BE965121, BE964700, BF924884, BF904194, BE907440, AW268072, AW191844, AI379711, |
| | | | | | AI343091, N63128, AI446373, AI573026, AI636619, AI582434, AI366992, AA070889, AW152182, |
| | | | | | AI312210, AI805688, AI334895, AI801325, AA493647, AI336512, AI473451, AI537677, AA761557, |
| | | | | | AI613343, AW162189, AA259207, AW303089, AW411043, AI859991, BE543089, AI784214, AI539771, |
| | | | | | AI929108, AI583032, AW089275, AI801556, BF816042, AK002039.1, AL117524.1, AC073125.5, |
| | | | | | BC003056.1, AC006112.2, AL360267.10, AC026307.16, Z83840.7, BC008040.1, AL121949.13, |
| | | | | | AK026793.1, AL512733.1, AC020904.6, AF218031.1, AL049423.1, AL136766.1, BC006181.1, |
| | | | | | AC004383.1, BC000316.1, AY007109.1, AF132730.1, AL359894.9, AK000655.1, BC006180.1, |
| | | | | | AC026756.15, AF245044.1, AL161804.4, AK026927.1, BC003122.1, AL512454.6, AC004057.1, |
| | | | | | AF044221.1, AC002538.1, AC009087.4, AL133069.1, BC004937.1, BC002485.1, AB055303.1, |
| | | | | | AB060887.1, AC007383.4, AF217973.1, BC002849.1, AF162270.1, BC004908.1, AC005815.1, |
| | | | | | AL049557.19, AK027162.1, AF285836.1, AF271350.1, BC006472.1, AC010137.3, AK026542.1, |
| | | | | | BC007255.1, AL117416.1, AK000568.1, AC083867.4, AK026649.1, BC006832.1, AK025435.1, |
| | | | | | BC003548.1, AF061795.1, AF151685.1, AL137479.1, AL137267.1, BC000007.1, AF111112.1, Y13350.1, |
| | | | | | AC010723.3, AC010530.7, AK026528.1, AK027095.1, AL122106.1, AK027164.1, BC001977.1, |
| | | | | | X72889.1, BC002733.1, AK026462.1, AK000137.1, AL162713.19, Z82206.1, BC008365.1, BC004362.1, |
| | | | | | AL157694.7, AL110158.1, BC008282.1, U77594.1, BC001767.1, BC008364.1, BC008718.1, AC009233.3, |
| | | | | | X83544.1, AB050534.1, AC019176.4, AK025407.1, AK000421.1, AL356747.18, AC004837.1, |
| | | | | | BC005678.1, AP001666.1, AL135796.6. |
| HFTAS49 | 95 | 847386 | 1-504 | 15-518 | AI086076, BF432976, BF110160, AI493530, AA573873, AA594551, BF967837, AA086458, AA479474, |
| | | | | | AA505932, AI652271, AI654799, AA838460, AA150300, BE813563, AA148791, BF939030, AI126256, |
| | | | | | AA030012, W05069, BF447699, R34884, BG055342, AA446652, AA643067, AW062717, AW062693, |
| | | | | | N51389, AI032793, AA629918, BF945961, AI289025, AA447455, AI435022, AA479820, AA781029, |
| | | | | | BF437593, AA256802, AI341331, BE817212, AW954578, H62050, AI184633, BE502174, R36678, |
| | | | | | AF034174, AA215717, AA284655, AW665402, AW675233, BE674245, BC007727.1, AF062529.1, |
| | | | | | AF062530.1, Z98036.1. |
| HFVHW43 | 96 | 570948 | 1-1219 | 15-1233 | AI761677, AL047645, BE243506, AA169245, BE246405, AA536127, BE064798, AI364568, AW575409, |
| | | | | | AW085690, AI298660, AW844145, AA492266, Z23150, AI281401, AA247731, AI078409, AL132795.12, |
| | | | | | AC009274.9, AL133324.13, AC034245.4, AL158207.15, AC016831.1, AC011491.5, Z82242.1, |
| | | | | | AC008391.5, AF110184.1, AC004659.1, AL161665.5, AP000689.1, AL158830.17, AL035685.21, |
| | | | | | AC005000.2, AL353692.14, AL451162.14, AL133551.13, AC005057.2, AL133382.8, AL353614.9, |
| | | | | | AP000338.2, AC009247.12, AC005327.1, AP000216.1, AC008753.8, AL357519.19, AL157372.18, |
| | | | | | AL162578.13, AC005722.1, AP000499.1, AC005208.1, AC016697.8, AC005913.2, AL121658.2, |
| | | | | | AC008745.6, AL137067.7, AC006111.3, AF235097.1, AL050341.18, AC004216.1, AC011455.6, |
| | | | | | AC079754.4, AC053467.1, AC008755.6, AC005412.6, AC022211.5, AC011461.4, AL121655.1, |
| | | | | | AL121653.2, AL079342.17, AC009470.4, AC016637.6, AL133347.28, AC004826.3, AB026898.1, |
| | | | | | AP003357.2, AL391834.8, AC021999.4, AP000744.4, AC022007.3, AC005844.7, AC020754.4, |
| | | | | | AF111168.2, AC005355.1, AC007773.1, AL139390.15, AC007383.4, AC005104.1, AK022308.1, |
| | | | | | AC020916.7, AC013429.12, AC012170.6, AL354674.5, AC004150.8, AC004129.1, AC022002.4, |
| | | | | | AC005839.1, AL136992.22, Z97054.1, AF038458.1, AL158198.14, AL050335.32, AL121920.21, |
| | | | | | U52111.2, AL136979.16, AC020744.4, AL450346.4, AC004262.1, AL137139.9, AK022406.1, |
| | | | | | AP001063.1, AL133312.3, AC020550.4, AC002115.1, AP003475.2, AP001760.1, AL499628.1, |
| | | | | | AL035249.6, AL354928.9, Z99916.1. |
| HGBER72 | 97 | 826710 | 1-1302 | 15-1316 | AI827764, AW963463, AV728410, AW964231, AV705122, AW956640, AW963895, AW956641, BF918640, AV702172, AI732151, |
| | | | | | AW958318, AW021917, AV759632, AW974932, AV702109, |
| | | | | | AV704541, AV704467, AV705086, AI962030, AV725237, AV711430, AW500029, AW956077, |
| | | | | | BF760919, AV762633, AV703573, BF804385, AW962006, AW970877, AW302909, AA905613, |
| | | | | | AV728369, AV763026, AV763058, AV702760, AI188390, AV729337, AA644090, AW969743, |
| | | | | | AI358384, AV729272, AV702343, BF750422, AW962942, AV726091, AW963497, AV703597, |
| | | | | | AW973992, AW960468, AV709273, AI305766, AV762454, AW966064, BF911056, BG236628, |
| | | | | | AW963542, BE063437, BF916934, BF347791, AW410354, AI017251, T05834, AV762982, AV711465, |
| | | | | | AW955841, AI279417, BE150580, AV762033, AA584489, AA904275, AL040054, AV757607, |
| | | | | | BE019467, AV758903, AV728425, AV703063, BF347740, AI963720, AW816516, BE294700, AL042373, |
| | | | | | BE395467, AW963489, BE178609, AA720732, AV712092, AW514662, AW069769, AW731867, |
| | | | | | AA574442, AV759557, BG029528, AV764259, AF246229, AC007731.14, AC005500.2, AC004033.3, |
| | | | | | AP001725.1, Z98941.1, AC005391.1, AL353653.19, U78027.1, AL034405.16, AC002301.1, AC004477.1, |
| | | | | | AL121897.32, AL133396.2, AC018638.5, Z83844.5, AC020916.7, AL035587.5, AL391241.21, |
| | | | | | AL096791.12, AL096865.28, AC002542.1, AL035422.12, AL117694.5, AC008543.7, AC005037.2, |
| | | | | | AC005841.3, AC005756.1, AL133551.13, AL109758.2, AL021155.1, AC006241.1, AC011464.5, |
| | | | | | AC008754.8, AL049643.12, AL138740.9, AC007536.9, AC020947.6, AC006211.1, AC079602.15, |
| | | | | | AC011495.6, AL136084.11, AL031685.18, AC004771.1, AL031432.1, AC008750.7, AC005701.1, |
| | | | | | AC008044.4, AC004840.3, AL139022.4, AL135927.14, AC007227.3, AC005821.1, AC004841.2, |
| | | | | | AC005399.19, AC007204.1, AB016897.1, AC083872.2, U02532.1, AE006462.1, AC011452.6, |
| | | | | | AL445685.17, AC006958.1, AC061709.25, AF196779.1, AJ009611.6, AP000692.1, AC005484.2, |
| | | | | | AC006345.4, AC005921.3, AL391262.3, AL512430.14, AC002563.1, AC004815.2, AC006055.1, |
| | | | | | AC006130.1, AC009756.9, AL139188.14, Z85987.13, L11910.1, Z81364.1, AL023807.6, AC009086.5, |
| | | | | | AC068799.14, AC004882.2, AK000254.1, AC013717.8, Z98257.1, AC008372.6, AL031295.1, |
| | | | | | AC000086.1, AC006543.7, AC008622.5, AL157369.7, AL136418.4, AL139054.1, AC008736.6, |
| | | | | | AC002425.1, AL157938.22, AC002565.1, AC005833.1, AC004824.3, AC010206.8, AC010422.7, |
| | | | | | AC002133.1, AL132653.22, AL109743.4, AP001693.1, AC008395.6, AL449209.2, U73024.1, |
| | | | | | AC011514.3, AL133545.10, AB055358.1, AC009488.5, AC010768.9, AC005971.5, AC006451.5, |
| | | | | | AC005666.1, AP000208.1, AP000130.1, AC006052.5, AL158141.14, AP000665.5, AF010238.1, |
| | | | | | AC011529.3, AL009178.4, AC006511.5, AL122001.32, AC004150.8, AL021918.1, AL133174.15, |
| | | | | | AL158207.15, AC007201.1, AC008745.6, AC068533.7, AC009087.4, AP003352.2, AL033383.26, |
| | | | | | AC002472.6, AC006111.3, AL034417.14, Z82182.2, AC006312.8, AP000842.4, AC007546.5, |
| | | | | | AL442167.1, AC025447.4, AC009220.10, AL121928.13, AL049868.20, AC006544.19, AL022322.1, |
| | | | | | AF348209.1, AC010328.4, AC004821.3, AC018926.10, AL034549.19, AC006061.1, AL163285.2, |
| | | | | | AL049843.18, AC019171.4, AL096840.25, AL359846.11, AC008551.5, AP000251.1, AC007136.1, |
| | | | | | AF031078.1, AP003475.2, AL354864.16, AC010465.7, AC005330.2, AC010368.4, AL121992.24, |
| | | | | | AF045555.1, AL450339.5, AL117352.12, AC008101.15, AL445263.6, AF168787.1, AC004913.2, |
| | | | | | AC004816.1, AC011453.4, U91318.1, AL449305.4, AL109627.18, AL022327.17, AC004765.2, |
| | | | | | AL049872.3, AC008906.5, AL137918.4, AC025457.5, AC025280.4, AF030876.1, AC012594.7, |
| | | | | | AC034193.4, AC005546.1, AC005306.2, AL022329.9, AC006483.3, AC007388.3, AP001714.1, |
| | | | | | AC008397.7, AF001550.1, AC018828.3, AC003007.1, AP000111.1, AL133347.28, AC010358.5, |
| | | | | | AC009060.7, AF038458.1, AL035696.14, AL031587.3, AL359091.10, AC022382.3, AC005180.2, |
| | | | | | AL137792.11, AL109801.13, AL121914.31, AF053356.1, AC022211.5, AC009570.13, AL022476.2, |
| | | | | | AC003046.3, AC004686.1, AP002906.2, AC019205.4, AC006388.3, AC025593.5, AC002115.1, |
| | | | | | AC011479.6, AC004752.1, AC008269.4, AC004836.2, AC005215.1, AL136304.10, AC003108.1, |
| | | | | | AL137145.13, Z95331.2, AC011737.10, AL162455.14, AL133246.2, AL034380.26, AP001711.1, |
| | | | | | AC008403.6, AC002044.1, AC026172.3, AC008079.23. |
| HGBHP91 | 98 | 693011 | 1-1040 | 15-1054 | AA825851, AA736485, AA805014, AI792627, AI862231, AW086361, AI348722, BE139397, AI254439, |
| | | | | | AI349662, AI053450, AI053903, AW102980, AC005017.1, AL591770.1, AC005484.2, AC018523.9, |
| | | | | | AL137190.5, AC016691.10, AL354751.7, AL513366.11, AC009137.6, AC083871.2, AC024166.3, |
| | | | | | Z77249.1, AL161670.4, AC007934.7, AL137139.9, AB026898.1, AL353613.10, AC018494.6, |
| | | | | | AL110502.1, AC026770.6, AL031053.1, AC073366.3, AC005014.1, AL138499.4, AL158828.14, |
| | | | | | AP002982.2, AL133396.2, AC007619.22, AC007327.1, AL022723.4, AC004832.3, AC004491.1, |
| | | | | | AC005189.1, AC009483.3, AC003950.1, AC009961.11, AL031681.16, AC004813.2. |
| HGLBG15 | 99 | 701990 | 1-764 | 15-778 | AI377951, AA478899, AL521476, AI970420, BF571396, BF690972, AA478780, AI522149, BF571271, |
| | | | | | AA758425, AW956237, BF692249, AI954716, AW197154, BF576614, AI631753, AI829079, AI765476, |
| | | | | | H99846, AW274419, AI371713, AI951909, AW769338, BF516230, H19109, AI925973, AI932682, |
| | | | | | AI138219, AI301748, AI956119, AI755080, AI378559, AI080154, H05933, BF000829, AA031313, |
| | | | | | AW090099, AA736498, AA852791, AA852790, AA928061, AI699043, AI087918, AI468315, R56048, |
| | | | | | AI469137, AA248855, AW517996, BF541232, BF838384, Z38380, BF838382, AI760228, R55989, |
| | | | | | AL136597.1, AC005082.3. |
| HHEAK45 | 100 | 765278 | 1-2000 | 15-2014 | BG170168, BG119757, AU137041, BF307487, AI884713, AW583171, BF684161, BF434422, AI761426, |
| | | | | | AW961739, BE388217, AI816016, AI361955, AA808964, AU156996, AI869337, AA131094, AW291287, |
| | | | | | AW043617, AA535378, AW614114, AI249699, AI361947, AI218746, AI827821, AI139529, AI221685, |
| | | | | | AW961740, AI123285, W72783, AI469925, AL049086, AI076164, AA448078, N79760, AA927285, |
| | | | | | AI130718, AW103188, AA902207, W74291, AW015957, AW473667, AA447579, AI770126, AA886775, |
| | | | | | AI001738, AA884899, AI948509, BE467312, AW882943, AI765248, D12320, N72712, AA758092, |
| | | | | | BE295299, W79163, AI624834, N39042, BF822970, H23141, AA347762, W07208, BE940629, |
| | | | | | AA889154, AI081857, AI205834, AI377270, AA115546, AI220570, W02262, R42088, AW072212, |
| | | | | | N93000, R00155, W72784, AA677121, R00154, AI160329, AW450558, AA905549, F04905, H53287, |
| | | | | | AW262887, AA130970, BE856483, AI632990, W21211, AA115083, AA347763, N48234, AA907343, |
| | | | | | AI247907, AA665725, H78076, AW366883, AK001963.1, AL035690.10, AC010388.5, AL136839.1, |
| | | | | | AF086405.1, AC007533.2, AC010209.13, AL133341.12, AC023512.28, AC008379.6, AL033529.25, |
| | | | | | AL110120.11, AL133271.22, AC006022.1, AL138721.16, AC004694.1, AC005899.1, AL117694.5, |
| | | | | | AC004129.1, AL359236.4, AL121906.18, AC002465.1, AL133510.13, AL132986.4, AC004263.1, |
| | | | | | AL512782.6, AL035423.4, AB020867.1, AC008088.8, AC005821.1, AC008012.8, AL138878.10, |
| | | | | | AC087730.2, AC022509.21, AL391684.6, AL024474.1, AC012499.7, AL356969.12. |
| HHEOW19 | 101 | 886174 | 1-1575 | 15-1589 | AL526527, BG113611, BF978449, BG112152, BG119645, AW956161, BG180022, AW592434, |
| | | | | | BF434127, AI688154, AA890706, BE266768, BE700345, AI192484, AA908255, AA516363, AA446942, |
| | | | | | AW172490, AA923183, AI499002, AI766675, AI203601, AA894580, AI144379, BF346299, BF969646, |
| | | | | | AU118533, BE887334, AV760144, BE874811, AA865339, W72592, AW005448, AU143717, AU142574, |
| | | | | | AA906273, AI021941, AU128074, AW663560, AU131132, AI304388, AA669930, AI304344, AI346611, |
| | | | | | AU125747, AI311556, AA703026, AI266188, AL516896, AI025716, AA907108, BE390622, AI870412, |
| | | | | | AI870389, BE785805, AI288868, AA733097, BE789031, BF027056, BF035717, BE870307, BE389154, |
| | | | | | AL538540, N21316, BE780661, AA075002, AU129647, BG178120, AA774581, BE786810, BG165094, |
| | | | | | AA075113, AA443366, H70758, BE387196, AI525737, BF346268, AI264657, AA676415, W80864, |
| | | | | | AA644550, AI023409, AA772235, W67811, AW501988, AI807013, AA299952, AW474224, AI269880, |
| | | | | | AW629279, BG177563, BF800060, W67866, BF034810, BE547050, BG028159, BE083939, N80176, |
| | | | | | AI051331, AW592042, BE247222, AI201765, AA860195, AA081004, BE244890, AA019463, N34142, |
| | | | | | W88877, AI193593, N67021, AI192316, AW795216, N26033, BE084138, BE002622, AI084602, |
| | | | | | BE774587, BE832659, W76106, AW140058, N42641, BE832664, AA058752, AW994714, AW994775, |
| | | | | | AI768257, AA018536, AA888922, AW085016, W42800, BE093798, AA706242, AW994696, BE813681, |
| | | | | | AA384060, AI860208, N46027, AA081147, R96612, AA887957, BE708347, AW993971, AW192384, |
| | | | | | N41872, BF794279, AU120547, AA370582, BE832568, AW591801, AW236343, AW157602, N40396, |
| | | | | | AW294314, AW272410, AA723436, W35238, N31251, AA886238, BF817120, BF818982, AA373471, |
| | | | | | AW131477, H95094, AA808734, AI871211, AL038165, H79809, AI904418, AA534807, AI799628, |
| | | | | | AA299951, BF361806, AA001163, AA608755, BE798428, BE084059, AA988507, AI761279, AA564284, |
| | | | | | BE002993, AI949117, BF817107, AV756014, AW384875, AA393462, AW514936, AA454946, |
| | | | | | AA922856, AW408230, N30627, BE779312, W81429, BF448458, AA876205, H58732, AA831555, |
| | | | | | BG166267, BF695720, AI743703, N56626, N66943, AA017731, AV684502, AA724567, W24284, |
| | | | | | BG164949, AW957013, AA724553, H03450, BF056116, AL522121, H03534, W80538, AA193154, |
| | | | | | N30204, N44250, AA485314, AA485471, AI630146, AA806310, AA400785, AL043900, BE160214, |
| | | | | | AI338385, N36376, BG014060, AU133112, AW273251, AI218055, BE868284, AA923109, N36810, |
| | | | | | AA814225, N84302, AA017732, AA313506, AI906913, AI341766, N76206, AI298554, W03500, |
| | | | | | AW002024, W86743, AA746052, BF365269, W81430, AI351319, AC006001.2, AF098276.1, |
| | | | | | AC027644.9, AJ250042.1, BC000882.1, AF098275.1, AP002827.3, D13641.1, AC004074.1, AF098274.1, |
| | | | | | AC008267.6, AC005077.5, AK001702.1, AF126961.1, AF126960.1, AF126962.1, AC005231.2, |
| | | | | | AF126958.1, AK026600.1, AB060825.1, AC006285.11, AK024538.1, AL122050.1, AC016025.12, |
| | | | | | BC002733.1, AL137538.1, AB056809.1, AK026927.1, AL136787.1, AK026480.1, AL049466.1, |
| | | | | | AL110196.1, AB063071.1, AL162006.1, AL122093.1, AL050277.1, AL110221.1, AL110225.1, |
| | | | | | AK026629.1, AB055361.1, AK026506.1, AK026542.1, BC008387.1, AF091084.1, AK026583.1, |
| | | | | | AL049430.1, BC001967.1, AB048954.1, BC008070.1, AL133080.1, AL050146.1, AL050393.1, |
| | | | | | AL389935.1, AF090943.1, AL049452.1, AK025084.1, AK025092.1, AL122100.1, AF090886.1, |
| | | | | | AL136789.1, AL136586.1, S78214.1, AL136882.1, AL137478.1, AB048953.1, AK026959.1, AL136844.1, |
| | | | | | AB063046.1, AK026784.1, AL133072.1, U42766.1, BC003687.1, AB019565.1, AK026741.1, |
| | | | | | AF017790.1, AL133557.1, AL050108.1, BC007021.1, S61953.1, AK027113.1, Y16645.1, AL049283.1, |
| | | | | | AB047615.1, AK000137.1, AB055366.1, AK025484.1, AL136892.1, AK000486.1, AL133560.1, |
| | | | | | AB051158.1, AK026744.1, AK024992.1, AK026086.1, AL117583.1, AB060908.1, AK025491.1, |
| | | | | | AL050116.1, AF125948.1, AF097996.1, AB060916.1, BC001045.1, AL512689.1, BC007199.1, |
| | | | | | AF217982.1, AL050024.1, AL137459.1, AK000083.1, AK027204.1, AL359615.1, AL442082.1, |
| | | | | | BC006807.1, AL133565.1, AL049464.1, BC005858.1, AK000618.1, AB055315.1, AB056420.1, |
| | | | | | AL136893.1, AL133075.1, AL117457.1, AL133016.1, AL157482.1, AL512719.1, AL512718.1, |
| | | | | | AF090900.1, AL389939.1, AB049892.1, AF218014.1, AK026045.1, AK026647.1, AL049314.1, |
| | | | | | AL390167.1, AJ242859.1, AL136747.1, AK025015.1, AL096744.1, AK000323.1, AL442072.1, |
| | | | | | AB060914.1, AL117394.1, AL136749.1, BC008488.1, AL137283.1, AK000445.1, AB060893.1, |
| | | | | | AL136780.1, AK000212.1, AB062938.1, AB060852.1, BC008417.1, AL137550.1, AL133606.1, S76508.1, |
| | | | | | AK026592.1, AK027868.1, BC008365.1, AL136799.1, AB060826.1, AF078844.1, AL136928.1, |
| | | | | | AK024588.1, AB063070.1, AK026855.1, BC008899.1, AK026522.1, AB060863.1, AL117460.1, |
| | | | | | AK025239.1, AB052200.1, AK027142.1, AB047904.1, AF260566.1, AL136845.1, AF106862.1, |
| | | | | | AL080124.1, X82434.1, AL137557.1, AL133640.1, AL512754.1, AL133081.1, AL353957.1, AL117585.1, |
| | | | | | AL359601.1, AB055368.1, AL136768.1, AF090903.1, AL050149.1, AF262032.1, AK000206.1, |
| | | | | | AF111847.1, AL157431.1, BC004556.1, AL359620.1, BC006195.1, AL122123.1, AB060912.1, |
| | | | | | AF090934.1, BC001418.2, AL512746.1, AK026526.1, AF125949.1, AL359618.1, AL137521.1, |
| | | | | | BC007326.1, AK027096.1, Y10936.1, U58996.2, AB052191.1, AL137648.1, BC004195.1, AK027213.1, |
| | | | | | BC007674.1, AK027200.1, AF219137.1, Z37987.1, AK026452.1, AK025772.1, AL512765.1, AL136864.1, |
| | | | | | AB062978.1, AK024524.1, BC003683.1, AB048964.1, AL136615.1, AK025339.1, AF225424.1, |
| | | | | | AL512733.1, AL080137.1, AL133113.1, AF061943.1, AL122110.1, AL137429.1, AK026057.1, |
| | | | | | AK026353.1, AK027082.1, AK026613.1, AB047801.1, AB055303.1, AB060887.1, AK026534.1, |
| | | | | | AL080060.1, AL110222.1, AL162083.1, AK027114.1, AK025410.1, Y14314.1, AF146568.1, AF090896.1, |
| | | | | | AL117435.1, BC008983.1. |
| HHFEB79 | 102 | 1300768 | 1-3154 | 15-3168 | AU132655, AU132630, AU119199, AU125675, AU119524, AU121324, AV734096, BF346183, |
| | | | | | BG258593, AW959138, BF668482, AA206986, BF878396, AW582926, AI479712, AU145602, N36814, |
| | | | | | AW377557, AI769201, AA479691, AI540203, AL035761, AI912290, AU145838, AW753484, AA099572, |
| | | | | | AW959334, AW402467, AA479812, AU149286, AI422022, AA776463, AA535858, AU154148, |
| | | | | | AI016198, BF361274, AI560927, AU147170, AI343877, AI364588, BF061403, BF431914, AA847209, |
| | | | | | AA770509, BF811269, N69321, BE244691, AI201680, AW512169, AA101976, AW571674, AI318104, |
| | | | | | BF850279, BF885693, AA150971, AW629417, BF436279, R59541, AW129185, AW117254, BF850275, |
| | | | | | AA905745, H11046, BF877950, R60441, AV660512, AA361712, BF849362, BF850278, T52687, |
| | | | | | BE836494, AW583948, R59542, BF701717, AI674499, R50972, H71487, BF822478, H00394, H11134, |
| | | | | | AI370388, T34497, AA345282, N46032, BE702756, AW504892, AA533890, AA550718, BF849365, |
| | | | | | Z42201, AI095571, BE834137, AA360151, H71618, T52688, AW363353, BE770047, BF850276, |
| | | | | | AA555002, AW845124, BE933555, BF850265, H10415, Z38453, AA972682, AW580913, AA151080, |
| | | | | | AI687810, BE928875, R60991, H67823, BG004415, AW905113, AL035760, BF765364, BF086245, |
| | | | | | AA484675, R43800, BG179430, BG232027, BG256537, BE928869, BF922448, BF822727, D87446.1, |
| | | | | | AK025852.1, AC004072.1, AL133321.11, AC012067.2. |
| HHFEC39 | 103 | 609873 | 1-1288 | 15-1302 | BE178297, BE891680, BE178296, BE178286, BE177969, AI817262, BE178117, BE220165, AW025400, |
| | | | | | BE178101, AI377829, C06099, BE178000, BF940116, AI422898, AI089906, AA583355, AA971743, |
| | | | | | AA044947, AA044943, AI076496, AI299481, AI376081, AA427892, H98616, AA618566, AA532381, |
| | | | | | AI080656, AA884934, AW341785, AA730790, AI139706, AW139974, AA992454, N99650, AI094082, |
| | | | | | AA483691, AA482694, D62553, AA001089, AI205651, R80152, Z36959, AI692586, AW958955, F10610, |
| | | | | | AA516076, AI311975, AI313288, AI379372, AI348747, D62481, AI610907, AA513037, AI611925, |
| | | | | | AI784325, BF054671, D62330, BF054866, BF057878, AA149057, N71679, AA923038, AW969749, |
| | | | | | BF364372, R43511, D62106, D79281, N83844, T75442, BE168027, BE936283, F13013, BE043482, |
| | | | | | AI348789, D62153, BE168085, BE178420, BE177858, AL022726.1. |
| HHFFS40 | 104 | 824059 | 1-1802 | 15-1816 | BE877462, BF792909, BG260156, BG179110, BG112928, BF980559, BE544254, BG170563, BG107623, |
| | | | | | BF345994, AI763152, BE566242, BF346074, BF672687, AW299766, AI809063, AI658640, AW956747, |
| | | | | | BG256039, BG255904, AA630311, BE958056, BE873360, BE858485, AW072428, AW590087, |
| | | | | | AW996985, BE786419, AW963580, BF694200, BE565358, BF669441, AI521984, BF210963, BE564370, |
| | | | | | BG254405, AA554914, BE877693, BE872103, AI802337, BF242746, AA837003, BE674128, AA704063, |
| | | | | | AI697970, AI360303, AA676411, AI335019, BF940184, AA758569, AI341577, AI368085, AA976338, |
| | | | | | AA131990, BF594262, W52093, AI400190, AV655671, AA776953, AI720984, AI969963, BE538461, |
| | | | | | AI652576, AI924939, AI281274, AA610809, BF999637, BE540644, BF185031, BE564453, BF217183, |
| | | | | | AA599513, W60435, AI364496, AA622238, BE564859, AA173574, BE564942, AW181884, AA486013, |
| | | | | | AA452454, AI377701, H57481, AA775104, AA809861, BG110906, AI096469, R22549, AI948687, |
| | | | | | BG170098, AW467467, BF666042, AA136404, AI914432, AI952665, R72480, W19427, AI651051, |
| | | | | | R63250, BE768905, AA532466, BE564416, N92774, BE866100, AA487194, AA191014, AA436377, |
| | | | | | AA419582, N24149, AW072184, H99384, AW962785, AW731695, W52957, AA885982, AA136214, |
| | | | | | AI000422, AA885090, R73256, AA721779, W59973, AW273180, AI969516, AW996746, AA648637, |
| | | | | | AW572880, H26458, AA775095, R93450, AA721131, AI866701, BE929433, BF185491, AW129228, |
| | | | | | AW181995, R80927, AA629087, AV725677, AA486839, AA809868, R64668, R63022, BE247146, |
| | | | | | BF434557, AW381266, AW129216, D79097, BE925523, AA612598, R93403, AA370728, AA564131, |
| | | | | | AA330516, AA629088, R62968, AA564772, BE047336, R24143, BF808222, BF807139, AA876640, |
| | | | | | H58002, AA384569, AW261840, AW361037, AA099083, N40700, AI926874, N27938, AA513948, |
| | | | | | BF246298, AI499459, BF211955, AW857210, D60986, AA219670, AA247626, AA935365, H58409, |
| | | | | | AA829160, AA383046, BF960785, AA381919, R14311, BF748705, BE087099, N54068, BE769764, |
| | | | | | N56083, BE169239, AI583038, AI701882, AW193574, AI886791, AW080675, AA131685, BF954179, |
| | | | | | T10637, AI619990, AI866695, AI520974, AI446785, AA173533, AI953438, AA746406, BE540062, |
| | | | | | BF960843, BG014707, BE092961, AA604836, BE720113, AI358254, AI445976, AA190478, BG015664, |
| | | | | | BF760985, AI634805, AI254727, BF812938, BG110684, AI263312, BG165051, AI554218, BF871413, |
| | | | | | AI961589, AI915291, BG249582, BE047852, AW026882, BE965621, BF969126, AI637584, AW022699, |
| | | | | | AI566670, AI590423, AI274759, AW268067, AL514457, BE536058, AI568138, AI431909, BF811804, |
| | | | | | BF856017, AW104141, AL133078.1, AJ296152.1, AL133113.1, AL389939.1, AF090943.1, BC003682.1, |
| | | | | | AF262032.1, AK026741.1, AL137527.1, AL162083.1, AL122050.1, AB047904.1, AL512689.1, |
| | | | | | AL442082.1, AK024538.1, AL133557.1, AL136784.1, AF090900.1, AB060912.1, BC001967.1, |
| | | | | | AL442072.1, AK025339.1, AL080124.1, AL117585.1, AF146568.1, AL389982.1, AB055361.1, X53587.1, |
| | | | | | BC004529.1, X69819.1, BC004958.1, AK026542.1, BC008387.1, S61953.1, AF078844.1, S78214.1, |
| | | | | | BC008893.1, BC004533.1, AF090901.1, AL512718.1, AF090934.1, AK000432.1, AL122045.1, |
| | | | | | AF207829.1, AL136892.1, AK026045.1, AB055374.1, AB056420.1, AF090903.1, AK026504.1, |
| | | | | | AL136850.1, AK026526.1, AL050149.1, BC002733.1, AF106862.1, AF104032.1, AL137526.1, U58996.2, |
| | | | | | AB048954.1, AF125949.1, AL122110.1, AB055315.1, AK025967.1, BC002454.1, BC008417.1, |
| | | | | | AB055303.1, AB060887.1, AF125948.1, AF061573.2, AB048994.1, AB049900.1, AK026583.1, |
| | | | | | BC006164.1, AB060873.1, AL133665.1, AL512746.1, AL512719.1, AF057300.1, AF057299.1, |
| | | | | | AK026480.1, AL049382.1, BC006103.1, AL359596.1, AL080127.1, AL133016.1, AL353956.1, |
| | | | | | AL050393.1, AL133080.1, AK025391.1, AJ299431.1, AL096744.1, BC008280.1, AL136844.1, |
| | | | | | AB055352.1, AL136845.1, BC007021.1, AF230496.1, AB049892.1, BC008983.1, AL050116.1, |
| | | | | | AL359941.1, AB047887.1, AK025312.1, AL137705.1, AL162006.1, AL117460.1, AK025798.1, |
| | | | | | AB056809.1, AL110221.1, AL117394.1, BC003687.1, AK027213.1, AK026647.1, AL137538.1, |
| | | | | | AL080234.1, BC003683.1, AL136843.1, BC008899.1, AL136749.1, AL512684.1, AB063070.1, |
| | | | | | AL110196.1, AB048913.1, AL137459.1, AL137533.1, AL136789.1, AK026927.1, AB049758.1, |
| | | | | | AL050108.1, AL389935.1, AB049848.1, AL136799.1, BC007389.1, AK026959.1, AL117435.1, |
| | | | | | AL136928.1, AK026642.1, AB055366.1, AK027164.1, AK026630.1, AL122098.1, AK000391.1, |
| | | | | | AL133565.1, AK000614.1, BC007326.1, BC002798.1, AK025435.1, AK026506.1, BC006195.1, |
| | | | | | AK000718.1, BC008488.1, AF091084.1, AL137429.1, X82434.1, AK027096.1, AL137557.1, AL133558.1, |
| | | | | | AF217966.1, AL049314.1, AK026744.1, AB063046.1, AL137550.1, BC006472.1, AK025632.1, |
| | | | | | AK000753.1, AL359601.1, AL136768.1, BC006525.1, AL157431.1, AL512765.1, BC004556.1, |
| | | | | | AL080137.1, BC008365.1, AK024524.1, AL133067.1, AL390154.1, AF073483.1, AB062942.1, |
| | | | | | AB052191.1, AL049452.1, AL137560.1, AL133640.1, BC004362.1, AL359583.1, AK025084.1, |
| | | | | | AK025092.1, AK026551.1, AB048975.1, AL137548.1, BC002523.1, AL117457.1, AK026452.1, |
| | | | | | AL359618.1, AF352728.1, BC004368.1, AL136586.1, AF090896.1, AF162270.1, AK026600.1, |
| | | | | | AL122093.1, AL050138.1, AL110222.1, AL050015.1, AF097996.1, AL136615.1, BC005151.1, |
| | | | | | BC004530.1, AB060929.1, AB055368.1, Y14314.1, AK000323.1, AK025484.1, BC006133.1, |
| | | | | | AK027116.1, X72889.1, AF358829.1, AL133093.1, AB048953.1, AB047930.1, AL512754.1, AL137271.1, |
| | | | | | AL133075.1, AB048974.1, AL136864.1, AF321617.1, AY026527.1, AL137300.1, AL136787.1, |
| | | | | | AF061943.1, AK026865.1, AK026855.1, AK000618.1, AF218014.1, U39656.1, AB060863.1, |
| | | | | | AB060908.1, AJ242859.1, AB047801.1, AK025573.1, AB063077.1, AK000450.1, BC000348.1, |
| | | | | | AK026592.1, AL050146.1, AY034001.1, AF056191.1, U42766.1, AL133606.1. |
| HHGCS78 | 105 | 634605 | 1-561 | 15-575 | AA523300, AI962903, AA528118, BE858430, AW083553, BE858714, BE893836, AI190409, BE856210, |
| | | | | | AA769649, AI693556, AI366045, AI609800, AI337942, AW769813, AA613831, AI051792, BE874678, |
| | | | | | AI799232, AA682810, BE769324, AI810459, BF689177, BF593003, AA705587, BE896233, AI421592, |
| | | | | | AI421946, AI421527, BE731882, BE855826, AW817923, AI962361, R79580, AA581733, AI342639, |
| | | | | | AA649978, AI984920, AI624953, AA682704, AW802785, AL119863, BG163618, AL120853, BG029667, |
| | | | | | AW059828, BF814420, BF792961, AI358701, BF904265, BF338002, AL134259, AL042627, BF970658, |
| | | | | | AI815855, BG033723, BE393551, BG180996, BG026447, BG114104, AW827206, AV682264, |
| | | | | | AW411235, BG165051, BF970768, BF970652, BG030364, BF692486, AL038445, AW827103, |
| | | | | | AV708893, AV709314, AI334445, AV656478, AV684604, AV755884, AL041772, AL039086, BF752245, |
| | | | | | AV727029, AL043070, AI538764, BG181012, BG058150, BF854113, AV714274, BE876049, AV713662, |
| | | | | | AV756026, AV647773, AA100772, BG122481, BG105895, BF924882, BE895585, AV729189, |
| | | | | | AL048656, BF726207, BG113224, BG256880, AL041150, AI312428, BG112718, AV682791, BE966479, |
| | | | | | AI932794, BE966699, AW129271, AW827227, AW169653, AA508692, BF527014, BF971016, |
| | | | | | AA853213, AL046463, BG151388, BG105473, BE874133, BF969126, AL036980, AA853539, AL119791, |
| | | | | | AW301409, AV648263, BG260037, AI073952, BE785868, BE965067, AW238730, AW020095, |
| | | | | | BF343286, AL045266, AL513907, AI538342, AW827203, AI568114, BE885353, BF752836, AI309401, |
| | | | | | AL514627, AI784230, AW022682, BF970449, AI554343, BF032768, AI637584, BE885490, AW673679, |
| | | | | | AI284517, AI932915, BF921103, AI335426, AI348777, AW172723, AI791396, BF312128, AI922561, |
| | | | | | BE018711, AI344785, BE826053, AV681848, AA420758, BE964614, AI818574, AI671642, AW265004, |
| | | | | | AL037454, BG027082, AL038605, AW163823, BG029086, BG164558, BE172689, BF061283, |
| | | | | | AL036274, AV655645, AV647118, BG178689, AI340511, AV682466, AW161579, BE965724, |
| | | | | | BE779152, BE881005, BG112879, AA427700, AW079818, AI783504, AW827289, BE047852, |
| | | | | | BF339322, BG029053, BG168185, BE965330, AW238688, BF313411, BG260187, AV755484, |
| | | | | | BE047952, D50977, N99092, AL042400, AW410969, BG109140, BF672397, BE965192, AW834302, |
| | | | | | AI866573, AW806761, AL119836, BE837422, BE963838, AL037582, AL037602, BF798503, BF753013, |
| | | | | | R36271, AW268067, AL079963, AI335208, BG249582, BG179993, BF904193, AI491852, BF968027, |
| | | | | | AW302992, BE875407, BF038804, AI499986, AI630252, BE965481, AV715359, AW149092, AV743631, |
| | | | | | BE884296, AV733385, AV758087, BG107410, AI343059, AL079741, AL042628, BF910810, BF909758, |
| | | | | | AV703169, AW303089, BC005084.1, AF001552.1, AC006221.1, AC073042.7, AC015982.9, |
| | | | | | AC007458.13, AC083867.4, AP001711.1, AL139099.2, AL355382.6, AB019438.1, AL356800.3, |
| | | | | | AL389939.1, AL136893.1, AL137527.1, AK027114.1, AL138755.13, AL512761.1, AL162008.1, |
| | | | | | BC004951.1, AK024538.1, AL080137.1, AL050024.1, AK024588.1, AB060826.1, AK026506.1, |
| | | | | | AK025254.1, AL136586.1, AL080124.1, AL049430.1, AL359583.1, AF260566.1, AK000718.1, |
| | | | | | AK025391.1, BC006508.1, AK025375.1, AK026762.1, BC006201.1, AL136749.1, Y16645.1, |
| | | | | | AB055315.1, BC006440.1, AL050172.1, AK025092.1, U91329.1, AB060912.1, BC008417.1, |
| | | | | | AK026608.1, AK027113.1, AK000618.1, AL137526.1, AF090943.1, AL133640.1, AL359601.1, |
| | | | | | AF090900.1, AL133014.1, AL162083.1, AB052191.1, AK026583.1, AL136844.1, AK025491.1, |
| | | | | | AL136789.1, AL133565.1, BC005168.1, AK027200.1, AL133075.1, AF061943.1, AF162270.1, |
| | | | | | BC000090.1, AL136754.1, AL389935.1, BC007326.1, AL359596.1, AL117583.1, AL133557.1, |
| | | | | | AK025632.1, AB060852.1, BC008893.1, AF056191.1, BC008488.1, AL117578.1, AK027142.1, |
| | | | | | AL157482.1, AK026591.1, AL137476.1, AB048953.1, AK026526.1, AB060863.1, AK025414.1, |
| | | | | | S78214.1, AL136780.1, AK026600.1, BC006195.1. |
| HHPFP26 | 106 | 753269 | 1-2338 | 15-2352 | AW955777, AU127795, AV699578, BE621969, AI346748, AI281940, BE005208, AA524503, AA916758, |
| | | | | | AW449058, BE467769, BE464881, AU151450, BF514115, BF000038, AI634820, AI523530, AW511445, |
| | | | | | AI862532, AI949670, AW970765, AA608828, AI857780, BF571416, AW295536, AI377542, AI093088, |
| | | | | | AA287191, AI151251, AW614038, AA287100, AV699485, AA448285, AW770401, BF737449, |
| | | | | | AA878147, AW337811, AW593438, AI094118, AI679170, AU129292, AA824653, AA126509, |
| | | | | | AI335819, W17300, AA724997, AI926067, BF445215, N89777, AI376326, BF898929, AA693394, |
| | | | | | H24089, W20017, AA780601, AI262511, H95444, AW023522, BF330087, AW605999, AA651916, |
| | | | | | AA708871, BF968034, AW380437, H95445, R43926, C03566, AW452210, R18816, AA334867, R84237, |
| | | | | | N91375, AW020824, H22911, W24107, D62482, N91929, D62471, AW630974, BF946583, BE708592, |
| | | | | | BF195756, AA658355, AI962246, AA282731, BE967075, AL136581.1, AK022861.1, AK023008.1, |
| | | | | | AL163853.4, AL157911.4. |
| HHPFU28 | 107 | 824573 | 1-1824 | 15-1838 | BF035537, AW069711, BF672434, BE883242, AI656112, W31606, W07084, AI272643, AW170657, |
| | | | | | AA166968, N77917, AW513307, W15523, C75056, AA167046, AA228908, AA228890, AA856550, |
| | | | | | BE540895, AA856549, AA883954, AI636144, F16318, AW275622, F15813, AA629229, AW979328, |
| | | | | | BE825903, AA683173, AW954221, AV725561, AV703624, AW962970, AV646649, AB002332.1. |
| HHSBI06 | 108 | 639097 | 1-1035 | 15-1049 | BE676485, N59786, AI920783, AA088744, AA779158, BF438300, BE645431, AI915060, AF271897.1, |
| | | | | | AF285442.1, AF051651.1. |
| HHSBI65 | 109 | 801910 | 1-1430 | 15-1444 | BE796723, BE541989, BF057278, BF063128, AI990159, AW003665, AW300907, AI738928, AW246641, |
| | | | | | AW594304, AI521438, AI394059, AA994208, AI130030, AW083104, AA811418, AA974513, |
| | | | | | AA761013, AA765652, AI583684, AI748894, R67183, AA483531, AA836959, AW236517, H29649, |
| | | | | | BF115987, AA747573, AA434041, AW845318, T75095, H29565, BE742632, BE386466, AW196291, |
| | | | | | AI608701, F10461, BE385745, AI474368, BE502390, BF115569, BG236177, BG230771, AI825041, |
| | | | | | R54830, AW117865, R38529, AA370939, R43648, AA215393, BE552433, AV749164, BF112242, |
| | | | | | F13491, BF058839, AI087969, AA215394, AI475583, AW450912, T25126, AA434109, AK026541.1, |
| | | | | | AF174592.1. |
| HISAT67 | 110 | 843549 | 1-2140 | 15-2154 | AL519801, AL520029, AL521674, AL515614, AL519807, AL519808, AL526569, AL519802, AL520030, |
| | | | | | AL535434, AL521675, AL515615, BE798433, BE797403, AL528668, AU130192, BE745046, AL535433, |
| | | | | | AW177988, AW177985, BF526765, BE741361, BE546284, BE882894, BE745446, AI924136, AL524747, |
| | | | | | BE902340, BF796576, BF314225, BE622034, BF237909, BE257929, BF306879, BE617643, BE867904, |
| | | | | | AW374088, BE617000, BF688830, BF345850, BF688351, AW960985, AA252420, BF817742, BE622673, |
| | | | | | BE535410, AI183729, AW438568, AA769320, BF816143, BF541658, AI274790, AA058936, BF530326, |
| | | | | | BF345429, BE568171, BF315183, AA827859, AI150987, BG104230, AW192463, BE383533, AW769453, |
| | | | | | BF195400, BG253720, AA699494, AI298600, BE395450, AA411591, AA976201, BF246062, AA565575, |
| | | | | | AI811947, BE838606, AU155423, AA425979, AA548944, AI096361, AA151497, AW087834, AI361378, |
| | | | | | AI085749, AW027881, AA426271, AA613326, AA687138, N81134, AA411464, BG222316, N35214, |
| | | | | | AI299858, AA394068, AA088263, AI150914, AA889019, AA252504, H83961, AL045552, AI689551, |
| | | | | | BE819030, AI089337, BE565997, AI803858, AA151552, AU134447, BF347858, AW247185, R40419, |
| | | | | | AA351639, H58370, AI362586, AI631415, AU157064, AW406063, R69998, BF132861, AA292350, |
| | | | | | H06495, R13035, AI858744, AW392518, AW517903, AI539838, BG169732, AA564447, AI280222, |
| | | | | | AU137181, H58371, AA355297, H11618, R74275, AW606537, BF825915, AA478985, BF914457, |
| | | | | | BF247267, N90293, AA324676, BF913845, W04666, BF695749, R39793, AI932851, AA629936, |
| | | | | | AA300144, AW731758, AI886965, AA477921, AA580861, AA632377, AW957318, C02190, AW089325, |
| | | | | | AW402477, R37205, R31157, AI633079, R12741, T34011, BF527821, BE819060, BF761740, AW139230, |
| | | | | | AI369955, AI579955, BF244267, R74188, R27176, Z17827, BF874647, AA877093, BE819032, |
| | | | | | AA582577, BF435602, F32545, N75291, N99252, T25048, AA467840, AW392536, AA467896, |
| | | | | | AW968190, AI085046, AA151496, H83960, AA468217, AW607357, AW631248, AW051088, AI360195, |
| | | | | | BF792469, AI610402, AI249946, BF753056, BE069307, AA514684, BE909285, AL042544, AI921167, |
| | | | | | AI002285, AI815855, AW163834, AA888196, BG029053, BE047833, AI698391, BF927081, AI923989, |
| | | | | | AV756026, AW118508, AI887775, BE965481, BG121959, BF813196, AV756182, BG029667, AI582932, |
| | | | | | AW059828, AL037454, BF814761, AV681848, BF726183, AA830821, T99953, BE877142, AW009306, |
| | | | | | AW161098, AA420722, AI452857, BE245461, AI345745, BF969807, BF918076, BF921291, AV735098, |
| | | | | | BF529088, BE536263, AV708119, BF529870, AV727839, BE964614, AI500061, AI696626, AI633125, |
| | | | | | BF885000, AI915291, AF203687.1, BC002765.1, AF226684.1, AK023064.1, BC008658.1, AF227166.1, |
| | | | | | AK023405.1, AK001976.1, AF125949.1, AL133560.1, AL359618.1, AL110225.1, AF090901.1, |
| | | | | | BC008488.1, AB049892.1, AB047887.1, X86693.1, BC003548.1, AL133080.1, AL110221.1, AF091084.1, |
| | | | | | BC008387.1, AB051158.1, AK000323.1, BC004310.1, AF090903.1, BC006201.1, AL133606.1, |
| | | | | | BC004297.1, BC002975.1, AY033290.1, AL512689.1, AK025484.1, AK026462.1, AK026528.1, |
| | | | | | AB060863.1, AK026480.1, X72889.1, AK026542.1, AL512750.1, AB063070.1, AB056809.1, |
| | | | | | AK026504.1, AF097996.1, AL050024.1, AL122050.1, AK026583.1, AL049314.1, AK000083.1, |
| | | | | | AL137533.1, AL117394.1, AK024538.1, AL133640.1, AK027142.1, BC004556.1, AF106862.1, |
| | | | | | AL049464.1, AL137560.1, AK026744.1, AL137538.1, AB048975.1, AK000486.1, AL512733.1, |
| | | | | | Y16645.1, AK025967.1, AK027160.1, AL117435.1, AL137550.1, BC006807.1, BC004908.1, |
| | | | | | AL122110.1, AB060826.1, U39656.1, AL133081.1, AB055366.1, BC004958.1, AK026927.1, |
| | | | | | AL050146.1, AL137660.1, AF078844.1, AK027113.1, AK027096.1, AK025092.1, AF217982.1, |
| | | | | | AL136792.1, AK026434.1, AL137480.1, S78214.1, AK000445.1, BC001967.1, AB060832.1, BC001045.1, |
| | | | | | AL117585.1, AK026534.1, AK000614.1, AL137283.1, BC008899.1, AF069506.1, AK026959.1, |
| | | | | | AB060908.1, BC003682.1, S77771.1, AK000291.1, BC003684.1, AL096744.1, AL050393.1, U42766.1, |
| | | | | | AL133031.1, AL136805.1, AC068715.5, AK026647.1, AB055361.1, AK026353.1, AL050277.1, |
| | | | | | AL049430.1, AK026164.1, AB062938.1, AK027081.1, AF090886.1, AK025772.1, AL122093.1, |
| | | | | | AB052191.1, AL122121.1, AC025226.4, AL136799.1, AB019565.1, AL137429.1, X82434.1, AF090934.1, |
| | | | | | AF090943.1, AL137557.1, AB048953.1, AF277181.1, AL512684.1, BC008284.1, AL136786.1, |
| | | | | | AB047615.1, AK026642.1, AK025339.1, AL137271.1, BC005168.1, BC008844.1, AK025209.1, |
| | | | | | AB056420.1, AK026784.1, AK027200.1, BC006525.1, AL117457.1, BC009355.1, AF260566.1, |
| | | | | | AL157431.1, AL512765.1, AF146568.1, AL136845.1, AL133113.1, AL137527.1, AL133565.1, |
| | | | | | AL136784.1, AF232009.1, S61953.1, AL035458.35, BC007326.1, BC001774.1, AL136640.1, |
| | | | | | BC007548.1, AK025414.1, AK027204.1, AK025491.1, AL359601.1, AL133016.1, AK025708.1, |
| | | | | | BC004119.1, BC009113.1, AL442072.1, AL353940.1, AL353956.1, BC008004.1, AB055315.1, |
| | | | | | AL137555.1, AJ012755.1, X98834.1, AX026608.1, AL137300.1, AK000652.1, BC002978.1, AL162003.1, |
| | | | | | BC006164.1, AB048954.1, AB060916.1, AK025632.1, AL133077.1, AF111847.1, AJ010277.1, |
| | | | | | AL049466.1, AL137548.1, AK026526.1, AC019176.4, BC009010.1, AF225424.1, AK024588.1, |
| | | | | | AL512754.1, AB050534.1, AL353957.1, BC004951.1, AF177336.1, AL359596.1, AL136844.1, |
| | | | | | AB063046.1, AB048974.1, AJ242859.1, AB060857.1, AB060852.1, Y14314.1, AL050116.1, AL050108.1, |
| | | | | | AL136825.1, AL137521.1, AL122123.1, AF230496.1, AK026506.1, AK000212.1, AK025383.1, |
| | | | | | AC069298.8, AL136790.1, AL162002.1, AF026816.2, AK027114.1, AL389939.1, BC003687.1, |
| | | | | | BC002647.1, AK026741.1, AF218034.1, AL512746.1, AB060825.1, AL136843.1, BC008719.1, |
| | | | | | AB055303.1, AB060887.1, AF090900.1, AK026452.1, AB049758.1, AL442082.1, AL133047.1, |
| | | | | | AK026551.1, AF106934.1, BC004191.1, AL389982.1, AC005876.3. |
| HISBA38 | 111 | 561711 | 1-1044 | 15-1058 | AA465219, AW968392, AA465303, AL042753, AV759518, BF868994, BG029528, BF725761, AI963720, |
| | | | | | AL037683, AA129746, AL041924, AV682003, AV763460, AL138455, AL079734, AV757289, AI282253, |
| | | | | | AA669155, BF827410, BE252421, AL042853, AV760391, AA760655, AL079447, AV760389, |
| | | | | | AV762395, AA551105, AI049643, BG164617, AL137020.13, AC006581.16, AL122023.3, AL022322.1, |
| | | | | | AC007436.1, AC004706.1, AC068722.6, AB045357.1, AL035552.9, AP002532.1, AC022324.5, |
| | | | | | AL121869.19, AL109752.13, AC020559.4, AC008901.5, AC006017.2, AL354943.9, AC073897.6, |
| | | | | | AL353752.6, AL121823.12, AC005798.10, AF117829.1, AC018719.4, AL138832.10, AC010722.2, |
| | | | | | AL358612.8, AL163206.2, AL138879.10, AC090710.16, AC005250.1, AL365222.24, AL163213.2, |
| | | | | | AL133517.11, AP000493.1, AC005539.1, AL139150.12, AC003029.2, AC008766.4, AC009316.3, |
| | | | | | AC005002.2, AL133244.1, AL137818.3, AL031433.4, AC010081.4, Z97985.16, Z94722.1, AL590611.7, |
| | | | | | AC025253.20, AL137918.4, AL121652.2, AC073881.3, AC004998.2, AL355834.4, AL450345.6, |
| | | | | | AL163201.2, AL137840.12, AL049835.3, AL355143.17, AC006466.3, AC002457.1, AL132827.2, |
| | | | | | AC090957.1, AL049697.9, AL109939.13, AL133373.5, AC068723.5, Z98754.1, AL356278.8, |
| | | | | | AL355535.14, AC087315.21, AF212831.2, AL023876.2, AL359234.4, AL390205.17, AC007683.5, |
| | | | | | AC010140.3, AP002448.3, AC034148.9, AC027129.5, AL357272.10, AL023279.1, AC012372.4, |
| | | | | | AL022152.1, AC006287.1, AC006313.1, AC019155.4. |
| HJBCU75 | 112 | 638329 | 1-995 | 15-1009 | AA789332, AI925535, AW469963, AI925543, AA312696, BF732842, BE670545, AI685010, AW962841, |
| | | | | | AI690167, AA570056, AA470465, AW969303, AW770920, AI634463, T95424, T95333, AW080646, |
| | | | | | AW003925, BE617765, AI468303, AA311608, AW268987, BE669814, AA356443, BF690832, |
| | | | | | AW753521, AA682679, BE962309. |
| HJMAA03 | 113 | 824062 | 1-651 | 15-665 | AW304711, BE677684, AW959142, AI290480, BF090788, AW571568, AI092037, N55492, BF090740, |
| | | | | | W05027, BE714108, N76979, AA361785, N70383, C02489, BF987194, BF087284, BF087325, |
| | | | | | AA732983, AI348883, AV682863, AW305097, AV691827, AL038473, AW265139, AL442128.7, |
| | | | | | L44140.1, AC004867.5, AC004166.12, AC009996.7, AL135905.6, AP000087.1, AL158158.14, |
| | | | | | AC018809.4, AF190464.1, AL391839.9, AL035684.25, AC007172.6, AP001694.1, AC009753.5, |
| | | | | | AC007383.4, AC026431.3, AP001623.1, AC002558.1, AC068533.7, AL133243.1, AL161670.4, U52112.1, |
| | | | | | AL135839.15, AC084864.2, AC005180.2, AL359265.8, AC020716.3, AF287262.1, AC024082.6, |
| | | | | | AC002551.1, AC010267.6, AL160471.5, AC004883.2, AC007225.2, AL359091.10, AC020663.1, |
| | | | | | AP001710.1, AL121972.17, AP001746.1, AC006111.3, AC079684.16, AL035086.12, AL031670.6, |
| | | | | | AL135744.4, AL391827.18, AP002515.3, AC005098.2, AC018639.8, AC087071.2, AC002565.1, |
| | | | | | AL354932.26, AL160269.14, AC087244.17, AC004491.1, AC018751.30, AC083884.6, AC007308.13, |
| | | | | | AC083868.2, AL031587.3, AL035458.35, AC004878.2, AC004832.3, AC002316.1, AC003950.1, |
| | | | | | AC006486.1. |
| HJPCH08 | 114 | 840365 | 1-865 | 15-879 | AI655312, AW975835, AI653243, BF059498, AA731744, AW590208, AU154664, AI671173, AI669341, |
| | | | | | BF970492, AA704870, AI654412, AI889336, BE966747, AI739117, AI168283, AA781842, AI203090, |
| | | | | | AW383906, AW103151, AW589549, AW074368, AA600977, AI014854, AA179845, BE775064, |
| | | | | | BE090424, AA630744, AV714379, AW857113, AW075406, BF982048, AA736497, AA789069, |
| | | | | | AW770138, BE696241, BE622755, AW074752, BE928343, BF762364, AI904387, BE539952, AA471345, |
| | | | | | AF153329.1, AF070672.1, AK024804.1, AK025790.1, AC004826.3. |
| HKABU43 | 115 | 838573 | 1-1905 | 15-1919 | BG035820, BG163860, BE779136, BG032640, BE546300, BG251357, AI890545, BF798002, AW957817, AW957894, BG164329, BE897914, |
| | | | | | AI064868, AW439699, BE868957, AI628884, AI538687, BG117638, |
| | | | | | BE075026, BE075028, BE877956, AI890859, AW241402, BF057808, AI962251, BE672376, BG254061, |
| | | | | | AI655998, W76094, AW593934, AW206368, AW070698, BF592891, BF855200, AI913939, AW242743, |
| | | | | | BE892303, W72889, AW510467, BE502137, AW852201, AW468485, AW242300, BE073158, BE073145, |
| | | | | | AI370901, AA076346, BE075023, BF761114, AI269861, BE927867, Z19251, BF229820, AA912859, |
| | | | | | AI962408, AA449269, BE869764, AA449405, AI125399, AI766912, BG230901, BF761369, R82858, |
| | | | | | BE927921, AI651447, AW852191, AW874171, AA313460, BE268347, AI440431, AW603030, |
| | | | | | AA322088, BE503487, AA373986, BE927954, BE677880, BE816387, BF679224, BE816422, BE927027, |
| | | | | | BF514420, BE297845, BE390905, BE535739, AV762904, AA564527, H29863, BE743929, AA369997, |
| | | | | | AA370398, AW957044, AA852197, AB018262.1, BC003633.1. |
| HKIXC44 | 116 | 716213 | 1-774 | 15-788 | AL523457, AL528447, AL523456, AI829517, AW149466, AI583221, BF939526, AI421289, BF062158, |
| | | | | | BF939874, AI279154, AI418427, AI703444, AW131506, BF571573, AI936825, AI089933, AI361161, |
| | | | | | AW014685, AI536856, BF476644, BE047689, AI369406, AW021011, AI457455, AI302724, AI354478, |
| | | | | | R61374, AI079090, AA120924, AI362672, AW118437, AW178756, BF447506, H45647, H18233, |
| | | | | | AW023679, H18271, Z25058, AI361962, AA974813, AW079462, AW089212, H41457, AW970953, |
| | | | | | AW873883, BE939242, BE151736, AA664017, AA120923, H40869, BE762902, AF176422.1, |
| | | | | | BC001873.1, AF232239.1, AF151522.1. |
| HKTAB41 | 117 | 695732 | 1-783 | 15-797 | AW269751, BE046932, AI962247, AI652884, AI336991, BF592937, AI632408, BG260037, AI611738, |
| | | | | | AI784252, AI633419, AI863382, BF343172, AW163834, AI927755, AI500061, AI783997, BG256090, |
| | | | | | AI470651, AI571909, AI829327, BE535358, AW162189, BF342070, AL036980, BF828567, BE544111, |
| | | | | | AI886415, BE965031, BF792961, AI590120, AI918655, AI569583, AI288285, AI554821, AW059713, |
| | | | | | AW148716, AI648684, AL079963, BE047852, AW268122, BE048071, AI569309, AI698401, BE910373, |
| | | | | | AW148970, BE047737, AW089664, AI784230, BE538997, H89138, AW827289, AI916419, BE895585, |
| | | | | | AI468872, AI358701, AW105601, AA427700, AI886192, AL041150, AI269862, AL514129, AI345347, |
| | | | | | AL037582, AL037602, AW131308, AI863321, AW149227, BF727034, AI343059, AI251221, AI349933, |
| | | | | | BG035511, AI345608, N80094, BG166654, AI922901, AI345253, AW827227, BF527014, BG029053, |
| | | | | | AI500662, AI348854, AI345471, BG179993, BE965355, AI869377, BG115626, AI679179, AW827106, |
| | | | | | BF970768, AI590686, AI471361, AI873644, BG031539, AI174394, AI933589, AI635067, AI565128, |
| | | | | | AV702623, AL036403, AA908294, BG250190, BE620444, BE964812, AI921248, AV743962, |
| | | | | | AW169604, AL047675, AI282679, BF856017, AI886753, AL121286, BF794018, BE536058, AI801325, |
| | | | | | BF854113, BG109270, BG165979, AI431424, AI445992, AW029275, AI699011, AI874166, AL036638, |
| | | | | | AW088903, BG031664, BG120816, BG168696, AL514691, AW268302, BE907440, AW072719, |
| | | | | | AI589267, BF816037, AI611348, AW059828, BE965724, AW827103, AV710608, BF920893, BF814527, |
| | | | | | AW118496, AI499986, AW117919, AI826225, AI811785, BF816042, AI681985, AA225339, AW054931, |
| | | | | | AW196299, AI619502, AI680162, AI478123, AI677796, AI802542, AI352497, AI439717, AI288305, |
| | | | | | BF672397, AI284131, AW118518, AW023590, AI499285, AI863411, AW983829, AW050578, |
| | | | | | AW148356, BG249582, AI570807, AI306705, AI824576, AW169653, AW026882, AI470293, AI923370, |
| | | | | | BG058150, AI312428, AI159837, AI613436, BF812960, BF812938, AI950664, AI537960, BG164558, |
| | | | | | AI582932, AV727776, BF970652, AL042628, AI520809, AI637748, AV746964, BE789764, AI537303, |
| | | | | | BG027280, AI521560, AW089350, AI497733, AI433157, AI702073, BF089711, AI569975, BE047732, |
| | | | | | AW188554, AW183130, AI567582, BF812961, AI500523, AL037454, AI683492, BE874133, AV699198, |
| | | | | | AW117746, BG179633, AI683173, AI445165, AI963216, AI863082, AW102761, AI564749, AW051088, |
| | | | | | AI282326, BF814420, AW172723, AI868204, AI633125, AI888522, BF680133, AI887247, AI698391, |
| | | | | | BG122481, AI869367, AI612885, AI783504, AL036214, AC006451.5, AC007056.4, AC006013.3, |
| | | | | | AL445528.16, AP000344.1, AC004057.1, AF131216.1, AC007597.3, AC004837.1, AK026504.1, |
| | | | | | AC006501.5, AL050092.1, AP001731.1, AL389939.1, AL133075.1, Y16645.1, AK026533.1, AL583915.1, |
| | | | | | Z99495.1, AK026462.1, BC005890.1, AB063070.1, AL512750.1, AK024538.1, AL389982.1, AL12121.1, |
| | | | | | AL122123.1, AL121916.14, AL157431.1, AL390154.1, AF353396.1, AL137550.1, U39656.1, |
| | | | | | BC005168.1, AL136805.1, AF078844.1, AL080124.1, AK025209.1, AL110221.1, AL512765.1, |
| | | | | | AL117435.1, AK026408.1, AL122049.1, AB055374.1, AB047801.1, AK027868.1, AL080159.1, |
| | | | | | AB060916.1, AK027160.1, AF090903.1, AK027164.1, AK026464.1, AL049452.1, AK000432.1, |
| | | | | | BC001045.1, AK000486.1, AK025798.1, AB063079.1, AL136864.1, BC008387.1, AL162008.1, |
| | | | | | AK027096.1, BC002839.1, AK000137.1, AF162270.1, AB055303.1, AL359601.1, AB060887.1, |
| | | | | | Y14314.1, AL157482.1, AK026593.1, AF146568.1, BC008365.1, AL117432.1, AL137292.1, AL136749.1, |
| | | | | | AL137476.1, AL512718.1. |
| HLDBG17 | 118 | 855953 | 1-638 | 15-652 | BF002740, AW015349, AW172836, N51711, BE619681, AA620652, AA639043, AA447223, AA648349, |
| | | | | | AL048032, D62490, BE930019, AI973069, AI370576, AI889304, BF885813, AW975098, BF377527, |
| | | | | | BF885812, AI370615, Z41325, BF885814, R39086, AA658236, BE708124, AF131793.1. |
| HLDQU79 | 119 | 740755 | 1-1474 | 15-1488 | BG256275, BE867624, BE907396, BE855521, BF034422, BF530803, AW959247, BE782005, AI126689, |
| | | | | | AL121446, AA757065, AW630129, BF768037, BE746763, AA206154, AA460401, AI276320, BF998689, |
| | | | | | AA295243, BE242732, BG035901, AL040350, BE242810, T86168, BF983867, W05088, AA347337, |
| | | | | | BG252443, AI133502, AF064093.1. |
| HLHAP05 | 120 | 638476 | 1-1828 | 15-1842 | AW963016, AW979070, AA554869, AA828610, C14699, AA359181, C15123, AI380617, AW303196, |
| | | | | | AW301350, AW023111, AW974639, AI798545, AA359849, AV711430, BE252421, BG222813, |
| | | | | | BF974349, BG236628, BF804385, AI246796, BF918155, AV711465, BE180633, AW327868, BE301584, |
| | | | | | BF879045, BF965775, AA574442, AI253987, AW410784, C15415, BF761328, AI357823, BE676019, |
| | | | | | AV738383, AW270258, AW167330, AA610509, AI188390, BG029224, AV759972, AL117335.26, |
| | | | | | AL109976.23, AC009087.4, AL136081.10, AL021579.1, AF064861.1, AC079684.16, AL163279.2, |
| | | | | | AL136000.4, AC006014.2, AC005067.2, AL049839.3, AL035587.5, AC008569.6, AL513131.1, U89335.1, |
| | | | | | AC008771.4, AC005052.2, AC073136.6, AC003104.1, AL117336.22, AL031730.1, AC022515.5, |
| | | | | | AC009570.13, AC010328.4, AL049776.3, AL135749.3, Z85986.1, AC002369.1, AC007201.1, L44140.1, |
| | | | | | AL133545.10, AC011450.4, AC013726.7, AL034405.16, Z84469.1, AL139099.2, AL136305.14, |
| | | | | | AC020908.6, AC005291.1, AC008622.5, AC004647.1, AL158040.13, AC018636.4, AC008625.5, |
| | | | | | AC005488.2, AL050307.13, AC083863.2, AC007969.3, AC016602.6, AC002316.1, AC010126.3, |
| | | | | | AL359235.3, AC006480.3, AC004819.1, AP001748.1, AC006157.2, AL121969.12, AC003093.1, |
| | | | | | AC011236.8, AC009362.8, AC018648.5, AP000924.6, AC005261.1, AC004520.1, AP001705.1, |
| | | | | | AC008280.4, U47924.1, AC018695.6, AC004000.1, AL049646.19, AC002425.1, AC011005.7, |
| | | | | | AL359711.18, Z85987.13, AL132659.10, AC004953.1, AC006329.5, AC016594.6, AC011465.4, |
| | | | | | AC073321.4, AP000240.1, AC007308.13, U95742.1, Z97056.1, AL049761.11, AL391241.21, |
| | | | | | AP002852.3, AC025679.4, AP000424.3, AP000096.1, AL031311.1, AL034420.16, AC005098.2, |
| | | | | | AC009086.5, AC026464.6, AC002350.1, U91318.1, AC007664.12, AL020995.14, AL354813.31, |
| | | | | | AC083866.2, AC004797.1, AC004791.1, AC002504.1, AC005722.1, AC022211.5, AC009068.10, |
| | | | | | AC022405.5, AC005932.1, AC025457.5, AF318296.1, AC005077.5, AL161670.4, AC004815.2, |
| | | | | | AC027129.5, AC012170.6, AC011894.3, AL121586.31, AF287262.1, AC006530.4, AC022415.5, |
| | | | | | AL162293.22, AL117352.12, AL121891.22, AC007216.2, AL034451.26, AC009244.24, Z97985.16, |
| | | | | | AC006006.2, AC011247.10, AL132713.11, AL133246.2, AL135818.3, AJ400877.1, AC004098.1, |
| | | | | | AC004922.2, AP001670.1, AC010618.7, AC009137.6, AC011551.3, AC002470.17, AC011737.10, |
| | | | | | AL353668.18, AC079361.17, AC007421.12, AC005520.2, AC005082.3, AC005099.1, AL035659.22, |
| | | | | | AL445928.8, AL136300.22, AF243527.1, AC005940.3, AC019205.4, AC024561.4, AC004655.1, |
| | | | | | AC005562.1, AC004656.1, AC072061.8, AC016995.4, AC015853.8, AC004222.1, AC005531.1, |
| | | | | | AL354816.5, AL157372.18, AC006483.3, AF168787.1, AC012151.13, AL109935.39, AC006211.1, |
| | | | | | AC004128.1, AL035088.1, AC005952.1, AC011453.4, AC004648.1, AL133228.18, AC010913.9, |
| | | | | | AC007371.16, AC007030.3, AL121972.17, Z95152.1, AC000134.14, AC034198.6, AC007690.11, |
| | | | | | AL117382.28, AP001630.1, AL162430.15, AC006452.4, AL589723.7, AL009181.1, AL121992.24, |
| | | | | | AL132768.15, AL445490.6, AC008072.3, AC007220.4, AL132640.4, AP000210.1, AP000132.1, |
| | | | | | AC068724.7, AC004702.1, AL359792.3, AC004216.1, AC006509.15, AL049636.22, AC011816.17, |
| | | | | | AC008397.7, AC020916.7, AC010326.6, AL162464.5, AC005378.2, AC069262.24, AL031905.7, |
| | | | | | AF288742.1. |
| HLHBS54 | 121 | 837503 | 1-4024 | 15-4038 | BE793391, BF037440, AW411431, AW411432, AV723798, AL118640, AA421652, BG028281, |
| | | | | | AI141739, BE296303, BF980969, AA569352, BE729319, BE619348, AI093588, AI056382, AI751145, |
| | | | | | AI830945, AW959700, BE746540, AI978744, AA203147, AW385187, N36100, AI131280, BF058207, |
| | | | | | AW385194, AW964924, BF996174, BE895496, AI697330, BF855572, BE298675, AA572769, AI431821, |
| | | | | | AI306411, AA129607, BE910210, AI270378, AW675183, AA284276, AI697452, BF943592, AA613934, |
| | | | | | AA459541, BF205506, AW580438, AI591380, BF943589, BE295387, AI830868, AI521845, BE783079, |
| | | | | | AA613025, W79827, AI658493, AA658343, BF943544, AI658483, AI640733, AA453151, AA171976, |
| | | | | | AA180412, AI066480, AA179828, BF858120, BF943550, AA464519, AI074418, AI827350, AI818147, |
| | | | | | AI079578, AA180376, AA970308, AA569579, AI038151, W78160, W07621, R53199, AI431691, |
| | | | | | AA180411, AI266113, AW390238, N24863, AA227163, AA612938, AA641053, AA172124, N90891, |
| | | | | | N31800, AA464520, BF931838, R54307, AA459310, H44552, AA084338, R51916, W46679, BE616851, |
| | | | | | R78942, BF943548, AA421653, BE615849, AA347837, AV750071, F34347, AI423886, BE008604, |
| | | | | | BF943546, H13879, BF760832, AW673014, H44340, BG057969, AW517794, AA326083, W46632, |
| | | | | | AI202612, AI342718, AA243222, AW080737, AI421139, AA218676, BF512353, T46960, AA613817, |
| | | | | | R62938, N27571, AI033297, AW290974, AI081667, W47438, T46961, R22209, AA515732, H53863, |
| | | | | | AI184234, BF871105, N80888, H53491, AA359923, R62937, BF987671, W20465, BF758781, |
| | | | | | AW340070, AW085155, BG002164, AW235210, AI086770, BE550493, BE905433, AA928979, |
| | | | | | AW440085, AA377667, AA844367, AI146951, W38558, H44339, AI682869, AA004374, R71722, |
| | | | | | AA366837, AW081995, AA226808, AI751146, AI733856, BG009211, BF805088, AA080904, R22263, |
| | | | | | BG222608, AW979191, BE315483, AW069227, AA833875, AA833896, AI634187, N57681, BF845136, |
| | | | | | AA315361, W32717, BG000735, AI923052, AI457313, AV762633, BG056362, AW805539, AU144540, |
| | | | | | AW265688, AU147162, AV695478, BE208115, AI890324, BE178489, BE245576, AA410788, |
| | | | | | AW970987, BE139139, AI250552, AW872736, AI284543, AA602906, AA441810, AA904211, AI884522, |
| | | | | | AW674631, BF965775, AI254770, AV759632, AW068596, AL524675, AI251284, BF916784, AI251034, |
| | | | | | AI251203, BF795891, AI583142, H73550, AW978041, AA916430, AW067788, BE138387, BG010084, |
| | | | | | AA669155, AW969667, AW963444, AI817230, T74524, AL020996.5, AL110205.1, AF166125.1, |
| | | | | | AC005052.2, AL034405.16, AC008403.6, AL049831.2, AL109804.41, AL359092.14, AC023490.5, |
| | | | | | AL024474.1, AF243527.1, AP000557.2, AC007664.12, AC007956.5, U91323.1, AL031295.1, U91326.1, |
| | | | | | AL133453.3, AC004150.8, AC010553.6, AL353807.18, AL034548.25, AL096840.25, AL121992.24, |
| | | | | | AC010679.6, AC026464.6, AC022088.5, AC068715.5, AC007292.1, AC002544.1, AC010149.8, |
| | | | | | AL138878.10, AL449363.12, AL138724.12, AC002316.1, AL121972.17, AF196972.1, AL354808.24, |
| | | | | | AL031602.14, AC008440.8, AC007536.9, AC008857.5, AL035587.5, AC022083.6, AE000658.1, |
| | | | | | AL050318.13, AC007193.1, AL121586.31, AC011464.5, AC008622.5, AC020904.6, AC005522.2, |
| | | | | | AC004983.2, AP001718.1, AC009131.6, AC008784.6, AC013355.7, AC004846.2, AC004699.1, |
| | | | | | AL355392.7, AL035407.15, AL391827.18, AC002472.6, AL136168.4, AC004089.25, AL034549.19, |
| | | | | | AC009144.5, AL031597.7, AC006251.3, AP000117.1, AC002301.1, AL031228.1, AC012634.7, |
| | | | | | Z82214.23, AC005751.1, AL355916.2, AL136979.16, AC016596.5, AC019205.4, AC005777.1, |
| | | | | | AL121890.34, AC004883.2, AC011450.4, AC002477.1, AL031311.1, AL008635.1, AL121897.32, |
| | | | | | AF001548.1, AF196969.1, AC037475.9, AC004854.2, AC004882.2, AP001705.1, AC011471.6, |
| | | | | | AC008064.2, AL049760.26, AC008755.6, AL035405.10, AC007011.1, AP000556.2, AC005399.19, |
| | | | | | AP000100.1, AP000261.1, AC068799.14, AL121774.5, AL137852.15, AL031283.26, AP000505.1, |
| | | | | | AP000088.1, AL033529.25, AC007308.13, AC006023.2, AC018719.4, AL136126.34, AL160269.14, |
| | | | | | AC006994.4, AC004020.1, AC005300.10, AL445649.15, AJ300188.1, U91321.1, AC009756.9, U53331.1, |
| | | | | | AC020913.6, AL137229.4, AC004263.1, AL445646.11, AC005209.1, AC005274.1, AL034420.16, |
| | | | | | AL022320.23, AC017004.4, AP001609.1, AP001610.1, U52111.2, AP000193.1, AC008895.7, |
| | | | | | AC004826.3, AC010530.7, AC000360.35, AP000035.1, AL033519.42, AC011484.4, AC005920.1, |
| | | | | | AL008732.1, AC017101.10, AC002347.1, AC005280.3, AL133289.9, AC011479.6, AL135838.5, |
| | | | | | AL353653.19, AC009996.7, AC004522.1, AL109811.39, AC018809.4, AL031662.26, AC008666.5, |
| | | | | | AC005519.3, AL136525.17, AC005736.1, AP001760.1, AC002551.1, AC012442.7, AC005484.2, |
| | | | | | AC011742.3, AC007917.15, AC004257.1, AL445205.14, AF134726.1, AC012320.6, AP001710.1, |
| | | | | | AC004686.1, AC004253.1, AC006328.5, AC012081.16, AP001719.1, AC004815.2, AC018764.6, |
| | | | | | AL353716.18, AL590762.1, AC004598.1, Z86090.10, AC011895.4, AC008891.7, AC024571.4, |
| | | | | | AC006115.1, AL109984.14, AC011521.3, AC005000.2, AL442167.1, AC011465.4, AC003990.1, |
| | | | | | AL136179.15, AC004801.1, AC007298.17, AP000510.2, AC009412.6, AC008569.6, AL035669.43, |
| | | | | | AL139415.10, AL021154.1, AC008736.6, AC007739.2, AP000553.1, AC005821.1, AL035079.14, |
| | | | | | AL1356805.5, AC008507.8, AC018758.2, AC007225.2, Z93023.1, AC004755.2, AC027130.5, |
| | | | | | AC025430.5, AL121936.17, AL161938.6, AL117336.22, AL133510.13, AC010148.13, AC006205.7, |
| | | | | | AC010582.6, AC022007.3, AL137792.11, AF288742.1, AC006966.3, AC010543.8, AL136040.5, |
| | | | | | AC011497.6, AC006285.11, AL049764.4, AC005071.2, AC024082.6, AP000963.2, AC006211.1, |
| | | | | | AC011462.4, AL450339.5, AC004847.3, AL021707.2, AC020558.4, AL031729.16, AL035089.21, |
| | | | | | AC010279.4, AL121594.6, AL117348.25, AC020916.7, AL136362.10, AL139022.4, N44105, AA243221, |
| | | | | | AA931615, AA218772, AA287130, AA394149, AA399173. |
| HLHCS23 | 122 | 560663 | 1-1413 | 15-1427 | AL512506.8. |
| HLICE88 | 123 | 840321 | 1-826 | 15-840 | AL532043, AI201573, AL531300, AL531634, AI989422, AL531496, AL531955, AI984220, AL531518, |
| | | | | | AI954841, AL531321, AF074698, AW339929, AL531471, AV651041, AA779747, AV651093, |
| | | | | | AV699907, AV650840, W72217, AI064748, AV654559, AV682392, AW269523, AV651109, AL531705, |
| | | | | | AV694886, AL531173, AL531868, AV654713, AV682656, AI174843, AV718993, AV690790, |
| | | | | | AV647604, AW665993, AI065032, AV700518, AI568934, AA936960, AV718549, AI092886, AI189826, |
| | | | | | AI187086, AV718380, AI911879, BE825390, BF126685, AV719205, AV650157, AI313492, AI917303, |
| | | | | | AV699400, T64315, AV682007, AV683969, AI186901, AW950039, AV662312, AA906009, AV658467, |
| | | | | | AI283155, AI580756, AI207724, AV700035, AL532119, AV682707, AI989903, AV682339, AI825233, |
| | | | | | AV718528, AV692690, AV661899, AV687963, AV649290, AV695138, R00044, AW074348, AV662232, |
| | | | | | AV662173, W68580, W77961, AV661196, W78129, W94563, AA312959, AV719960, C20909, |
| | | | | | AV655180, AA313014, AV647336, N79517, T53800, AV697776, W92647, AI140948, AV661818, |
| | | | | | AV653519, AV682459, T69024, T64703, R85625, AV659219, AV654902, AV654163, AV656147, |
| | | | | | AA343530, T62908, AV662293, AV646927, AV660491, AV661947, T27841, D12274, AV649738, |
| | | | | | AV719990, AL531635, W78014, T50716, AA344654, AV690645, AA343475, AV655633, AV694901, |
| | | | | | AV661905, AV653213, AV656799, T64666, BE250740, AV646035, BF884848, H89646, BF907679, |
| | | | | | AV684695, AV697617, T74885, AI266531, AV693375, BF700475, AV649852, AA312904, BF884387, |
| | | | | | T72273, AA360373, AA345098, T46873, AV649783, T40932, T64651, BF223298, BE971381, T73291, |
| | | | | | AA345478, T68149, AA344540, AV652797, T69397, BE786550, AA127901, T70574, H49804, T67493, |
| | | | | | AA313214, AV659816, W79416, AV648902, AA345122, AI808530, AV655148, BF059586, AV718825, |
| | | | | | T52365, T23996, T74611, AA313496, T69582, T68003, AV648713, T64115, AA345475, BF695457, |
| | | | | | AV682967, R09360, T69277, AA345347, AV662313, AA328409, AA780302, AA344998, T50690, |
| | | | | | T68193, T58776, AA313189, T50709, T74553, AA345561, AA345467, AV653080, T94279, BE693289, |
| | | | | | T69653, AI065018, BF126654, BE693283, T69258, T41064, AV688374, AV655766, BF814637, |
| | | | | | AA313124, AA331360, AA345116, AA360365, T73437, T67507, AA313165, AA345423, AV684262, |
| | | | | | AA382681, AA344388, T82069, AA345257, AV661807, AA313286, AA345507, T41037, AA313498, |
| | | | | | BF696362, AV692145, AA345440, T55851, AA345466, AA337510, AV681621, T83205, T55856, |
| | | | | | T72290, AW805833, AV655197, BE971173, AV659822, T58721, AL531497, AA344638, AA331364, |
| | | | | | AV656556, AL532136, BC007044.1, AF350254.1, M10014.1, K02569.1, X14174.1, X51473.1, X00086.1, |
| | | | | | T58742, T58809, T61213, T61761, T41027, T72141, T73555, T90758, R09244, R01860, R06531, H89500, |
| | | | | | W68581. |
| HLQAS12 | 124 | 886180 | 1-2436 | 15-2450 | AI928113, BF982378, AI357634, AI765282, AI453115, BG231939, AU157262, AV708295, AV727507, |
| | | | | | AW082681, BE501554, AI188985, AI095135, AU156104, AV726829, AU135631, N51624, AW440717, |
| | | | | | AU156188, AI244310, BF934257, AU137679, AU135523, AU138854, AI300045, BF917907, AA044216, |
| | | | | | BF914890, AA938683, AI868392, N75085, R78358, AA044087, R31345, H68138, R78357, AI419044, |
| | | | | | R62557, H67054, BF858325, AA620341, R26153, AI243883, R23598, R31604, AW969916, AA528481, |
| | | | | | BF110458, BE174919, R07930, AA682386, AA114093, N53919, AW298577, BF895809, AW796811, |
| | | | | | AB017444.1, AF079167.1, AB010710.1, AF035776.1, AJ131757.1, AF079166.1, AB017441.1, |
| | | | | | AF079165.1, AB017440.1. |
| HLYAR30 | 125 | 781249 | 1-840 | 15-854 | AW138760, AI928443, AI264363, AA428526, BG236171, BF432779, AA581388, AA854958, AI366182, |
| | | | | | BF446513, AW170385, AI970247, AI354301, AI081061, AI140964, AW243493, AW104079, AI366181, |
| | | | | | AA732881, AI039682, AA425694, H11979, R46377, AI871576, AI082699, AI767870, AW207325, |
| | | | | | H72841, AI537179, BE796247, N35990, AW168999, AI678150, AW972093, AA405499, AI191091, |
| | | | | | Z39960, AA626013, AW139286, AI283218, F03140, AA890408, N95266, AI871195, AI349325, |
| | | | | | BE791253, AI914847, AW088879, AA192077, AW090285, AA788656, BE674514, AI634559, BE797083, |
| | | | | | AI269823, AA894693, AW151974, AW151132, BG167830, AI431238, BE883591, AI537677, AI494201, |
| | | | | | BF812963, AI804505, AI815239, AI500659, AI866465, AI815232, AI866691, AI801325, AI500523, |
| | | | | | BF812438, AI538850, BE885490, AI358271, AI582910, AI887775, AI582932, AI872423, AI590043, |
| | | | | | AI284517, AI923989, AI500706, AI445237, AI491776, AI289791, BF811804, AI926593, AW151138, |
| | | | | | AI521560, AI889189, AI500662, AI285417, AW172723, AI539800, AI284509, AI582912, AI538885, |
| | | | | | AI440263, AI889168, AI927233, AI866573, AI633493, AI434256, AI355008, AI866469, AI805769, |
| | | | | | AI434242, AI888661, AI500714, AI284513, AI888118, AI285439, AI859991, AI436429, AI889147, |
| | | | | | AI623736, AI355779, AI581033, AI371228, AI431307, AI491710, AI440252, AI440238, AL047422, |
| | | | | | AI567971, AI866786, AI610557, AI860003, AI431316, AI242736, AI539260, AI828574, AI887499, |
| | | | | | AI440260, AW151979, AI539781, AI702065, AI539707, AI885949, AI285419, AW089557, AI559957, |
| | | | | | AI521571, AI469775, AI282249, AI866581, AW074057, AL047398, AI567953, AI815150, AI446495, |
| | | | | | AI867068, AI952433, AI225248, AI698352, AI371229, AL042750, BE891834, AW194509, AI866458, |
| | | | | | AI432644, AI890907, BF811802, AW129310, BF815930, BE897632, AI273179, AI371251, AI866510, |
| | | | | | BF814072, AI623302, AW058275, AI866461, AI923046, AI049859, AI539771, AL048403, BF525578, |
| | | | | | AA878808, AI890472, AI801286, AL515347, AI348870, AI889191, AI564500, AW151136, AW858522, |
| | | | | | BG252929, AL514281, AW858243, AL514033, BE895765, AI554821, AI561170, AI354981, AI690946, |
| | | | | | AI648567, BE877142, AI433257, AW191003, BE881384, AI500683, BE908336, AI815233, BG029667, |
| | | | | | BG030548, AL048375, AL514839, BG113493, BG260144, BG110517, AI355126, AI371243, AI687614, |
| | | | | | AW059828, BE963035, AL514427, BG257535, AI798359, AL039390, BF795712, AI493559, BF796402, |
| | | | | | BG163646, AI274759, AL045626, BF814447, BF342261, AI433976, BG254745, BE875243, BF726204, |
| | | | | | AI924051, AL136781.1, AL136644.1, AL359620.1, AL133084.1, AL133076.1, AL133070.1, AL136765.1, |
| | | | | | AL357195.1, AL133608.1, AL049423.1, AL136763.1, AL031346.8, AL136844.1, AL137547.1, |
| | | | | | AL110269.1, X98834.1, AL353999.3, BC001166.1, BC006440.1, AL122101.1, AL136825.1, AL133049.1, |
| | | | | | AL133655.1, S77771.1, AL353802.14, AC009484.3, AK026647.1, AF205073.1, BC006133.1, |
| | | | | | BC007920.1, BC008063.1, AL133053.1, AL133015.1, AF038440.1, AK027102.1, AL359622.1, |
| | | | | | AB012256.1, BC001774.1, D44497.1, AB047609.1, AC007869.2, X66417.1, AL157480.1, AF028823.2, |
| | | | | | AL137478.1, AF013249.1, AL122049.1, BC007926.1, AB048921.1, AL162062.1, AL136768.1, U51587.1, |
| | | | | | BC003602.1, U77594.1, AC012312.8, BC009192.1, AL137463.1, L19437.2, AK026746.1, BC000090.1, |
| | | | | | AF061795.1, AF151685.1, U72621.3, AJ296345.1, AC008491.6, AC007458.13, BC002750.1, |
| | | | | | AF271350.1, AF022813.1, AF038847.1, AB049900.1, AK024974.1, BC002448.1, BC002356.1, |
| | | | | | AF004162.1, U80742.1, X79204.1, AL357773.15, AL441883.11, AL442643.2, AC026464.6, AC004213.1, |
| | | | | | BC000051.1, AK027311.1, AL391244.11, AC002464.1, AK026626.1, BC000377.1, AK000212.1, |
| | | | | | AC004686.1, BC000007.1, AF111112.1, AL049465.1, AF131773.1, BC001236.1, BC006091.1, |
| | | | | | AK026480.1, BC002373.1, AL133640.1, AB060832.1, AB060874.1, AB063040.1, AB049758.1, |
| | | | | | BC004119.1, AL137555.1, AC007114.7, AC015982.9, BC005070.1, AK027614.1, AB049892.1, |
| | | | | | BC004529.1, AB049629.1, U67813.1, AL122050.1, AK027095.1, BC002485.1. |
| HLYDF73 | 126 | 566869 | 1-612 | 15-626 | AC009753.5. |
| HLYDO73 | 127 | 584787 | 1-844 | 15-858 | |
| HLYGY91 | 128 | 658703 | 1-626 | 15-640 | AW294783, BE502344, BE222441, AI082255, AI031661, AI701563, BF431032, AW340159, AI250886, |
| | | | | | AA164268, AA113365, AW195764, AA813476, AI382168, AW044458, AI802164, AI149406, BF196258, |
| | | | | | AU155794, AA479123, AI167291, AI436306, AI224847, AI417116, AI709346, AI669258, AW772002, |
| | | | | | AA844518, AI282711, AI279738, AW195230, AW959069, BF002627, AI560087, AI286319, AI474555, |
| | | | | | AI092394, AA479124, AA243709, AI468637, AW991244, AA508073, AA243826, AI468739, T62160, |
| | | | | | AW975954, T61934, BE707630, BE169617, BF747189, BE832694, AA746981, AA328991, AK023448.1. |
| HMDAB29 | 129 | 584789 | 1-1176 | 15-1190 | AV756491, AA714011, T74524, AW970571, AI284543, AA847499, H07953, BE139139, AI250552, |
| | | | | | BE676912, AI251284, AI251034, AI251203, AL042373, AI254770, BG169404, AW504485, AI223626, |
| | | | | | BE062159, AI755214, AW303098, AW500684, AI754567, AI053398, AI792575, AI754105, AI278972, |
| | | | | | AW576251, BE138594, BE138387, AW023111, BE315483, AI923052, AA449997, AW973992, |
| | | | | | AV762354, AW969667, AA829036, AA937809, BF725844, BE150796, BF832074, AW973757, |
| | | | | | BE968744, AI254779, AA773463, AI085242, AL119247, AI962030, AV763550, AW467607, BE674881, |
| | | | | | AV649707, AI674840, AA630854, AW167330, AV710482, AW265342, AV762975, AV649853, |
| | | | | | BE256101, AA315361, AW850517, AA828834, AW958962, AA828054, AI687343, AW963463, |
| | | | | | BG012020, BF854170, T11828, AW270771, AA621865, AI963720, AW502237, AV733437, AV723671, |
| | | | | | AA127426, AI732151, AL042667, AL042670, AI745151, AI249853, BE160727, AV762633, AW965008, |
| | | | | | AL119921, AI620992, AW969831, AA809546, BG110480, AA680243, AA618316, BG152386, |
| | | | | | BG115297, AW471332, BF950533, AI627614, AA524616, AA828637, AI524193, AW500161, |
| | | | | | AV763540, AV738383, AI613389, AI890971, AI279417, BG105498, BF724372, AL524675, AW970064, |
| | | | | | AA683069, AW265688, BF868994, AI049676, BG026977, AI457389, AW193265, AA503019, AI334248, |
| | | | | | AI440117, AA651639, AK025218.1, AC007308.13, AC002470.17, AC004824.3, AC010271.6, |
| | | | | | AL031283.26, AC009412.6, AC005399.19, AL136305.14, AC010913.9, AL135927.14, AC007227.3, |
| | | | | | AC011455.6, AC008670.4, AC016602.6, AC006337.4, AP001718.1, AL049839.3, AL033524.11, |
| | | | | | AC006038.2, AF200465.1, AC005200.1, AC005233.2, AL109804.41, AF051976.2, AC010319.7, |
| | | | | | AF243527.1, AF207550.1, AL121601.13, AC005077.5, AL133367.4, AC005740.1, AL117333.26, |
| | | | | | AC005324.1, AC004821.3, AC011895.4, AC007956.5, AL137849.13, AC006433.18, AC007991.7, |
| | | | | | AL139415.10, AC022211.5, AL024498.12, AL159997.14, AC011740.7, AL161731.20, AC016995.4, |
| | | | | | AC005529.7, AC004953.1, AC007722.9, AC006330.5, AC026464.6, AL359986.15, AL121895.26, |
| | | | | | AL031228.1, AL031276.1, AC006965.3, AC004134.1, AL050350.14, AC022148.5, AC004408.1, |
| | | | | | AC008755.6, AL050349.27, AL109806.22, AL133240.3, AP000963.2, AL034379.8, AL109843.25, |
| | | | | | AP001709.1, AJ277546.2, AL121972.17, AL031670.6, AP002852.3, AB038653.1, AF045555.1, |
| | | | | | AL031311.1, AC003080.1, AL020997.1, AL121808.4, AP000117.1, AC004796.2, AL354707.17, |
| | | | | | AC020552.4, AL122020.5, AC009131.6, AC008752.6, AL158817.11, AC009488.5, Z98884.11, |
| | | | | | Z83826.12, U63721.1, AL049776.3, U62292.1, AP000298.1, AC005484.2, AL132768.15, AL161747.5, |
| | | | | | AC018636.4, AL158207.15, AL137119.26, AC005409.1, AC012372.4, AL449209.2, AC008440.8, |
| | | | | | AC074013.5, AE006464.1, AC004813.2, AC009032.7, AC007676.19, AC018462.4, Z98304.1, |
| | | | | | AC011495.6, AL359092.14, AC008753.8, AC005527.3, AL034417.14, AL121753.30, AL033527.26, |
| | | | | | AL109921.21, AL132640.4, AC009068.10, Z85996.1, AL035684.25, AF317635.1, AP000424.3, |
| | | | | | AC000025.2, AC008521.5, AL158040.13, AC019171.4, AC006952.6, AC004024.2, AL031847.17, |
| | | | | | AJ011930.1, AC011479.6, AL163300.2, AL109976.23, AC004707.1, AC006121.1, AF053356.1, |
| | | | | | AL022316.2, AL121594.6, AL160165.17, AP000429.3, Z98946.15, AC005236.4, AC006064.9, |
| | | | | | AC010608.6, AL035411.27, AL365444.11, AL031428.9, AC010422.7, AC003682.1, AC005921.3, |
| | | | | | AL109801.13, AL354668.13, AL137139.9, AC005971.5, Z93017.6, AP002453.3, Z82215.1, AC008050.6, |
| | | | | | AL049694.9, AL022312.7, AC005071.2, AF196970.1, AL133163.2, AL451075.15, AC005086.2, |
| | | | | | AL035071.17, AC004156.1, AL136295.3, AF196779.1, AC022382.3, AL391280.15, AC020898.5, |
| | | | | | AC006057.5, AC004659.1, AC012614.6, AL121712.27, AL136137.15, AC005058.1, AP001711.1, |
| | | | | | AC005995.3, Z82206.1, AL139343.9, AP000925.5, AP000044.1, AP000112.1, D84401.1, AL096791.12, |
| | | | | | AP001781.4, AC004826.3, AL158052.10, AC005225.2, AC004975.2, AC004797.1, AC007546.5, |
| | | | | | AC083884.6, AL355517.12, AC011465.4, AL109935.39, AL132712.4, AL021808.1, AP000193.1, |
| | | | | | AC023798.16, AC005914.1, AC005229.1, AL158830.17, AC004253.1, AC005056.2, AL391259.15, |
| | | | | | AC008745.6, AC008760.6, AC072052.6, AC019195.10, AC005620.1, AP001670.1, AP001748.1, |
| | | | | | AC034200.6, AC004494.1, AC004883.2, AL121936.17, AC009086.5, AC004084.1, AC005907.1, |
| | | | | | AC003043.1, AL109936.10, AL357519.19, AC004832.3, AC007435.12, AP000501.1, U96629.1, |
| | | | | | AL137229.4, Z84469.1, AL132777.4, AC008895.7, Z83840.7, AC005274.1, AC005412.6, AC025262.27, |
| | | | | | AC008649.6, AL391833.10, AC009269.6, AC015651.18, AC011494.2, AL161665.5, AC005332.1, |
| | | | | | AC011737.10, AP000796.4, AC008687.4. |
| HMDAD44 | 130 | 566854 | 1-1190 | 15-1204 | BF574085, R12644. |
| HMEDE24 | 131 | 837027 | 1-2822 | 15-2836 | BE799690, BF971352, AL522117, BE741614, BE733821, BE253979, BE745589, BE747602, BE275209, BE740081, BE797620, BG176608, |
| | | | | | BE741557, BE745137, BE560375, BE746312, BE732858, BG025369, |
| | | | | | BG178395, BF791999, BG254540, BE791922, BG255293, BE397859, BE563260, BF568255, BE736997, |
| | | | | | BE869657, BE733788, BG179867, BE744696, BF568603, BG105384, BG164812, BE735863, BE877940, |
| | | | | | BE513940, BE730519, BG028893, BE545980, BG253222, BE902894, BG181129, BE383086, BF688245, |
| | | | | | BE271622, BG104781, BG119401, BE780014, BF569659, BE304608, BE514068, BE297300, BG032303, |
| | | | | | BE298208, BE514435, BE907329, AW854046, BE301884, AV697512, BG117108, BE279314, |
| | | | | | AV661771, BE251240, BE407499, BE258199, BE311769, AW732511, BE298556, BF037695, BE388413, |
| | | | | | AW732535, AW409655, BE397925, AV683853, AA452189, AW854101, BE279938, BG116638, |
| | | | | | AV683681, BE563147, BE388057, AW854252, BE311605, AV661878, BG122628, AW995622, |
| | | | | | AW361325, AV683485, AA503078, AA573738, AV702970, AA582834, AW853978, BE788746, |
| | | | | | BF037900, AW965408, AV685743, BE075197, BF203617, BE745948, BF854007, BE378390, |
| | | | | | AW068660, BE867357, AW068659, AA206520, BE271811, AW854032, W73087, BE908750, BE514234, |
| | | | | | AW965028, BF663829, BE560624, AA147831, BE269587, BE551372, BE388856, BE504255, |
| | | | | | AW368613, AA098841, BE696091, BF304862, BF313245, AW205582, AA083178, AA507028, |
| | | | | | BE296877, BE019783, W31114, BE877527, BF316131, AI140368, BE254196, AA129205, BF988424, |
| | | | | | BE873091, AV723475, AV694405, AA131227, BF982711, BF875737, W67728, AW361340, AA608672, |
| | | | | | AW379832, BF247344, BF316864, BF211638, W58606, BE075179, BF032794, BE261375, AW574704, |
| | | | | | AA102507, AV701713, AI085375, BE387881, W67729, AI026933, AA846817, W72755, AA101137, |
| | | | | | BE514707, BG107229, AA082572, BE868602, BF206336, BE696064, AW753393, AA522536, W73192, |
| | | | | | AI813745, AA928422, W60774, AI126196, AA587677, BE313256, BE208156, AI951015, BE263252, |
| | | | | | BE547308, AA599278, AI754718, AI857952, BF569994, AI687726, BF683745, AI199748, AA307277, |
| | | | | | BE931179, AW403826, AA131954, AA081036, BE019776, N20199, AW582700, AI817097, BE383366, |
| | | | | | BE671712, AW469365, AI129011, W48714, BF243582, AW137417, AA836853, AW377041, AA187427, |
| | | | | | BE252430, AA131867, W69472, AA181263, N77269, AA977798, AA515651, AW192685, AB045226, |
| | | | | | AW361334, AA728801, AA633355, AV696934, AW172760, AV698033, AV698614, AA477847, |
| | | | | | AI831569, AI304653, BE712847, AI921567, AW403885, AI819145, H66250, AA598702, AA442280, |
| | | | | | BE313723, AI079407, BE867804, AI074293, AI077702, AI472721, AA083479, BE514162, AW593751, |
| | | | | | AI292021, AA085537, AA262168, W24339, AW769027, AA505866, AK025006.1, AL133541.21, |
| | | | | | BC001199.1, T69870, T70201, T92335, T92384, T96386, T96472, R17622, R20030, R36294, R53689, |
| | | | | | R61494, R61495, H19159, H24545, R93422, R93473, H56339, H56338, H64262, H77895, H87909, |
| | | | | | H99002, N29100, N49461, N70625, N94352, N95465, N95500, N98726, N99983, W05507, W25205, |
| | | | | | W31007, W48715, W48678, W58607, W60488, W69339, W72030, W76275, W77954, W95403, W95452, |
| | | | | | N89750, AA005259, AA005260, AA022748, AA022850, AA033602, AA033601, AA058813, AA081037, |
| | | | | | AA082101, AA082395, AA083289, AA083408, AA122255, AA127457, AA127525, AA130470, |
| | | | | | AA130469, AA131210, AA136613, AA136745, AA147049, AA173175, AA182763, AA187330, |
| | | | | | AA187016, AA186912, AA188454, AA190352, AA262233, AA502579, AA503216, AA535682, |
| | | | | | AA536157, AA557268, AA594665, AA618316, AA576258, AA580400, AA857905, AA876095, |
| | | | | | AA915957, AA931703, AA961340, AA988937, AA991158, N56514, W17285, C00034, N86769, C16493. |
| HMEDI90 | 132 | 840077 | 1-2262 | 15-2276 | BF951698, AW956936, H29379, T66089, AA057405, AW134660, AA057093, AA917450, AL133995, |
| | | | | | AI299437, AI002692, H18042, R19493, T09261, F11783, F11794, T65008, T09262, R43839, N78357, |
| | | | | | H29290, AL035633.18, AF263308.1, AF263309.1, AF263310.1, AF263307.1, AF263306.1, AF263305.1. |
| HMIBD93 | 133 | 634227 | 1-1309 | 15-1323 | AL045780, AW590225, AW970178, AI376010, AI401550, BF940066, AW072377, AI362753, |
| | | | | | AW005335, AA524093, AW575918, AW592039, AI097125, AA514373, AI424874, AA490412, R55849, |
| | | | | | R89670, AA502607, AI361469, W60204, R45456, AA906578, BF940638, H17344, W35351, AA757050, |
| | | | | | D52329, AA309188, AA490314, AA479853, R45361, AI929199, AA456776, AA394201, AA806240, |
| | | | | | R55770, W32915, AI380329, Z38945, AI003744, AA411018, R52109, AI471415, AA863370, AW953330, |
| | | | | | AW866322, BF921092, AL048656, BF038804, AW238730, BF904194, BG180996, AW075305, N49165, |
| | | | | | BG117375, BF764538, BE966011, BF343568, BE536058, BG104775, BG104699, AI684013, BF344691, |
| | | | | | BG121999, BF822127, BE966787, AV759922, BF969316, BF904258, BE393551, AI498067, BE965121, |
| | | | | | BF753053, AL039086, BE895765, BE886728, AV721967, AI923989, BE254907, AW004896, AI648699, |
| | | | | | AI872914, AI312428, BF798503, BE895585, AI636619, AI620056, AW059828, BF812459, AW162189, |
| | | | | | BF835240, BE875243, AW411235, BF885000, AL138406, AI887775, AW071417, AI961589, AI307557, |
| | | | | | AI611728, BE964876, BE047833, BE966699, AV704051, AI950892, AI620639, AW827289, BF339322, |
| | | | | | AI917963, AI810589, AI345677, BF792928, AI824375, AI537677, AW410972, AL040277, AW084056, |
| | | | | | AW834302, AL040241, AI538885, AW151136, AI270055, AI570966, AL040694, AI446373, AI916419, |
| | | | | | BF856052, AI473451, BG110517, BF854113, AW149876, BF204484, AA420758, AL036652, AI571511, |
| | | | | | AW411043, BG151388, AI288285, AW409775, BE965724, AI002285, BE891101, AW410969, |
| | | | | | BE907440, AI866770, AL043052, AW827115, AA572758, BE543089, AL119836, AI955906, BF753013, |
| | | | | | AI889376, BE892572, AI468872, AW409931, AI340519, BF960601, BG029053, AW858254, AI307734, |
| | | | | | BF672397, AI521103, AL036780, BF818009, BF817392, AI590686, AA493647, AI929108, AA853213, |
| | | | | | AI922901, BE878725, AA420722, AI432653, AW167918, AW999049, BE965192, BE544111, BE963838, |
| | | | | | BG105895, BE964614, AI570909, BG107576, AI378123, AI623941, AI874243, D50977, BE963286, |
| | | | | | AI440263, AW088899, BE963918, BE072233, AW858243, AI366549, AI636719, AI539153, AL040011, |
| | | | | | BF813196, AI269909, BE964767, BF904180, AI539771, BE962636, AI524608, AI349933, BE045182, |
| | | | | | BE964700, AI866608, AI611743, AI249877, BF990167, AW083804, AI590423, AI783504, BF829164, |
| | | | | | AI580190, AI696626, AW089006, AI345253, AW935969, AI589993, AW059713, AI365256, BF909758, |
| | | | | | BF853807, AV656595, BF337602, BE964497, AW411351, AI567582, AL037582, BF816037, AL037602, |
| | | | | | AI564719, BE538466, BF816811, BF814761, BF885082, AI249962, BE965432, AL138457, BE904911, |
| | | | | | AI581033, AV698087, AW090494, BE965758, BE620444, BE613727, AC010913.9, AL136884.1, |
| | | | | | BC003602.1, AL133016.1, AK024538.1, AL117432.1, AL133558.1, BC005678.1, AB044547.1, U42766.1, |
| | | | | | BC004960.1, AL110197.1, AK026528.1, AL122098.1, AF218031.1, AB048975.1, AL162002.1, |
| | | | | | AK027868.1, BC003410.1, BC007456.1, AK025092.1, AB046642.1, BC004196.1, BC004899.1, |
| | | | | | AK025339.1, AK025798.1, AL137281.1, AL133075.1, AL137656.1, AB051158.1, BC008364.1, |
| | | | | | AL137538.1, AL512718.1, AF217982.1, AK000647.1, AL137550.1, BC005890.1, AK026494.1, Z37987.1, |
| | | | | | AB055368.1, AL136768.1, AL157431.1, AL110280.1, AB062750.1, BC003687.1, AF003737.1, |
| | | | | | AB060929.1, AF348209.1, AK025015.1, AK026629.1, AL353625.5, Z82022.1, L30117.1, AB047904.1, |
| | | | | | AL389982.1, AK027111.1, AL080060.1, AL162083.1, AK027096.1, AL049283.1, AL512719.1, |
| | | | | | AK000432.1, AF069506.1, AL050280.1, BC007926.1, AB062978.1, AF162270.1, AK026534.1, |
| | | | | | AF028823.2, BC001774.1, AL359583.1, AK024974.1, AB063084.1, AL049452.1, AB063079.1, |
| | | | | | AB060852.1, BC004244.1, AL110228.1, AF146568.1, BC007346.1, BC000778.1, BC005151.1, |
| | | | | | AK026533.1, AK027081.1, AL080074.1, AK000391.1, AK026462.1, BC008780.1, AF090943.1, |
| | | | | | AF218004.1, AB055374.1, AK027213.1, U91329.1, AL389935.1, AB049892.1, BC001418.2, AF026816.2, |
| | | | | | AL122110.1, AL359941.1, AL137283.1, AK025391.1, AL136640.1, AF217966.1, BC008284.1, |
| | | | | | AB060908.1, AF217987.1, AK025407.1, AB060916.1, AK000212.1, AK026855.1, AL137529.1, |
| | | | | | BC001098.1, AL136747.1, BC004556.1, AK026551.1, AY026527.1, AL117435.1, AL136787.1, |
| | | | | | AL136882.1, AL136805.1, BC006195.1, X98834.1, AK026408.1, AB055361.1, AK024594.1, |
| | | | | | AL136692.1, BC004529.1, AL050024.1, AL049430.1, AL133640.1, BC008280.1, AF177228.1, |
| | | | | | AF183393.1, BC000090.1, AB052191.1, AL080127.1, AF090886.1, AF056191.1, AL050138.1, |
| | | | | | AL137479.1, AB060912.1, AL512684.1, BC006164.1, AK027200.1, BC000317.1, AK000323.1, |
| | | | | | AL136864.1, AL080126.1, BC003122.1, AK026624.1, X72889.1, BC001470.1, AB048953.1, AF111112.1, |
| | | | | | AL050393.1, BC003052.1, AL137556.1, BC002839.1, AK026583.1, AL136786.1, BC002519.1, |
| | | | | | AK026630.1, AK026526.1, BC007198.1, BC004191.1, AK025383.1, AK026592.1, BC008365.1, |
| | | | | | AC044797.5, AL389939.1, AK027116.1, AK024524.1, BC002457.1, BC003627.1, AB048994.1, |
| | | | | | AK026353.1, AL122050.1, AB055370.1, AL512754.1, AK025209.1, AL389957.1, BC008485.1, |
| | | | | | AB056809.1, AL080162.1, AF090903.1, S77771.1, AJ012755.1, AL136749.1, BC007021.1, BC009341.1, |
| | | | | | AL137463.1, AK026542.1, AF090934.1, AL137526.1, AL136767.1, AL049382.1, AL117583.1, |
| | | | | | AL512733.1, BC004195.1, AB056420.1, AK027204.1, AK025431.1, AL117585.1, AK027160.1, |
| | | | | | AK000291.1, AL359601.1, BC007998.1, BC007534.1, AF352728.1, AL080148.1, BC001206.1, |
| | | | | | AL133565.1, AL133112.1, AK000486.1, AK026532.1, BC004923.1, BC008387.1, BC002539.1, |
| | | | | | AL110196.1, BC008899.1, AK026642.1, BC004265.1, AB060837.1, BC003110.1, AL133081.1, |
| | | | | | AK026959.1, AL136915.1, BC003548.1, BC008417.1, AL353935.1, BC006412.1, AK026506.1, |
| | | | | | X53587.1, S78214.1, AK026608.1, S61953.1, AF078844.1, AF100781.1, AF358829.1, AF097996.1, |
| | | | | | AL133093.1, BC006509.1, AK025967.1, AK026480.1, AB063070.1, AK024545.1, BC002643.1, |
| | | | | | AF218014.1, AL390154.1, D89079.1. |
| HMIBF07 | 134 | 603528 | 1-1724 | 15-1738 | |
| HMJAK70 | 135 | 610099 | 1-785 | 15-799 | |
| HMQAI38 | 136 | 589964 | 1-1763 | 15-1777 | |
| HMSHY25 | 137 | 886183 | 1-2191 | 15-2205 | BF822591, U63312.1. |
| HMUAN45 | 138 | 833072 | 1-2695 | 15-2709 | BF975230, BG177292, BF683936, BF972280, AW452044, AW450817, AW571669, AW276243, |
| | | | | | AI223336, BF507478, AW953367, AI937821, AA354094, H45305, AI699989, AI624920, AA251791, |
| | | | | | D19672, AA922638, AI655588, AA928313, R74251, AA339800, H45245, BG056723, AI433894, |
| | | | | | AW080419, AI023763, AI040104, AI523987, AV681951, AI611728, AA769327, AI564716, N22276, |
| | | | | | AV761484, BG108350, BE672647, AW268067, AL513781, AI924035, AI925463, AI811192, AI613144, |
| | | | | | AL037558, AV688427, AW083111, AI963101, AA825509, AV734888, AW955613, AL135022, |
| | | | | | AW020693, AA437293, AW197174, AI910902, AI954468, AA584251, AA420722, AW963250, |
| | | | | | AI318569, C21335, AA292158, AI742728, AV692108, AI311892, BE906230, AK027899.1, BC001812.1, |
| | | | | | AB046039.1, U42766.1, AL133016.1, AF069506.1, BC007548.1, AK025761.1, BC002643.1, AB049892.1, |
| | | | | | BC008893.1, BC002697.1, BC007199.1, AL133568.1, AK026603.1, AF218004.1, BC002736.1, |
| | | | | | AF227198.1, Z48796.1, AK000205.1, BC004383.1, AL133557.1, X79204.1, BC004529.1, BC001817.1, |
| | | | | | BC008285.1, AF090900.1, AL035067.2, BC006487.1, AL353957.1, AL137281.1, AK024978.1, |
| | | | | | BC008796.1, AL136321.5, AB009690.1, AK025860.1, BC007674.1, U31501.1, BC002839.1, |
| | | | | | AB060842.1, AF094480.1, AL136781.1, S71381.1, AB060229.1, AB060927.1, AF218014.1, BC000749.1, |
| | | | | | BC001829.1, AK025798.1, AL133113.1, AJ238617.1, AF044221.1, AK026494.1. |
| HMVBC31 | 139 | 825598 | 1-2542 | 15-2556 | AL513958, AL532289, AL513957, AU141081, BE740204, BG166399, BE904675, BE891108, BG256305, |
| | | | | | BE744952, BE905626, BE742828, BE899088, BE745625, AV653746, BE866918, BF982216, AW957312, |
| | | | | | AV723081, AI819405, BE281510, BE514995, BE856665, AI818085, AW612700, AW963890, BF038873, |
| | | | | | AW005883, BF111236, N31954, AI570554, AI814284, AI743921, AI373828, AW963892, BF001263, |
| | | | | | AI073849, AW978642, AA705064, BE858940, AI078328, AI831014, AW963886, AW081533, |
| | | | | | AW953584, AA150396, BE906561, W78108, AA934651, W79933, D53129, N92092, AI669184, W03272, |
| | | | | | AA594574, AA719546, AA688147, AI042436, H47299, AI304898, BG012798, R35487, AA724939, |
| | | | | | W46177, BG012794, AA661822, W46540, AA158922, AI968456, R44002, AW277188, AA352968, |
| | | | | | T75515, AW365085, BE278604, AI754560, BE817848, R94999, H60086, H59434, AI868335, N69447, |
| | | | | | F19605, AA156578, D54824, AA903411, AA449263, Z24956, AW857481, BE073224, BE466451, |
| | | | | | AW857479, AI468314, T33942, H47300, Z46090, T30256, R41822, F03578, Z40826, N36752, BG149926, |
| | | | | | R94915, AA993003, R32790, AA577458, AW594657, Z44501, AI383141, AA449397, D80727, |
| | | | | | AA365266, BF757856, AA040902, AA768178, AA768128, AI391494, AA814775, BE140388, BG035024, |
| | | | | | AI814155, AI940059, BF435821, BF435237, R34285, AW300688, AA984028, BE140425, N34605, |
| | | | | | BF448850, AW169682, AW805217, BF855415, AW751033, BE934304, AA627953, AW834022, R32791, |
| | | | | | N55681, BE172132, AW751067, AA143108, BE019916, BF759114, T19783, AW835471, AL031847.17, |
| | | | | | AF064084.1, AL117548.1. |
| HMWBL03 | 140 | 822861 | 1-2582 | 15-2596 | AL532317, AW976696, BG258766, BE784103, BE781381, BG115099, BF215477, BG163228, BE868152, |
| | | | | | BG119548, BG118210, AW978736, BE547477, AI992158, BF103579, AW394038, BE537694, |
| | | | | | AW835469, BG256663, AW070824, BE614387, BF031478, AW157294, AI743202, AI193598, BF029929, |
| | | | | | BE538143, AW303817, BE464933, AA939106, AW835466, BE869327, AW835470, BE966420, |
| | | | | | AW394036, AI831483, AW163057, AI979181, AA306435, BE613678, AA749314, AI094155, |
| | | | | | AW157089, AW362974, BF240145, BF217794, AW731659, AI878985, AW362965, BF795374, |
| | | | | | AW956998, BF217096, AA146858, BE568486, AW162479, AA648921, AW753912, AW362949, |
| | | | | | AA311937, AA908739, AI922877, AI879487, N51950, AA406456, AW362962, BE350612, AI346620, |
| | | | | | AA306611, BG055455, AA651863, AA775633, AA768709, AW614887, AA774684, AA284818, |
| | | | | | AA813993, AW362967, AW769884, AA581615, AA146857, AI378205, AW362950, AI382916, |
| | | | | | AW362951, AW403413, AA586521, AW407973, AI674283, H59390, AW362956, BF913578, BF914518, |
| | | | | | AW169393, BF914514, AI473650, BF914275, AA406348, BF916334, BF913574, AA379531, BF108888, |
| | | | | | AW610254, AI225213, AA377822, BF095168, H60046, AA372701, AA465473, BF210038, AA310305, |
| | | | | | AA360185, BF914123, AA332342, AA120901, D81998, W21240, AA331393, AI382409, R18124, |
| | | | | | BE697930, AA736861, AI351496, AW752542, AA312498, AA971457, AI223218, AA377328, |
| | | | | | AW964009, AA096093, AW673672, AA300637, BF915447, T24898, AW163350, AA248513, |
| | | | | | AW389592, N95719, N53714, AW854099, AW366952, AI690275, AA492352, AA745999, AW975618, |
| | | | | | AW960465, AV718692, AW973445, AW966534, AV718931, AW973541, C14331, AW966330, D50979, |
| | | | | | AV718489, AW964468, AW966059, D51423, AV720533, AW949645, AV699866, AW959136, |
| | | | | | AW973474, AV720791, AV719324, AW965175, AV720731, AW966398, AW973307, AV718707, |
| | | | | | AW966386, AV719557, AV720616, AW966331, AW978661, AW949654, AV724520, AW959202, |
| | | | | | D80248, D80166, AW978634, AW966369, AW973490, AW966389, AW960473, AW959799, D80188, |
| | | | | | C14389, D59859, AW975613, D59619, D80210, D51799, AV720151, AW960553, D80240, AW958992, |
| | | | | | D80253, AV719822, AV718938, AV718633, AW975605, AW966378, AA305409, AW966053, |
| | | | | | AW973488, AV720211, AV720878, AW966368, AW966029, AV699447, AW966397, AW958993, |
| | | | | | AV722801, AV723927, AW949656, AW949642, AW966399, AW966531, D81030, AW966075, |
| | | | | | AW966065, D58283, AV744690, AW973334, AW966333, AV720203, AW973447, D80212, D80366, |
| | | | | | AW966022, AV718440, AV720028, D51060, AV699550, AW965185, AW965197, AV718770, |
| | | | | | AW966013, AW973482, D80022, D80219, AW956397, AW956434, AW966041, D80043, AK027642.1, |
| | | | | | AY029179.1, AK027628.1, AL021808.1, AB028859.1, AF058696.1, AB002449.1, AF271371.1, |
| | | | | | X67155.2, D34614.1, D88547.1, D50010.1, AB038216.1. |
| HMWCG28 | 141 | 847413 | 1-879 | 15-893 | AW197242, AA115972, AA283140, AI768512, AI262126, AW299591, BE501477, AI492452, AI470922, |
| | | | | | AI925912, AI479591, H99611, AW392956, N53011, H58193, BF930214, H89604, AW361279, N34132, |
| | | | | | AW865961, BF933761, BE252200, BE083984, N35841, AF061944.1, AJ296290.1, AC004765.2. |
| HNECW49 | 142 | 639117 | 1-475 | 15-489 | AL162497.20. |
| HNFCY57 | 143 | 877653 | 1-2833 | 15-2847 | AV741792, R94860, AW468866, AW176538, R94861, C01539, AW793380, AI954796, AI819545, |
| | | | | | AI583966, AI590630, AI147877, AI812091, AI274484, AA814517, AI783997, AI950729, AI637584, |
| | | | | | AI376425, AI866458, AW198090, AI696714, AL514455, BG001315, AL514469, AI473536, AL514015, |
| | | | | | AI364167, AI469262, BG254286, AW152621, AI885664, AI972497, BF724894, BF724284, AL513977, |
| | | | | | AI126920, AI421222, BF868489, BF752870, AI633125, AI469425, AW152182, AI279925, BF970652, |
| | | | | | BF669151, AI864102, AI701097, AI915291, AI432644, AI538564, BG179993, AI633317, BF811804, |
| | | | | | BF753014, AW088717, BF752997, AI828239, BG122005, AW105296, AI499570, AI174799, AI266643, |
| | | | | | AK027194.1, AL080163.1, AB047878.1, AF090934.1, AL389935.1, AK027173.1, AL117587.1, |
| | | | | | AL110223.1, Y14314.1, AL080139.1, BC006463.1, AK025435.1, BC008037.1, AL389947.1, |
| | | | | | AK026593.1, BC004945.1, AL122116.1, AB055331.1, Y13350.1, AK027172.1, AF124728.1, AJ299431.1, |
| | | | | | AL137533.1, BC004264.1, AK000414.1. |
| HNFGR08 | 144 | 825417 | 1-1422 | 15-1436 | AC006369.3. |
| HNGAK51 | 145 | 603910 | 1-901 | 15-915 | AV731286, AW085751, BE156019, BF826830, BE067011, AI732911, BG260565, AV763498, BF747038, |
| | | | | | AV759172, BF816106, AA493475, AW405593, BE300645, AI457389, AV691908, AV696428, |
| | | | | | AV684596, AV695357, AV760383, F08248, AV730391, BF673743, BE063437, AI832009, AA583394, |
| | | | | | AW150209, AA515728, AA984258, AW575171, AV738383, H07953, BE150580, AV762783, BF681619, |
| | | | | | AA176972, BE748332, AW303196, AL035703.20, AL133445.4, AC024561.4, AC012039.10, |
| | | | | | AC010583.5, AC005844.7, AC026400.3, AC006477.3, AC022493.12, AC007000.2, AC005803.1, |
| | | | | | AC007207.22, AL138849.12, AC007097.4, AC068130.3, AL049650.8, AC006059.3, AC006334.3, |
| | | | | | AC008012.8, AC001231.2, AC009955.4, AL133409.14, AL133244.1, AC010585.6, AL121989.12, |
| | | | | | AL110502.1, AL133463.16, AC011740.7, AL513008.14, AL022147.3, AC011900.6, AC012150.16, |
| | | | | | AL109759.4, AC090527.3, AC090947.1, AC027126.4, AC004386.1, AC004814.2, AP001667.1, |
| | | | | | AL121578.1, AL157791.4, AL132639.4, AL031274.1, AL139109.14, AL499582.13, AC078841.4, |
| | | | | | AC073964.3, AC005939.1, AC022073.13, AC012170.6, AP001660.1, AC090946.1, AC002288.1, |
| | | | | | AL035604.15, Z83843.1, AB000882.1, AL049870.3, AF238375.2, AC005274.1, AL139322.13, |
| | | | | | AC008280.4, AC026172.3, AL078646.29, AC004887.2, AC019212.4, AC000029.17, AL359644.10, |
| | | | | | AL451103.7, L11910.1, AL009051.1, AP001666.1, AC002418.1, AC022443.4, AL139382.12, |
| | | | | | AL354760.11, AL158832.13, AC009194.8, AC009102.9, AL008710.1, AC005901.1, AC004859.2, |
| | | | | | AL157886.11, AC019205.4, AF205588.1, AL353764.9, AL391415.12, AC019097.5, AC004600.2, |
| | | | | | AL162551.3, AC025097.41, AF198097.1, AC016776.6, AP000122.1, AF265340.1, AL139193.4, |
| | | | | | AC010205.5, AC008784.6, AL136303.15, AC012312.8, AL360270.18, AC021752.5, AL136980.5, |
| | | | | | AP000751.4, AC012450.9, AC005409.1, AC008733.7, AC084782.2, AL096791.12, AC079127.28, |
| | | | | | AC007345.5, AC007671.7, AC009455.8, AL392048.9, AC024247.4, AC016770.10, AP000506.1, |
| | | | | | AC026310.24, AC010223.5, AL022165.1, AC021851.4, AC016748.3, AC003029.2, AC020898.5, |
| | | | | | AC007374.6, AL358612.8, AL133383.10, AC008066.4, AL359636.17, AC007637.9, AP000054.1, |
| | | | | | AC034145.5, AC004701.1, AF224669.1, AC073366.3, AP001680.1, AC004067.1, AL353692.14, |
| | | | | | AP001716.1, AC015592.6, AL359397.3, AL132774.20, AL160281.17, AC009996.7, AL157713.10, |
| | | | | | AC000113.1, AL031432.1, AL391827.18, AC025962.5, AL117337.25, AL136231.12, AP001677.1, |
| | | | | | AC004934.1, AL049589.15, AL136123.19, AC069282.6, AC009961.11, AL512307.12, AC005076.2, |
| | | | | | AC004458.1, AC016948.4, AP001727.1, AL163213.2, Z68870.1, AP001720.1, AC000120.1, |
| | | | | | AL389889.11, AC010369.6, AC010679.6, AC002128.1, AC007543.4, AL391139.19, AC090710.16, |
| | | | | | AL049830.3, AL137191.5, AL035530.11, AC011242.8, AL389888.8, AC007558.3, AL021397.1, |
| | | | | | AP003697.1, AL161415.2, AC004998.2, AC004741.1, AC007963.7, AC087857.2, AC019100.4, |
| | | | | | AL354937.12, AC068724.7, AP001671.1, AL035587.5, AL109804.41, AC073332.13, AP000350.1, |
| | | | | | AL358372.11, AP001329.3, AP001717.1, AC019206.4, AL356244.12, Z84480.1, Z93020.1, AL157955.5, |
| | | | | | AL096793.20, AC005725.1, AC025159.28, AL357507.9, AC005926.1, AC008462.6, AC022201.4, |
| | | | | | AC004478.1, AC022459.6, AL450342.14, AL590762.1, AL354861.11, AL138783.6, AC017006.4, |
| | | | | | AP002008.5, AL031963.40, AC084373.24, AC006160.9, AL031123.14, AL137787.11, AC090017.18, |
| | | | | | AP000053.1, AP000168.1, AP000121.1, AC004216.1, AL357150.7. |
| HNGDX18 | 146 | 1145071 | 1-1411 | 15-1425 | |
| HNGFR54 | 147 | 695748 | 1-481 | 15-495 | AC007316.4. |
| HNGGA68 | 148 | 638116 | 1-571 | 15-585 | AB052201.1, AJ236595.1. |
| HNGHK37 | 149 | 609889 | 1-1529 | 15-1543 | |
| HNGIV64 | 150 | 561572 | 1-1033 | 15-1047 | AA595803, AV653403, AI886084, AV684943, AV695480, AI363970, BF848469, AW380640, AV651029, |
| | | | | | AL049541.24, AC009475.4, AC020910.5, AC008556.5, AC067941.7, AC004967.3. |
| HNGJB41 | 151 | 852178 | 1-1232 | 15-1246 | BE256247, AF288742.1, AC004542.1, AF323731.1, AB051451.1, AF288741.1. |
| HNGKT41 | 152 | 836061 | 1-1034 | 15-1048 | AW862214, AW859811, AW862215. |
| HNGMW45 | 153 | 838613 | 1-1516 | 15-1530 | |
| HNGNO53 | 154 | 836063 | 1-811 | 15-825 | R37935. |
| HNGPJ25 | 155 | 834942 | 1-839 | 15-853 | |
| HNHCT47 | 156 | 634691 | 1-607 | 15-621 | AA469441, AA328289, AW972888, AW968156, AA502813, T09124, AI821722, AI732162, AI821172, AI792063, BE146613, BE146622, |
| | | | | | AU119400, AU119141, AA736713, AA572983, AL120694, BE392609, |
| | | | | | BF676104, AA598663, AI798242, BF346320, AA525409, AA834799, AW970987, AA525174, BE747883, |
| | | | | | AI636734, BF129921, BE395693, BF869362, BE677425, BF345228, BF345114, AA502536, BF747666, |
| | | | | | AA569179, AA482323, BE537881, BF871505, AV695478, BF340209, AI824589, AI567106, AV719084, |
| | | | | | AV763603, AA364869, AL079869, AA608741, AA468456, AA652059, AI309943, AL046620, |
| | | | | | AL041895, AA621838, AL031728.12, AC018828.3, AC022383.3, Z84480.1, AC011737.10, AL135839.15, |
| | | | | | AC083884.6, AC025594.5, Z83844.5, AC002470.17, AC007308.13, AL513008.14, AC009228.4, |
| | | | | | AC007597.3, AC006388.3, AL096841.6, AF109907.1, AL021546.1, AL133448.4, AC005098.2, |
| | | | | | AC004694.1, AC011461.4, AL133245.2, AC004815.2, AC004166.12, AC009488.5, AC004846.2, |
| | | | | | AL161756.6, AC009137.6, AC004030.1, AL157823.9, AL031685.18, AC015801.25, AC002369.1, |
| | | | | | AC020931.5, AC022384.4, AC010463.6, AC005803.1, AC018712.5, AC008569.6, AL035704.9, |
| | | | | | AL118502.38, AL049760.26, AC010378.6, AL353193.7, AC008755.6, AL138759.20, AC000360.35, |
| | | | | | AC007883.3, AC034193.4, AC007057.3, AC009475.4, AL049872.3, Z84486.1, AC005089.2, Z93020.1, |
| | | | | | AC011490.7, AC005871.3, AC009077.7, AC018808.4, AC007384.3, AC008745.6, AL132768.15, |
| | | | | | AL590762.1, AC008481.7, AC020954.6, AC010316.6, AC004967.3, AL356257.14, AC005972.1, |
| | | | | | AL096774.9, L44140.1, AC005052.2, AF031078.1, AL121586.31, AL391384.18, AL353748.13, |
| | | | | | AL133371.3, AC005081.3, AF030876.1, AC004073.1, AC011736.4, AC005067.2, AL159168.15, |
| | | | | | AL121920.21, AC013717.8, AL365364.19, AL022476.2, Z97184.1, AC004887.2, AL161670.4, |
| | | | | | AP001781.4, AC010319.7, AC002126.1, Z93015.9, AC009060.7, AL391827.18, AC026765.22, |
| | | | | | AC016027.15, AC007685.2, AC012170.6, AC008655.6, AL031651.33, AC016830.5, AC008551.5, |
| | | | | | AC005080.2, AC008040.7, AC004965.2, AC008521.5, AC011446.6, AP002007.4, AL133294.10, |
| | | | | | AL356915.19, AL157951.5, AC004760.1, AL121890.34, AL355871.5, AL136170.12, AC007917.15, |
| | | | | | AF053356.1, AL031681.16, AC011465.4, AC010999.6, AC084864.2, AL049576.19, AL132775.29, |
| | | | | | AP001760.1, AC004685.1, AP001725.1, Z75407.2, AC003070.1, AL354864.16, AC007881.4, |
| | | | | | AP000424.3, AC010271.6, AC010742.4, AL162430.15, AP002340.3, AL079342.17, AP000553.1, |
| | | | | | AC005841.3, AL096700.14, AC011495.6, AL137853.12, AC004799.1, AC025588.1, AC008267.6, |
| | | | | | AC011462.4, AC005914.1, AC087071.2, AC022154.3, AL139415.10, AC003043.1, AL121926.24, |
| | | | | | AC004491.1, AC011005.7, AL117381.32, AC026805.5, U91323.1, AL034422.24, AP003466.2, |
| | | | | | AL049709.18, Z68273.1, AL359092.14, AC005207.1, Z93930.10, AC008266.3, AC004382.1, |
| | | | | | AC007388.3, AC009131.6, AL136981.22, AC005082.3, AL122023.3, AC083855.2, AL117350.12, |
| | | | | | AC018801.4, AL136305.14, AC010328.4, AL049761.11, AC000025.2, AC010422.7, AC078818.19, |
| | | | | | AC026866.8, AC011811.42, AC007842.1, AC005200.1, AL355392.7, AC008389.4, AC004883.2, |
| | | | | | AL139801.17, AC011460.3, AL160264.22, AC020552.4, AC011472.7, U47924.1, AC018751.30, |
| | | | | | AB013139.1, AC007318.4, Z83838.2, AL121897.32, AL133153.3, AP001753.1, AL096840.25, Z93017.6, |
| | | | | | AP000349.1, AC011247.10, AL049869.6, AC004782.1, AC090527.3, AC006088.1, AC020928.6, |
| | | | | | AD000812.1, AC011479.6, AL022721.1, AC018695.6, AC002430.1, AL139100.9, AC004854.2, |
| | | | | | AL132712.4, AL139002.18, AL162426.20, AL161445.10, AC007546.5, AC000026.3, AL109797.18, |
| | | | | | AC020983.7, AC020913.6, X69907.1, AC005620.1, AP000350.1, AC010205.5, AF224669.1, AC058791.3 |
| | | | | | AP000352.2, AF011920.1, AC004703.1, AC018711.4, AC008623.4, AC006946.20, AL035689.26, |
| | | | | | AC007383.4, AJ400877.1, AC004953.1, AL035420.15, AC023880.5, AL159140.4, AD001527.1, |
| | | | | | AC002394.1, AL035072.16. |
| HNHKI74 | 157 | 777856 | 1-803 | 15-817 | AV728309, AV707794, AV706891, AV725423, AV704740, AV709273, AV702172, AV701844, |
| | | | | | AV734690, AV683012, AV705525, AV734974, AV703460, AV702625, AV702760, AV705299, |
| | | | | | AV732961, AV726754, AV702857, AV706410, AV728425, AV764444, AV704467, AV762687, |
| | | | | | AV759295, AV725431, AV707135, AV762870, AV727065, AV702659, AV759719, AV759507, |
| | | | | | AV762973, AV761810, AV706448, AV760057, AV761107, AV729881, AV759717, AV761489, |
| | | | | | AV761613, AV729947, AV707230, AV762505, AV722143, AV755512, AV763558, AV763410, |
| | | | | | AV704541, AV761412, AV702343, AV706814, AV709625, AV701499, AV762015, AV760106, |
| | | | | | AV703137, AV707043, AV762706, AV762631, AV707067, AV763298, AV762242, AV706025, |
| | | | | | AV733894, AV762852, AV764465, AV756702, AV709025, AV728138, AV701739, AV757334, |
| | | | | | AV705436, AW963592, AW955724, AV703844, AV704497, AV707654, AW962651, AV729090, |
| | | | | | AV702738, AW962006, AV755888, AV760048, AW957644, AW962942, AW963486, AV762009, |
| | | | | | AV761661, AV709897, AV729272, AV708388, AV712770, AV702109, AV711430, AV762082, |
| | | | | | AV705086, AV763847, AW958318, AV760908, AV725558, AV764034, AW963489, AW961593, |
| | | | | | AW966064, AW963552, AV701613, AW960468, AW956077, AW963463, AW962444, AV762067, |
| | | | | | AW953953, AW962268, AV727583, AV756508, AV703218, AV759768, AW961330, AV757526, |
| | | | | | AW963625, AV729411, AV705020, AV688823, AV710733, AV760724, AV683668, AV759352, |
| | | | | | AV763444, AV705532, AC002302.1, AL031273.1, AC005067.2, AC003982.1, AL022165.1, AC005225.2, |
| | | | | | AP001711.1, AC002470.17, AC012476.8, AC009060.7, AF196969.1, AC007917.15, AL354932.26, |
| | | | | | AC004148.1, AL359091.10, AC006059.3, AC005207.1, AC006312.8, AP001689.1, AC004824.3, |
| | | | | | AC007000.2, AC004840.3, AC011497.6, AC005229.1, AC006077.1, AC006480.3, AC005058.1, |
| | | | | | AC022543.2, AC004263.1, Z82184.1, AL445483.13, AC005632.2, AF134471.1, AC005859.1, |
| | | | | | AC002477.1, AF258545.2, AL024498.12, AC010458.5, AL136418.4, AL139054.1, AC002425.1, |
| | | | | | AC003007.1, AC006111.3, AC003692.1, AL096763.14, AL357497.17, AP001714.1, AL109743.4, |
| | | | | | AL118497.9, U15177.1, AL391384.18, AC005282.4, AC004089.25, AC011455.6, AP000089.1, |
| | | | | | AL132640.4, AP001630.1, AP000300.1, AC010319.7, AL136131.15, AC009137.6, AC010679.6, |
| | | | | | AC005015.2, AC018644.6, AL049761.11, D87675.1, AC007308.13, AL161779.32, AC005726.1, |
| | | | | | AC008599.6, AC009470.4, AC006121.1, AC011479.6, AP000113.1, AP000045.1, AF222686.1, |
| | | | | | AC004659.1, AC004000.1, AL158040.13, AC008745.6, AC004878.2, AL121914.31, AC004166.12, |
| | | | | | AC018755.3, AC019014.1, AC007003.4, U17576.1, AC010326.6, AC005052.2, AL354707.17, |
| | | | | | AC006038.2, AL008718.23, AL022476.2, AP001725.1, AL031282.1, AC007938.1, AL133448.4, |
| | | | | | AC018663.3, AC007216.2, AL117258.4, AC004867.5, AC006014.2, AC008891.7, AC007684.3, |
| | | | | | AC011489.6, AL353716.18, AL022302.10, AF312915.1, AC020906.6, AL354696.11, AC007991.7, |
| | | | | | AC007151.2, AC013726.7, AL359828.13, AL157838.24, AC005089.2, AC020928.6, Z68273.1, |
| | | | | | AC007021.3, AL161893.24, U91323.1, AC004149.1, AC008068.4, AP001717.1, AC010956.12, |
| | | | | | AL356214.20, AC020558.4, AL118520.26, AL139809.16, U67810.1, AL137162.25, AC003956.1, |
| | | | | | AL590109.4, AL049758.11, AL365364.19, AL392003.11, AL513366.11, Z97054.1, AC008395.6, |
| | | | | | AC013449.8, AL121983.13, AC004099.1, AL445687.5, AC004797.1, AC006329.5, AL158172.5, |
| | | | | | AP001695.1, Z95114.19, AC006449.19, AC008747.5, AC010388.5, AL049830.3, AC007052.4, |
| | | | | | AL135927.14, AC007227.3, AL022323.7, AC025097.41, AC005288.1, AC005808.1, AC078818.19, |
| | | | | | AP001716.1, AC005768.17, AC008551.5, AP000116.1, AL161630.12, AC006433.18, AL138920.11, |
| | | | | | AC007546.5, AC006511.5, AC004971.3, AC004851.2, AC008736.6, AL139113.21, AB038653.1, |
| | | | | | AC005372.1, AC005546.1, AC004913.2, AC008521.5, AC005291.1, AC005081.3, AC005255.1, |
| | | | | | AC007722.9, AL109613.11, AC005080.2, AC006120.1, AF141309.1, AL161936.15, AC005412.6, |
| | | | | | AL049713.20, AC018841.3, AC004106.1, AC007679.4, AC090426.1, AC013436.5, AC008166.2, |
| | | | | | AC004965.2, AC005098.2, AC008753.8, AL161757.4, AC008622.5, AC016691.10, AL136123.19, |
| | | | | | AC010519.6, AP002342.3, AC055731.22, AC006345.4, AC007066.4, AL158830.17, AC002544.1, |
| | | | | | AC011465.4, AC005519.3, AP000210.1, AP000132.1, AL021877.1, U95739.1, AL137017.9, AC005488.2, |
| | | | | | AC022211.5, AL355480.22, AL031587.3, AL031289.1, AC005995.3, AL353597.20, AC011462.4, |
| | | | | | AL138762.20, AC010976.5, AC006538.1, AC002310.1, AL161747.5, AL050332.15, AL034420.16, |
| | | | | | AC009477.4, AC005695.1, AL356481.16, AJ277546.2, AL138725.19, AL445237.16, AC006208.3, |
| | | | | | AJ009613.4, AF288742.1, AC007282.4, AC011443.6. |
| HNHKV56 | 158 | 800877 | 1-1639 | 15-1653 | H86448, AC009396.5. |
| HOACG07 | 159 | 792928 | 1-1284 | 15-1298 | AL529455, AL527447, AL519665, AL530298, AL526667, AL520518, BF312602, AL527270, AL523402, |
| | | | | | AL525526, AL525575, AL532418, BE795641, BF689773, BF690313, AL532417, BE793892, AL523401, |
| | | | | | BE798089, AW961032, BF978883, BE794106, BG117486, AL517000, AW375519, AW375527, |
| | | | | | AI761506, BF836264, BF237461, AA738047, AU123303, AI744657, AI573291, AA058761, BE259536, |
| | | | | | AI765107, BE502073, BF087384, BE888732, BE779165, BE394031, AW246799, AA700013, AW631125, |
| | | | | | BE786533, AA759011, BF315852, BE515115, H38495, BE889852, AI375009, BE702984, AI587531, |
| | | | | | AI148268, AL516999, AI809308, AW250662, T15960, AI890594, AI298775, BF102631, AA838498, |
| | | | | | AW137267, AI798469, AA838214, AI825338, AI200417, AU149319, R00301, AI085034, AI436070, |
| | | | | | AA036978, AI040364, AI537302, AA587887, AI341279, T99954, AA588536, AI368583, BG171023, |
| | | | | | AA366003, BE536848, AA573353, AI357177, AI474992, BG178921, AW872754, AI248063, AW337164, |
| | | | | | AW082916, AW663937, AW589264, AA830722, AA719102, T85297, AA683570, AW473394, |
| | | | | | AW630338, AI927184, AI500302, H78131, AI991231, BE644792, BF055078, AI766544, AI365563, |
| | | | | | T32118, AI344370, AI469218, AI370730, AI668957, AA036979, BF591154, AW973504, T85508, |
| | | | | | AW404558, AA365119, AI739608, AI263592, T98466, BG231108, AW663122, AA338808, AW167738, |
| | | | | | T98407, BE788568, F31030, H27770, AA434441, AW103958, AI364615, AI347419, AV756067, |
| | | | | | BF436680, BF436679, AK000557.1, AK022713.1, AK024220.1, AL109804.41. |
| HODBB70 | 160 | 520196 | 1-590 | 15-604 | AW079904, AW207285, H18498, R37566, BF852425, BF102683, AC006322.2. |
| HOEBK60 | 161 | 789396 | 1-2204 | 15-2218 | AL515934, AL520231, BE618778, BE618245, BE782129, BF056891, BG121474, BG250670, BG168174, |
| | | | | | BE905489, AI633878, BE042542, AL518067, AW515316, AW088411, BE536123, BE218306, BE644805, |
| | | | | | AW207435, BF087512, BF570490, AI818209, AI752319, AW962355, AL536159, AI669659, AA902264, |
| | | | | | AW105148, AW410334, AW083012, BF515266, BE465947, AL518068, AI927938, BG260989, |
| | | | | | AI420205, BE465917, AA043792, AI743602, AI283114, D81907, AL515935, BE546476, AA186486, |
| | | | | | AI417561, AU131122, N66098, AA573278, AA431514, AI752320, H14424, R59054, AI819645, |
| | | | | | AI631297, W00707, AI434568, BE221654, BF104164, AA973972, R59803, AA350599, H11851, |
| | | | | | AA724174, R17805, BF924661, H19130, AI638738, AI440413, N98699, AI702887, AA431188, |
| | | | | | AA280575, BF838288, R61472, AA653570, R77568, AI753861, C00128, BF998349, H29435, BF377857, |
| | | | | | AA348799, R18745, AI962149, AA809488, D78858, AA305344, AA360504, BF837084, BF352331, |
| | | | | | AI440138, AL135399, AA300827, AA329088, H83314, AW089455, D62361, AW811797, BE889780, |
| | | | | | BE561984, AI925346, BF374906, D78824, AW796219, AW811796, BG027920, N55732, BG036911, |
| | | | | | AW796258, AW410333, N90043, Z25249, R61473, BE899608, AA043666, AA174177, AA350598, |
| | | | | | BF089446, AW514435, AA095955, BF089445, BE736007, AA092014, AA096434, AW275782, |
| | | | | | AW275777, AA427677, AI624981, AI749472, AA704575, BE171096, AL044986, AW089135, W19853, |
| | | | | | BE940131, BF514239, BE163882, BE163878, BF243117, AK023143.1, BC004183.1, BC007219.1, |
| | | | | | BC000935.2, AK001928.1. |
| HOFMO16 | 162 | 596835 | 1-1128 | 15-1142 | |
| HOFNB74 | 163 | 762821 | 1-1022 | 15-1036 | AL528391, AV705461, BE742621, AW957840, AW957916, AA313780, AA469996, BF699406, |
| | | | | | BE897665, AA206557, N31702, AA459482, BE790325, BE899574, AW971024, AA460494, AI052029, |
| | | | | | AI761638, H55824, AA628498, AA412069, AI027538, AW514954, AI884599, AI419408, AW469200, |
| | | | | | AI992152, AA024623, AA581877, R62921, AI142045, AI275439, AI066572, AI939991, AA328484, |
| | | | | | AW002064, AA025955, W73635, W52125, AA492218, AL513597, AL514791, AL514935, AV723772, |
| | | | | | AV682289, AA954252, AW080838, AW166645, AV681668, AI906328, AI149592, AV682266, |
| | | | | | AL514087, AI907070, AI815383, AI220734, AV723204, BG108147, AL515047, AL514473, AL119049, |
| | | | | | AI624859, AV758217, AV756703, AV681857, AL515373, AV758592, AV758738, AL514627, |
| | | | | | AV682441, BE619513, AV723062, AV693157, AV733397, AL514543, AV705644, BF724691, |
| | | | | | AV682351, AV710479, AL513803, AV706777, AV661310, AV708119, AA328485, AV682479, |
| | | | | | AV730922, AV755581, AV681630, AV682252, AV682772, AI345860, BF673434, AI590482, BE777769, |
| | | | | | AV682051, AV758110, AV757205, AV682330, AL523243, AV682099, AA022458, BG058208, |
| | | | | | AL536633, AV682335, AI682106, AW132121, AV756477, AI907061, AL516344, AV729334, AL514359, |
| | | | | | AL524807, AV682466, AV711509, AV682385, AI525064, AV682521, BG108324, AL514075, |
| | | | | | AV682496, AV734638, AI349772, BG105099, AV734425, AV681586, AV681951, BF732407, |
| | | | | | AV733470, BF037607, BG109857, AV729701, BG259801, AV711355, AL513985, AL513907, BF940608, |
| | | | | | AV682249, BF725868, AL513763, AI345111, AI344182, AV661309, BE881155, BF795712, AV682809, |
| | | | | | AV681858, AV733824, AL513817, BF054789, AV711924, AV681872, AV682645, AV757096, |
| | | | | | AW168591, BF982085, AV755207, BE966443, BF107577, BE208710, BF348329, AL047042, AI569870, |
| | | | | | AV681949, BF726322, AV682222, AW071349, AW467961, AV734318, AI524991, BF791874, |
| | | | | | AV723953, AL514803, AW827203, AL513631, AV682476, AV758806, BE891101, AL519188, |
| | | | | | BG109125, AV704350, BF968041, AL513719, AL514657, AL514085, BF916588, AV734180, AV729890, |
| | | | | | AV655645, AV695052, AI207510, BF036115, AL514691, BE613622, BF337043, AL515041, BG120135, |
| | | | | | BE048026, BF339420, AI868831, AL514823, BG257535, AI349645, BG259943, AV724569, AA528822, |
| | | | | | BG179633, BF981774, BG109969, BE047863, BE966577, AV693410, AV732941, BE878186, AV704928, |
| | | | | | AI909662, AL513693, BF340104, BG033403, AV755614, AL121270, BG179993, BG254754, AI340582, |
| | | | | | AL512733.1, S78214.1, AL133640.1, AF090934.1, AL442072.1, BC008387.1, AL389978.1, AL050393.1, |
| | | | | | AB048953.1, AL049938.1, AF090900.1, BC007021.1, AB056809.1, AF078844.1, AB055303.1, |
| | | | | | AF090943.1, AL136586.1, AF125949.1, AL050146.1, AL157431.1, AL117457.1, AL133016.1, |
| | | | | | BC008417.1, AL442082.1, AL110196.1, BC008365.1, AL122050.1, AL137527.1, AL353594.13, |
| | | | | | AL117460.1, AL136787.1, AB056420.1, AL133606.1, AF090903.1, AF090901.1, AB050510.1, |
| | | | | | AF104032.1, AJ242859.1, AL133258.16, AK026608.1, AF218014.1, AK000212.1, BC008488.1, |
| | | | | | AB049758.1, AL080060.1, AL390167.1, AL359596.1, AL359601.1, AL049452.1, BC003687.1, |
| | | | | | AL110221.1, AL136749.1, AF106862.1, AC006336.4, AB063046.1, AL136789.1, AF111847.1, |
| | | | | | BC003683.1, AB047615.1, AL096744.1, AK027868.1, AL162006.1, AB060887.1, AF090896.1, |
| | | | | | AK026865.1, AB048964.1, AL050149.1, AL136892.1, Y16645.1, AB063070.1, U42766.1, AK026741.1, |
| | | | | | AB019565.1, AL050116.1, AB055361.1, AL122093.1, AB060916.1, AC005940.3, AK025339.1, |
| | | | | | AK025084.1, AL050108.1, AL499604.9, AL121952.18, AB060908.1, AC010879.2, AL445236.22, |
| | | | | | AB056768.1, AB063008.1, AL049430.1, AF091512.1, AL162083.1, BC001967.1, AL133075.1, |
| | | | | | AC005225.2, AK026045.1, AK025958.1, AL049314.1, AC026787.4, AC007375.6, AL049776.3, |
| | | | | | AL133344.28, AB048974.1, AB047801.1, AL049466.1, AL034374.2, AC026464.6, AL035067.2, |
| | | | | | AL136799.1, AC006357.5, AC007172.6, AF219137.1, AL353802.14, AL050277.1, AC007298.17, |
| | | | | | BC006807.1, AC006435.7, AL133557.1, AL080137.1, AC026307.16, AC004686.1, AC005886.2, |
| | | | | | AF097996.1, AL360294.11, AC010077.1, AC020558.4, AL080124.1, AC007043.3, AL137283.1, |
| | | | | | AC000111.1, AK026855.1, AK027096.1, AC002464.1, U95739.1, AC009145.4, AL389982.1, |
| | | | | | AC006039.2, AC024247.4, AK026744.1, AL122123.1, AL133093.1, AL133080.1, AL136844.1, |
| | | | | | AC005000.2, AL133565.1, AC004690.1, AL137459.1, AL035587.5, AL136768.1, AC006371.2, |
| | | | | | AL512746.1, AC021325.5, AP001699.1, AC020921.5, AK000618.1, AC005291.1, AL122121.1, |
| | | | | | BC002733.1. |
| HOHBO66 | 164 | 853375 | 1-1776 | 15-1790 | AL514591, AL515698, U51698, BF980392, BF525362, BE545041, BG119652, BF662991, AF142580, |
| | | | | | BF529862, BF792819, BF316356, AV661861, BE275539, BE897634, BE275581, BG120250, AW753619, |
| | | | | | AW369740, BG231720, BE514934, BE314321, AA625561, W72325, BF924219, BE646294, AW190127, |
| | | | | | AI744539, AW960688, AW958482, BF096207, BE843905, AI818046, BE312780, AI148823, AI911887, |
| | | | | | AI761511, AW250827, AI339159, BF242343, BE090100, AI092249, BF326698, AA210991, AA579979, |
| | | | | | BE275606, AV716564, AW402371, AW602002, BG249561, AA805668, BG109287, BE875739, |
| | | | | | BF576896, BG249196, BF032924, AU132598, BE889104, BF672317, AV714064, AV715127, AV717621, |
| | | | | | AV714198, AV713907, AV713990, AI207612, AI133220, AL038985, AV649250, AV734219, AV647955, |
| | | | | | BE909562, AV714647, AV714027, AV715811, AV714612, BG036237, BE677625, AI444571, AU127994, |
| | | | | | AL529892, BF673104, AV757743, AV714698, AV715067, AV715230, AV715535, AV717773, |
| | | | | | AA290643, AV711261, AV756185, AA305186, AV758452, BG035774, BE904072, AV714134, |
| | | | | | AV714607, BE259652, AV651042, BF691355, BG114310, BE780254, AW068844, BE877190, |
| | | | | | AV662310, BF037876, BF344767, BF674367, BE778740, BE880308, AV715907, BF576638, BG166184, |
| | | | | | AW844714, BF574463, AV716682, AW389525, BE504100, AW081185, BF215518, BE710295, |
| | | | | | AI907843, AA082142, BG115853, AV759509, BF923164, AV647965, AV661959, BF094085, AA309569, |
| | | | | | AW629881, AA310090, AL529891, BE543758, BE789752, AA157603, AA099988, BG249323, |
| | | | | | AI095655, C05087, AW068734, BF575823, BF790790, BF671005, BG109150, BF576248, BF672024, |
| | | | | | BF672662, BF574185, BF577139, BF574300, BF790442, BF576389, BF695048, BF575488, BF790998, |
| | | | | | BF575157, BF694795, BF672042, BP791268, BF670595, BF576658, BF575173, AW958488, BF574330, |
| | | | | | C03538, AV756552, BE385539, BF670646, BF694761, BF577293, AV691857, AI750264, W01220, |
| | | | | | AI337237, BF895630, BF574154, AI439571, BF672008, BF694739, BF791085, BF576584, BF672304, |
| | | | | | BF694929, BF671530, AA211386, BF670511, BF895656, BE563574, BF672207, BF672469, BF575743, |
| | | | | | BF693801, BF576235, BF693634, BF770271, BF895652, BF895621, AA215507, C18886, BF576736, |
| | | | | | BF791114, BE543762, BF672786, BF576071, BF574872, BF672725, BF577134, AA337932, BF895657, |
| | | | | | BF790905, BF692924, BF671342, AI357128, BE709306, BF694724, W74391, BF693794, BF895618, |
| | | | | | BF895653, BF576211, AW964198, AW069648, BE001231, AV729302, BF575558, AV649417, |
| | | | | | AV649433, AV649210, AV649443, AV647982, AV649192, BF672806, AV695866, BF895634, |
| | | | | | AA315723, BF575652, BF574446, AA383985, BF895626, BF672707, BF692921, BF574563, BF574420, |
| | | | | | BF575317, BF670554, AV649166, BF693840, BF577137, BF789916, AJ249940.2, BC000591.1, |
| | | | | | AK026173.1, AF083208.1, AC003103.1, X54304.1, BC004994.1, D50372.1, U26162.1, Z97183.1, |
| | | | | | AC005951.1. |
| HORBS82 | 165 | 638293 | 1-1111 | 15-1125 | AA716165, AW014086, AI675797, AI915560, AI093476, AI619556, AA346257, BG170965, AI674463, |
| | | | | | AI656676, AW962578, H26720, F32296, F33070, F24055, F23333, F32966, AI370391, AI446003, |
| | | | | | AI560806, AA857847, AW130863, AI282355, AI241901, AI889818, AI611743, AW243878, AI619502, |
| | | | | | AI630928, AI953765, AW083804, AA504514, AW081179, AA814782, BE967273, AI554821, AI620056, |
| | | | | | AI285735, AW262983, AI355849, AI245332, AI018686, AI635464, AW183620, AW020095, AL036187, |
| | | | | | BE966547, BG105445, AL036509, AI680498, BF970652, AW149869, AI433611, BG181012, BF914091, |
| | | | | | AI271796, BE621256, AV702932, BE962857, AI824557, AA555145, AA449768, AL513697, AW089009, |
| | | | | | AI368579, AW020592, AW130403, AL514823, AW022494, AW020288, BE785348, AL513817, |
| | | | | | BG108350, AW073996, AA937558, AV724929, AI863321, AI684127, AW075648, AW082997, |
| | | | | | AL514035, AI811911, AW168485, AV705811, AW083825, AI972170, AI537045, BE964576, AV734654, |
| | | | | | AI815239, BE964792, AI434833, AI301507, AI687168, AI289791, AL513693, AA808175, AL513911, |
| | | | | | BF763498, AI918634, BE965014, AI623736, BE965891, AI952249, AI862139, AW081343, AI923768, |
| | | | | | AL513809, AI050666, AI367210, AW170725, AA835947, AW025412, AW082040, AW025279, |
| | | | | | AW079045, AL513789, AI432532, AI874189, AI289608, AI536685, AI680113, BE965031, AW189268, |
| | | | | | AW827211, AW082623, BE965053, AI560023, AI439762, AW029611, AI978720, H89138, AI801592, |
| | | | | | BF339322, AA603709, AV659322, AI925404, AI627714, AW008090, BE735370, AW075519, AI866691, |
| | | | | | AI559737, AI921753, AI718161, AI582932, AI872545, AI446809, AA904121, AI251434, AI784214, |
| | | | | | AL514357, AW193467, BF338782, AA983883, AA480074, AW075482, AL514473, BG179586, |
| | | | | | AL514557, AI804983, AI697045, AL514691, AI924971, BF338027, BE299813, AW085373, AA514684, |
| | | | | | AL513553, BE966571, BE963909, BE964150, AI915207, BG178911, AI469516, AW151835, BF968679, |
| | | | | | AI475394, AI568114, AL514627, AW151850, AI457369, AI824648, BF038804, BE965481, AI375730, |
| | | | | | AW085667, AW192245, AA493923, AW059713, BF025686, BE878953, AI640379, AI498579, AI888665, |
| | | | | | AL038778, AW162189, AL515235, AI744243, AI691088, AW073868, BE964967, AI933940, BE613727, |
| | | | | | BE875442, AL514929, AW161202, AI961590, AI680435, BF968622, AI873638, AI863082, AL514455, |
| | | | | | AI915295, AL514101, AI859644, AW088944, AW089327, AI658566, AW806761, AI564186, BG179099, |
| | | | | | BF526494, AL513723, AL514983, AI811168, AL514089, AL514871, AW082060, AI925463, AL513779, |
| | | | | | AI952542, AI285439, AL514409, AI812107, BF971669, AI619751, BF904248, AI635478, AL514721, |
| | | | | | AL513999, BG105501, AI628325, AW020710, BF525392, AL513823, AI745713, AL034419.22, |
| | | | | | AK027081.1, BC002777.1, BC004926.1, AB063046.1, AF090900.1, AK000598.1, BC003591.1, |
| | | | | | BC003682.1, AK025099.1, AB047953.1, AL353957.1, AC004987.2, BC002495.1, AK025906.1, |
| | | | | | AF303581.1, AF178432.1, AC008592.4, BC003410.1, AK026528.1, AL133088.1, BC008708.1, |
| | | | | | AB060826.1, AB048910.1, BC004943.1, AB063071.1, AL050170.1, BC000799.1, BC005805.1, |
| | | | | | BC006164.1, AL136789.1, AL162062.1, AK026045.1, BC007517.1, BC003687.1, BC009311.1, |
| | | | | | AB052191.1, AL121916.14, AL389935.1, BC001294.1, AK027121.1, AB050510.1, AK026590.1, |
| | | | | | AL080074.1, BC001470.1, BC001236.1, BC002373.1, BC001328.1, AB060929.1, AL353956.1, |
| | | | | | AK000636.1, AL359624.1, BC004908.1, AB055303.1, BC007522.1, AB060887.1, BC006832.1, |
| | | | | | AJ004832.1, BC000066.1, S77771.1, AJ406937.1, BC001418.2, AK025375.1, AF179633.1, BC008649.1, |
| | | | | | AF245044.1, AK000432.1, AF141289.1, AB049892.1, BC008718.1, AK024974.1, AK027142.1, |
| | | | | | BC008983.1, AC007383.4, AL133640.1, AL137523.1, BC007453.1, AL137480.1, AP001346.1, |
| | | | | | AL110221.1, BC000054.1, AL137495.1, AL136925.1, AC004213.1, AL161802.15, AC006112.2, |
| | | | | | AL354828.12, AL035458.35, BC009033.1, BC001774.1, BC007248.1, BC005816.1, AL122111.1, |
| | | | | | AK027193.1, AF369701.1, AK026551.1, AL035407.15, AL356859.12, BC001801.1, BC002752.1, |
| | | | | | Y00093.1, BC006345.1, AK024747.1, AB049758.1, AK026855.1, AK024538.1, U77594.1, AB060229.1, |
| | | | | | BC007031.1, AK026542.1, AL080057.1, BC000008.1, BC000386.1, AK026480.1, AK025084.1, |
| | | | | | AL157464.1, AL080127.1, AL137705.1, AL121601.13, Z49258.1, BC002733.1, BC002491.1, |
| | | | | | AB049848.1, AF217973.1, AF239683.1, BC002409.1, AC006451.5, BC003105.1, AL157360.8, Y14040.1, |
| | | | | | AL389978.1, BC002839.1, BC009395.1, AF067420.1, AP001731.1, AK027154.1, AB060881.1, |
| | | | | | BC002471.1, AL137711.1, AB050431.1, AK024855.1, AF274348.1, AF274347.1, AF352728.1, |
| | | | | | BC006087.1, AL353940.1, AF004162.1, AL050092.1, AL136787.1, S76508.1, X53587.1, AF232935.1, |
| | | | | | AL132985.4, BC004481.1, BC008507.1, BC002344.1, AF094850.1, AP001666.1, BC001099.1, |
| | | | | | BC004431.1, AL133010.1, Z94277.1, AL137556.1, BC002399.1, BC003104.1, AK025209.1, AF110640.1, |
| | | | | | AF120268.1, BC008788.1, BC007534.1, AK026038.1, AC008507.8, AC026307.16, AC007172.6, |
| | | | | | AL031732.8, AC017082.4, AK026749.1, AF012536.1, BC007053.1, BC009026.1, BC002444.1, |
| | | | | | AF218014.1, BC001785.1, AC002540.1, AF225424.1, AK025414.1, AF217987.1, BC007355.1, |
| | | | | | AK027164.1, BC008723.1, AL512689.1, AK000753.1, AL121952.18, AL133062.1, AL136979.16, |
| | | | | | U91329.1, AF095901.1, BC007034.1, BC002958.1, AL080060.1, BC007389.1, AK026395.1, |
| | | | | | AL356747.18, AL590076.3, AF022813.1, BC004925.1, AC008897.7, AL137461.1, AL080110.1, |
| | | | | | BC006196.1, AL117585.1, AL136843.1, S69510.1, AF044323.1, AK026526.1, BC002574.1, |
| | | | | | AL355143.17, AL157878.11, AC020956.6, AF358829.1, AF028823.2, AF162270.1, AB060893.1, |
| | | | | | AK026518.1, AF177336.1, AK026793.1, AK026630.1, BC006287.1, AL136586.1, AF321617.1, |
| | | | | | BC006465.1, AK000647.1, AK026649.1, AC005968.1, AK000450.1, M19658.1, D83989.1, AL049464.1, |
| | | | | | AF073483.1, AF217989.1, AF217966.1. |
| HORBV76 | 166 | 839270 | 1-1143 | 15-1157 | BF982706, AI571494, AI888858, AA703510, AA128464, AI091675, AA129916, AW613716, AA569492, |
| | | | | | BE937241, AW301397, AW301415, AI637838, BF056511, AW082378, D12398, AA325607, BE879070, |
| | | | | | W93799, BF091683, BE170912, AW051087, AW089279, AW935039, AA910432, AB017165.1, |
| | | | | | AC005971.5, AJ009616.3. |
| HOSDO75 | 167 | 862049 | 1-888 | 15-902 | AI375670, AI990134, AA732220, AI494146, AA172039, BE777959, AA258154, AI394315, BF086933, |
| | | | | | AA172291, BE093382, AA456756, N57268, BF086946, AU138426, AU139896, BE093384, AA113041, |
| | | | | | AA258916, AK002100.1. |
| HOSEI81 | 168 | 562778 | 1-883 | 15-897 | AA418350, AA418237. |
| HOUDE92 | 169 | 580866 | 1-1270 | 15-1284 | BE736091, BF237553, BE781264, BF686547, BE313480, BE872070, BF313936, AI138711, AI348027, |
| | | | | | BE502126, BE258631, AA524244, AW873570, AI982983, AI367855, AI052179, N90758, AA325647, |
| | | | | | AW419076, AW873111, AW008195, AI304671, AI367495, AW964887, AI609692, AA019213, |
| | | | | | AI279349, AI581275, AI224904, AI141287, H14110, H41440, AI017367, H29060, H29163, AA482386, |
| | | | | | AI471043, AI742262, AI262559, H52568, AA872715, R60248, H06091, AI041676, BE856821, H86160, |
| | | | | | H86771, AI241156, AA872384, R60761, AW131262, T31006, H56455, H95225, AA535480, AA678522, |
| | | | | | AA953998, R93546, R47352, BF968234, C04826, N39943, AA779062, T31180, H69216, AA017105, |
| | | | | | AA738315, AA019233, C04344, C05015, H17526, R99865, H84704, AW025505, AA057567, N72695, |
| | | | | | H86419, W02476, N27200, AA001522, AW194286, AI264419, AI220672, AI290418, T30927, AI620442, |
| | | | | | AA985424, R49316, H86772, AA725465, R91429, R93547, AA017106, AI074855, H95701, H69217, |
| | | | | | H95226, AW188581, AI678424, AA057566, AA326095, AA976949, H56456, W57713, AW166317, |
| | | | | | Z42112, AA775239, AI864069, AA918031, H85105, AA015626, AA977988, AA429622, R99866, |
| | | | | | H14085, AI000910, AI431360, Z38375, W57838, AA015625, R57558, AI949351, AI262422, AC005865.1, |
| | | | | | AF217967.1, AK027366.1, AC005912.1. |
| HPCAL26 | 170 | 762822 | 1-3083 | 15-3097 | BG164171, BG171313, AW338908, BE327883, BF058325, BE856282, AL525344, BG027433, AA621714, AL047905, AW780148, |
| | | | | | AI633775, BE973735, AW438611, AI755212, BF381979, |
| | | | | | AW337238, AI337968, AI963595, AW572336, AA432021, AW471145, AW069566, AA448477, |
| | | | | | AI936887, BF108841, AI829408, BE748629, AI042324, AI955816, AI421409, AA758227, AA814190, |
| | | | | | N91448, BF030663, AW192439, AI683517, AA417975, AI129364, AI561083, AA418135, AI088536, |
| | | | | | AW628520, BE327874, W72280, BE878275, AI348236, AI088467, N26180, AI628017, AI066421, |
| | | | | | AI346288, AI142951, AI308778, AI446338, AA458899, AI078536, AI346382, AI753070, AA923036, |
| | | | | | AI431409, AI087120, AI341640, AI567761, AI371263, AI754690, AI285250, BE619821, AA630948, |
| | | | | | AI354829, BE620033, AW294799, W45027, AI902379, AI537262, AI866883, N27411, BE876666, |
| | | | | | BF338393, AI963351, AI081820, BE395375, BE620777, BE906942, AI811301, AI627940, AL538418, |
| | | | | | AA602460, BE548617, BF038519, AW205903, BF893012, W76307, AA701166, AL525384, AW023777, |
| | | | | | AW956752, BE122762, AA128212, AI094190, BG163634, AI371264, AW856743, AW380612, R81003, |
| | | | | | BE905099, N23359, BE619502, AI589929, BE905025, AW469305, AI254707, N67744, BE619375, |
| | | | | | AA961234, BE906749, BE784570, BE909607, AW387116, BE904894, BF695306, W25857, AA134565, |
| | | | | | AW044064, AW802015, BE673511, R76732, AI392841, BF509258, BE503655, BE880509, AI299995, |
| | | | | | AA304323, AI074674, BE788330, AI086914, AA383490, AW630488, AA977524, AW802237, |
| | | | | | AA296648, AA431796, AA047280, AA813746, AW236745, AA193605, AA127172, AW080334, |
| | | | | | AI696769, BF437027, BG167009, AW361256, BE938690, R76394, BE218539, R39674, BF475923, |
| | | | | | BE843065, AW819110, AW819102, R39598, R80801, AI540488, AA134564, AA193568, AW818988, |
| | | | | | AI245052, N55215, BG120706, AA307251, BG119547, BE843137, BE816369, AW957969, AA776346, |
| | | | | | AW819052, C01782, AW517411, AI906011, AA303350, T24798, BF799939, AW603344, BE748082, |
| | | | | | W39532, BE543246, AA047141, BF800032, N34692, BE168974, AA340956, BE620236, BE937574, |
| | | | | | BE122763, AW818992, AA304405, AF193611.1, BC001278.1, AF015287.1, AL136914.1. |
| HPEAD23 | 171 | 773409 | 1-568 | 15-582 | BG037089, BF973374, BG025260, BF981319, AI827721, AI220233, BE876017, AA910948, AW663886, |
| | | | | | AA728767, AI279770, BF727458, AA972390, AI051448, AA932444, AI346841, AA740783, AI186713, |
| | | | | | AA948231, AA905780, AA918553, AA884145, AI268749, AI346070, AA858123, AA857640, BE275406, |
| | | | | | AW025402, AI262503, T95182, AL389983.1, AK025239.1, U90913.1, AF234997.1, AF028823.2, |
| | | | | | U78525.1, AL137298.1, AL389943.1, AK025254.1. |
| HPEBA84 | 172 | 753957 | 1-1146 | 15-1160 | AV702197, AW964983, AI283912, AV688589, AA679863, R77836, AA112690, AI686145, AA342049, |
| | | | | | AA658167, AA112689, AA640275, AA342050, BF876992, AL161799.19. |
| HPFCI36 | 173 | 855966 | 1-865 | 15-879 | AL516624, AW967335, AI346493, BF969871, AI379068, AW813968, AI435632, AW439597, AA160513, |
| | | | | | AA111896, AI129000, AI803023, AI587653, AI247913, AW080897, AA111878, BF197837, T58186, |
| | | | | | H04232, W07286, BE243262, BG165835, AA046003, AW028757, BE882257, BE393612, AA357180, |
| | | | | | AA085677, AA085834, AA621577, R36594, BF733978, AI014838, AL536330, AV753531, AV751871, |
| | | | | | R36593, AV752854, AW605869, AA341976, T58072, AW955926, AA576671, BF825158, BF245058, |
| | | | | | AL527071, AI367586, N79788, AA321931, AI566375, AI709192, AW379008, AA441898, AK000452.1. |
| HPFDI37 | 174 | 862056 | 1-338 | 15-352 | H55085, AA434130, R25258, R20029, H14658, AW950901, BE275081, R19886, BE727676, BG248105, |
| | | | | | BF345809, BE730221, BE904350, AC000090.2, AF106697.1, BC007489.1, AF171054.1, AF044212.1, |
| | | | | | AF166126.1, AF166127.1, AB019694.1, AB019695.1, AF201385.1. |
| HPIAA80 | 175 | 829972 | 1-905 | 15-919 | BE865466, BG170320, AW043782, AW662099, AI933030, BF432372, AI553724, AA629903, |
| | | | | | AW341957, AW073315, AW972918, AA542856, AA380138, H22229, BF667499, C02428, BF573889, |
| | | | | | BF695553, BF697671, BF982558, BE694971, BE961006, BE865295, BF507508, AW467509, BF571682, |
| | | | | | AW372886, H25153, AA302738. |
| HPJCW58 | 176 | 612866 | 1-1151 | 15-1165 | |
| HPMCV30 | 177 | 612870 | 1-894 | 15-908 | BG122182, BG034611, BE548730, BG110667, AW205272, AI800593, AI802988, F25189, AI740610, |
| | | | | | N23684, AW470648, AL120942, BF530954, AA890692, AI352429, AI634593, BG060184, AA554454, |
| | | | | | BG255820, AU145072, AW026128, BF431915, AI937808, AA593782, BF436462, AI826416, AI362153, |
| | | | | | AW071745, BF345276, BG107551, F28025, AA629269, AV762395, BF527699, AI216789, BG059451, |
| | | | | | N33439, AI362065, F37490, AI721014, AW874543, D52077, BE208411, AL042101, F25151, AI144207, |
| | | | | | AI423120, AA229607, F24889, F20765, AV761362, F30834, R84504, T27765, AV763971, AW006041, |
| | | | | | AI334443, BF668217, AL119691, AV763418, BF766630, AU147922, BG060172, AA523503, AW975164, |
| | | | | | AI720758, AA302029, AV759935, BF241967, BF677892, AF177861, AV763540, BF477449, AI284640, |
| | | | | | AV744105, AV761489, AI061361, AI904894, AL046409, BF982691, AI053445, AV744733, AI865213, |
| | | | | | AV762111, AV763255, AV735370, BF984558, AV741390, AI963720, F25232, AV761786, BG249643, |
| | | | | | AV759274, BF674369, AI289199, BF475381, AI679782, AL138455, AV762098, BF919090, AI500671, |
| | | | | | BF918590, AI004246, AA581903, F16559, AI306630, AI291821, AI792287, AI284007, AW193265, |
| | | | | | BF793766, AA703891, BF792268, AI431303, AI708009, AW274349, AW970571, AW303196, AI252506, |
| | | | | | BF701281, AV762826, AA302020, AL041690, AI613280, AV682003, AA501614, AL037910, AI370475, |
| | | | | | AW473163, AV702609, AV706237, AV763401, AI133164, BF915839, F19506, BG230879, AA954712, |
| | | | | | AW301350, AV760937, AV763354, AA308136, AF330238, BF337291, AA374320, AL044940, |
| | | | | | AA320811, AV758722, AW472872, AW438643, AI345654, AW021583, AV762397, AW265393, |
| | | | | | AV762139, AA469451, AI350211, AW075979, AW406447, AW662543, AA872171, AV759967, |
| | | | | | AV713291, AW500125, AW515448, AW504485, AI623899, AW872676, BF681619, AI281881, |
| | | | | | AW088846, AI281903, AW974109, AW021207, AL046205, AL045709, AI418972, AV710066, |
| | | | | | AI270117, AV762505, AV764307, AI272314, AI273107, AA491814, AW407578, AI890348, AV762064, |
| | | | | | AA490183, AW276827, AV760057, AW276435, AA523497, AV763670, BF725347, AI343143, |
| | | | | | AV761843, AI754253, AV762009, AI927380, AA521323, AA494038, AI696962, AW327868, AI345681, |
| | | | | | AI345675, AW338086, AV761925, AV703682, AI471572, AV658688, AW576287, AW302013, |
| | | | | | AW162049, AI246119, AA720702, AV762050, AW963497, AC005517.7, Z11692.1, AL049780.4, |
| | | | | | AL135928.6, AC008372.6, D83989.1, AC009228.4, AP000552.1, AF196969.1, AC004067.1, AC016620.6, |
| | | | | | AL139415.10, AL033529.25, AL133163.2, AL139113.21, AL031295.1, AC090955.2, AL445686.14, |
| | | | | | AC019046.4, AC008543.7, AC009131.6, X55926.1, AL031296.1, AL445205.14, AC012076.4, |
| | | | | | AL121989.12, AL359091.10, AC009077.7, AL049759.10, AP002007.4, X54175.1, AL449209.2, |
| | | | | | AL034405.16, AL158207.15, AC006312.8, AL133371.3, AC018751.30, AC005755.1, AC021999.4, |
| | | | | | AC020754.4, AC003049.1, AC009996.7, AL355922.4, AC009516.19, AL137792.11, AL590031.6, |
| | | | | | AL590762.1, AL121653.2, Z99127.1, AF129756.1, AC005701.1, AC018755.3, AL353716.18, |
| | | | | | AC011495.6, AC023490.5, AC006160.9, AL161937.13, AL118520.26, AC007546.5, AF053356.1, |
| | | | | | AC005261.1, AL355916.2, AL158055.12, AL513008.14, AC006077.1, Z85986.1, AL049776.3, |
| | | | | | AL139045.12, AL161743.20, AB060227.1, AC004805.1, AL121601.13, AL137784.14, AL109935.39, |
| | | | | | Z82190.1, AC005821.1, AL034550.31, AF015148.1, AL117328.5, AC005740.1, X53550.1, AC006334.3, |
| | | | | | AC002544.1, AL356756.4, AC078818.19, AC004909.2, AP000556.2, AC078962.30, AL109804.41, |
| | | | | | AL118556.4, AL133347.28, AC026882.5, AL391827.18, AL354932.26, AC011514.3, AC012309.7, |
| | | | | | AL136418.4, AL139054.1, AL356378.17, X54181.1, AC003043.1, AL138720.19, AC007055.3, |
| | | | | | AL096793.20, AL137073.13, AC005841.3, AL133545.10, AC002300.1, AP001760.1, AL353738.16, |
| | | | | | AC004068.1, AL121808.4, AC005632.2, AC006130.1, AL358777.12, AC004819.1, AC010620.4, |
| | | | | | AC020916.7, Z85987.13, AC005484.2, AC003684.1, AC005832.1, AP000339.1, AC006211.1, U67221.1, |
| | | | | | AL160269.14, AL034417.14, AC084865.2, AC002350.1, AL161896.16, AF077058.1, AC027129.5, |
| | | | | | AC010271.6, AL161626.20, AL450487.17, M19997.1, U57007.1, AL133458.19, AL355136.19, |
| | | | | | AL109921.21, AC003101.1, AC008132.35, AC005064.3, AC008440.8, AL451107.6, AL121825.19, |
| | | | | | AC007432.9, AC004873.3, AC005324.1, AC008747.5, AL139109.14, AL138724.12, AL161672.13, |
| | | | | | AC020898.5, AL157951.5, X51466.1, AC024082.6, AC007405.6, AL359235.3, AL135924.11, |
| | | | | | AC005288.1, AC025435.5, AC005694.3, AL132713.11, AL355499.15, AL008715.1, AF001550.1, |
| | | | | | AL139809.16, Z82180.19, AC012330.8, AL024498.12, AL136992.22, AC023491.21, AL160471.5, |
| | | | | | AP001732.1, AP000474.2, AL031120.1, AL139317.5, AL034423.21, AC009137.6, AP001725.1, |
| | | | | | AP000514.1, AC002351.1, AL132768.15, AC025593.5, AC003036.1, AC073651.23, AL117694.5, |
| | | | | | AL158040.13, AC007981.46, AL138976.5, AL137068.10, AL122058.19, AL359644.10, AL353579.17, |
| | | | | | AL031315.1, AF334404.1, AL161444.18, AC009309.4, AL022097.1, AL445664.14, AC012444.9, |
| | | | | | AP000558.1, AC000052.16, AC005887.3, AC002418.1, AC078994.3, AC002470.17, AP000504.1, |
| | | | | | AL031659.9, AC004386.1, AP000356.1, AL391833.10, M37551.1, AC009244.24, AF015151.1, |
| | | | | | AL390239.16, AL020993.1, AL008721.1, Z97832.11, Y18000.1, AC015541.21, AC026162.5, |
| | | | | | AC005020.5, AP001426.2, AC005041.2, AC005251.1, AC018816.5, Z97055.1, AF181897.1, AC011473.4, |
| | | | | | AL135978.4, AC005598.6, AC006251.3, AC004019.20, AC008760.6, AL391262.3, AC005179.1, |
| | | | | | AC025265.21, AC018641.3, AC034242.5, AL109963.4, AL035448.29, AC024085.5, AL023879.1, |
| | | | | | AL163201.2, AC005274.1, AL034380.26, AC011477.5, AC002310.1. |
| HPRBH85 | 178 | 695752 | 1-1659 | 15-1673 | AI147467, BG252600, BF354490, BF354491, BE999965, BF032961, W52563, AW512426, AI810178, |
| | | | | | BE274472, AI188557, BF432115, N25987, AI700626, N29859, AI659619, N29340, AI031999, |
| | | | | | AA974460, AI267374, BF593262, N36618, AL538054, AI350777, AI656701, AV724003, W01296, |
| | | | | | AI949788, Z39752, H09136, AA234945, W60255, AA635309, Z43693, H09192, AI583723, BE830918, |
| | | | | | N67638, AA371469, AA706920, AI537632, AW028490, AI799012, AA234944, R34999, T64063, |
| | | | | | AA855109, BF082755, BF332778, BF082768, BF082759, BF082766, BF328302, N57281, AW301576, |
| | | | | | AA610602, BE181224, BB830920, R49386, BE009565, BF332781, T63991, N83625, AA495939, H26811, |
| | | | | | AI348901, AI564500, AL039274, AW051088, AI866469, R41605, AL514691, BF871314, BG029058, |
| | | | | | AI889180, AW834282, AI433611, AW089844, AA806757, AL118781, AI370623, AI471429, AL039086, |
| | | | | | AI619525, AI628325, AA464646, AW076124, BE875959, AI345688, AI583558, AL121365, BF033757, |
| | | | | | AL048351, AI285439, AI638644, AI621341, AI524654, AL046466, AI474646, BF970162, AW195253, |
| | | | | | AW020381, AA808175, AV704934, AV750565, AI445069, AI619820, AI537677, AI874107, AI309306, |
| | | | | | AI927233, AI891084, AI589428, AI472487, AI270183, AL079963, BG169738, AW083572, AA806719, |
| | | | | | AI859464, AI951123, AI634457, BF812960, AA470491, BE906646, AI475371, N92140, AW827107, |
| | | | | | BF811808, BF750886, AI684127, AA654216, AI972070, AI473536, AV734747, AV733582, AI590755, |
| | | | | | AW150557, AI499963, AI932503, AW192300, BE393784, BF971340, AW050850, AL046595, |
| | | | | | AA825826, AI582932, AI923989, BE909549, AI978703, BG250575, BF525577, AI536685, AA857847, |
| | | | | | BG253684, BE892118, AV701597, BG170663, AW080140, AV682112, AW025279, BG260760, |
| | | | | | AW021091, BF796402, AI923559, BG260287, AI610446, N25033, AI702527, BE966968, BG256090, |
| | | | | | BF970123, AI861973, AW088183, AI564212, BG034586, AA693331, BG034746, AL138376, AW023072, |
| | | | | | BF089679, AV726156, AW105087, AI866090, AI479292, AV682403, AW021256, AI932794, AV757018, |
| | | | | | BG255493, AW076127, BF527697, AA838435, AI560873, AI590043, AI440260, AV747571, AV656932, |
| | | | | | AI433590, AW029566, AI819976, AW020710, AI609331, AV762892, AI225000, AI357599, BF680133, |
| | | | | | AI954721, BG260524, AI815232, BF724651, BE877142, AL045950, BG026483, AW019988, AI566613, |
| | | | | | BF892007, AI524179, AI368691, BF766531, AW075382, AI567971, AW080076, AV682366, AI539260, |
| | | | | | BE047852, AW172745, BE439677, AW089275, AW020419, AI079736, AL039390, AI879377, |
| | | | | | BE536417, AI500061, AI306610, AW168875, AI537516, BE621256, AI799313, AI096771, T69241, |
| | | | | | BG250789, AV682250, AI225004, AI698391, BG113851, BF680131, AI741158, AK027690.1, |
| | | | | | AB050514.1, AL162002.1, BC008899.1, AK026959.1, AF155656.1, AF326206.1, AF265236.1, |
| | | | | | BC001967.1, AL137459.1, AK024747.1, BC006287.1, AF006516.1, AF117959.1, BC001236.1, |
| | | | | | BC002373.1, AK025113.1, AF245044.1, BC001964.1, BC003590.1, AL136882.1, AL389935.1, |
| | | | | | AL137480.1, AK026389.1, BC002733.1, AB048881.1, BC008946.1, X61970.1, AK027096.1, |
| | | | | | AL359583.1, X99226.1, AB051158.1, BC008708.1, BC009395.1, BC004925.1, AL137711.1, AF274348.1, |
| | | | | | AF274347.1, AK026534.1, AK024588.1, AL512733.1, X59812.1, AK025015.1, BC001199.1, |
| | | | | | AL136864.1, AB062978.1, M92439.1, AL137523.1, AL359615.1, AL137550.1, Y10080.1, AL110196.1, |
| | | | | | AB044547.1, AK027142.1, BC002476.1, AJ006417.1, AB055370.1, AF195092.1, AK026647.1, |
| | | | | | AF026816.2, BC009026.1, AF353396.1, AL136622.1, AK025906.1, AK026541.1, AF131821.1, |
| | | | | | AF044323.1, BC000778.1, BC003658.1, AL137657.1, BC008488.1, AK025209.1, Z37987.1, AL122100.1, |
| | | | | | BC005843.1, AK026434.1, AL117435.1, BC001328.1, BC000090.1, AL136586.1, X72889.1, BC003637.1, |
| | | | | | AK027129.1, AF056191.1, BC003122.1, AK026649.1, AK000647.1, BC004945.1, AB055361.1, |
| | | | | | AL049464.1, AK026626.1, AB060852.1, BC005854.1, AF205861.1, BC001670.1, AK026506.1, |
| | | | | | BC006807.1, AL133637.1, AK026633.1, BC008920.1, BC007364.1, BC000386.1, BC000643.1, |
| | | | | | AL080146.1, AL137478.1, BC008836.1, AL359596.1, AK025084.1, M85165.1, AK025092.1, |
| | | | | | AL512746.1, BC007767.1, S77771.1, AL136893.1, AL353940.1, BC001844.1, BC000235.1, AL050138.1, |
| | | | | | BC009398.1, X83544.1, BC000316.1, AL137267.1, AL137557.1, AL133080.1, AB060837.1, AL133049.1, |
| | | | | | BC000761.1, BC008673.1, AK026518.1, AK027146.1, AK026613.1, BC002466.1, S76508.1, AF227198.1, |
| | | | | | AJ406930.1, BC001082.1, BC005002.1, BC000751.1, AK027081.1, AK027116.1, AK024594.1, |
| | | | | | AK026057.1, AK027210.1, AL117587.1, BC001785.1, BC005168.1, AB056421.1, AL133062.1, |
| | | | | | BC002985.1, U73682.1, AY033593.1, BC006181.1, AL049283.1, AC009364.8, AK026462.1, |
| | | | | | AL137258.1, BC007375.1, AL389939.1, BC000007.1, AF111112.1, AL137627.1, AL512704.1, |
| | | | | | AK027152.1, AL136615.1, AL049382.1, BC006440.1, AK027173.1, Z82022.1, BC002343.1, BC006494.1, |
| | | | | | BC006345.1, AL137663.1, AF106697.1, BC007556.1, AL512718.1, AB060839.1, AK000250.1, |
| | | | | | AK000197.1, BC007420.1, AL050143.1, AL096720.1, AL157433.1, AJ406932.1, BC003410.1, |
| | | | | | AF285836.1, BC004297.1, AL137275.1, AL110280.1, AC002467.1, AC020908.6, AK026600.1, |
| | | | | | BC002491.1, AB060893.1, BC007255.1, AF114784.1, BC007852.1, AB048995.1, BC004874.1, |
| | | | | | AB052200.1, BC008078.1, BC001675.1, AK027136.1, BC005890.1, AF057300.1, AF057299.1, |
| | | | | | AL356103.8, BC007674.1, AL080124.1, AL133104.1, BC005858.1, AK024533.1, AK027137.1, |
| | | | | | AL122104.1, BC002541.1, AB050410.1, BC004951.1, BC007204.1, AL050172.1, BC007456.1, |
| | | | | | BC006196.1, AF183393.1, AK027164.1, BC002495.1, AK025632.1, AB050431.1, AB060888.1, |
| | | | | | AF061795.1, AF151685.1, AK000618.1, U42766.1, AL136787.1, AK000653.1, AF102166.1, X66417.1, |
| | | | | | BC000077.1, AB060229.1, BC004960.1, X82434.1, AL049339.1, Y14040.1, BC004991.1, AF159141.1, |
| | | | | | BC006091.1, BC008591.1, BC003591.1, BC002519.1. |
| HPRCD35 | 179 | 853551 | 1-695 | 15-709 | AI952238, BF966633, BE673553, AW249944, AW673164, AI491912, AI433456, AW027835, AI434093, |
| | | | | | AA040338, BG152387, AI744101, BF589019, AI433927, AW388710, BE710661, AW027844, BF951319, |
| | | | | | AW514110, BE893648, AW235679, BF951645, AA853738, N77918, BF904963, AW027796, BF951640, |
| | | | | | AI820008, BF802330, BF802123, BE091385, AA040337, D20818, BG116710, W07085, BE348578, |
| | | | | | BF979894, BF448283, AI806099, AA746652, AI269951, AI370493, BE251472, BG255671, BE743054, |
| | | | | | BE873348, AA034242, AI269933, AI494531, AA193194, R01841, AW130830, R71213, BE746974, |
| | | | | | BG252660, R01109, AV746580, AV709278, AA910706, BF204537, R94047, N62862, BF832992, |
| | | | | | AI828509, BE700205, AW899366, BF951647, AA323326, AL042486, AL527593, T97110, AW176293, |
| | | | | | AA886453, AA319188, AI521632, AV699431, BF922964, AV700764, AV700026, W26006, N93989, |
| | | | | | BF951643, AA193234, N87415, BF825093, BF841081, BE695594, BE695488, AV695783, AV692484, |
| | | | | | T69241, AA398143, AV682403, AV682366, BE907663, BG030601, BF978949, BF965959, AI801106, |
| | | | | | AL039456, AI499161, AI635132, AL359611.1, AK025633.1, AB037802.1, AK027681.1, BC002349.1, |
| | | | | | AK026408.1, AL133088.1, AL359583.1, Y10183.1, AB048881.1, AC011450.4. |
| HPRCM72 | 180 | 813512 | 1-2441 | 15-2455 | BG166460, BE883382, BF683382, AI341658, AW952999, BG163786, BE465453, AI338324, BE326569, |
| | | | | | BE464879, BF433097, BG261233, W46356, BF437934, AA149241, AI031948, BF445095, AA461239, |
| | | | | | AI655712, AI828045, BF666548, BE645287, BE218005, AA740917, AW089849, BE938758, BF038531, |
| | | | | | BE043103, AW162691, AV734920, AV713130, BF001984, AI338571, AA811891, AI830924, AI457882, |
| | | | | | AW081477, BF670487, AI694811, AI828812, AI811880, BF513545, AA769609, BE550664, AW450022, |
| | | | | | BE217994, AI458724, W94368, AV716605, AW172702, AA460935, AI332449, AA745014, AA807040, |
| | | | | | AI167711, AA701349, BF681205, BF541286, AW573067, AI571036, AI336394, AI458489, BF027933, |
| | | | | | AA864779, R63261, AI221414, AW511576, AA578272, AA805282, AA781586, W94477, BF110711, |
| | | | | | N50967, AW118243, AW630626, AA705280, AI081322, AA804627, AA505733, AI079516, N21046, |
| | | | | | N66225, AA620673, AW664752, BF700662, AI291751, AA743371, AI080702, AA976574, AA702877, |
| | | | | | AA830244, BF572889, AA121467, W46192, BF354049, AA121295, BF435675, AI873006, AA150022, |
| | | | | | AI216060, BE244500, BE865586, AI342791, AA325308, BF666155, AA586934, N98297, AI535871, |
| | | | | | AI766438, H82449, AW613882, AW085296, AI584035, AI224954, BG104548, AI276071, AI806750, |
| | | | | | AI682664, AA076152, AA832356, AA076057, T87592, BE765250, AA669771, BF208676, AW511081, |
| | | | | | AA860585, AW118242, AW959674, AA228738, AA995894, AI184762, AA830530, AW118244, H65071, |
| | | | | | AA492305, AI352669, H65630, AI095304, BF244857, BE775070, AW971029, Z43498, AI631433, |
| | | | | | BE243950, N92624, AA976997, T59146, AW517774, BE786488, H05855, AA345351, BE714157, |
| | | | | | BF247351, R21170, AA285079, AI383913, D79961, W38747, AI610582, AA890635, H79991, R93581, |
| | | | | | AA304798, N27877, T59184, AI869421, H05748, R22788, AI743377, L32010, Z39568, BE934528, |
| | | | | | T97283, BE301973, BF675995, AI933883, T97395, H79992, R07789, AW007681, R63213, AA044925, |
| | | | | | N76786, BE826985, AA150087, H65072, BE938783, AW748686, BF237813, BE768786, BE866492, |
| | | | | | R93582, BE844122, BE938793, BE938764, AA379573, BE173330, BG114724, BE700340, H03778, |
| | | | | | AK025902.1, AL110163.1. |
| HPTRE80 | 181 | 884167 | 1-1159 | 15-1173 | AI719545, BG248226, BE886380, BF116178, AW003531, BF207082, BG250696, AL044449, BE538221, |
| | | | | | BE784939, AI885407, AW246550, AA490655, AW024407, AW081534, AW960860, AW872780, |
| | | | | | AI870293, AI360297, BF036691, AA490654, AI921772, AI553796, AA613650, BE537572, AI673517, |
| | | | | | AI360358, AW082921, AW263806, AI417178, AA846693, AI214250, AA001318, AA374910, AI827461, |
| | | | | | AI560048, BE314431, AI340075, AI318298, AA595365, BE837126, AA580265, AI829934, AI085813, |
| | | | | | AI376538, H27782, BG007963, AA948279, AW074629, AW135529, AA910140, AA297010, AA857878, |
| | | | | | AW248341, AA832012, BF511306, AA297016, BF529929, BF244493, AA906871, T07218, AA568231, |
| | | | | | AA953262, AI383030, AW150846, AI140575, AW407144, BE884493, T30682, AW248342, AV727418, |
| | | | | | AF177385.1, U62317.2, AL021683.1. |
| HPTRI42 | 182 | 655362 | 1-1084 | 15-1098 | AL530013, BF689272, BF057597, BE780679, BE264598, AU159982, AU159148, AI889175, BE782348, |
| | | | | | BE867162, AW001971, AV660589, AI940395, AI589299, BE398067, AI808453, AA809956, BE397390, |
| | | | | | T15859, AI962984, H20543, AA235197, AI685406, BG056919, AA862809, BE514151, AI243558, |
| | | | | | AA995380, BF590659, AA962405, BE696154, BF868362, H20635, AW242465, BE504803, BF348076, |
| | | | | | BC001341.1, AL110260.1, AK023915.1. |
| HPTRM02 | 183 | 812879 | 1-1746 | 15-1760 | AL524458, BE738365, BE797125, BE799999, BG029222, BE745922, BE545163, BE907437, BE799866, |
| | | | | | BF305271, BE544399, BF663830, BE796881, BF308083, BG169861, BE350925, AW385462, BF307517, |
| | | | | | BE797270, BE743037, BF668016, BG180312, BF974123, BE737908, BF663981, AW247807, BE513095, |
| | | | | | BE906969, AL138083, BE255971, BF664455, BF338518, BF244474, AL536412, BG231717, BG121312, |
| | | | | | AW005562, AI357069, BF000625, AA644049, AL523557, AW513359, AA632166, AW246260, |
| | | | | | BF892728, AA706163, AL520864, BE746537, AW245080, AI879390, AA496904, BG177219, |
| | | | | | AW005067, AW276591, BE791039, AW804483, AA738041, BE747177, BF869837, BE251828, |
| | | | | | BE875024, AI088680, BE297879, BF948818, AA831030, BE559592, BE561590, BF340321, AW248071, |
| | | | | | AA860150, AA149920, T63138, AL524459, AW439742, AI609027, AW804577, AI659057, AW886264, |
| | | | | | AA193529, AA057835, BE743405, R73214, AW194065, BE562027, AW075497, R75945, BE559810, |
| | | | | | AA706533, BF894712, AI468114, AW249614, AA335528, BE795304, AA827797, AI302055, BF129302, |
| | | | | | AI750232, AA427422, BF930249, BE560497, AA860105, BF939406, AA335848, AW404930, |
| | | | | | AW571830, R76783, T15952, BE560176, BG152613, BE267829, AW991408, BE269966, AW991532, |
| | | | | | BF664249, AL138082, BE269643, AW575878, BE797429, AW071243, AA304216, BE791865, |
| | | | | | AW945716, AW875302, R37100, AA682206, BE277420, AA193433, AW751797, AA352416, AA587756, |
| | | | | | AI818900, AW518507, BE939890, AA852530, R07062, BE900192, BE296328, AA931598, BE671371, |
| | | | | | T32042, AI033227, AA353903, R82530, BG121259, AI281709, BE389644, H28650, AA534672, |
| | | | | | AA548317, BE866982, AW084505, R73151, AA349275, T62995, BF205162, AI219302, BF688975, |
| | | | | | BG117867, BE748125, BF128654, AW772768, R82480, AA665591, BF434544, AW246149, BE859039, |
| | | | | | AA687496, AW403743, AI738846, BF893795, BF772867, BE388333, AW874200, BE890138, BE791538, |
| | | | | | BG027900, BF129181, AI468932, C00531, AW150444, AW338439, BE388322, BF931213, AW875234, |
| | | | | | AW385458, AW991401, AW875290, AW373139, AW385460, AW581536, AW875235, AW875239, |
| | | | | | AA687440, AI948428, BE727787, AW403641, AW393066, AW875349, AW581529, AW875238, |
| | | | | | AW875305, AW875255, BE748665, AW875292, AW875249, BE383820, AW875301, AW581521, |
| | | | | | AW581531, AW875245, AW875307, AW875248, AW875296, AW875241, AW875360, AW581537, |
| | | | | | AW875368, AA653357, AW385464, AA852531, AI878829, AI079775, BF874873, BF991409, |
| | | | | | AW403272, BF772016, BF688505, BF592857, AW518551, AW991487, BG012697, AW835133, |
| | | | | | AW875362, AW962437, AA078519, AW581533, AF218020.1, AF151364.1, AF077353.1, AK027367.1, |
| | | | | | AF197060.1, AF250287.1. |
| HPTRQ52 | 184 | 655363 | 1-644 | 15-658 | AL527941, AL533906, AW247351, AI832791, AW245938, AI310124, AW674400, AW515975, AW675728, AL529035, AA226400, |
| | | | | | AU150370, AA569956, AW469172, AI245352, AI890679, |
| | | | | | BE300693, AI601125, AI962952, AA533187, AI221330, AI564190, W80352, AW188512, BE394504, |
| | | | | | AA040058, AA633700, AI208267, AI792211, AI215909, N90770, AA643585, BF221803, AI865794, |
| | | | | | AU138677, N30739, AW512882, N95345, AI890616, BG166982, AA349670, N59649, H91459, |
| | | | | | AA994951, BE265966, AA311285, AW731826, BF807476, AA037422, AA554209, T95955, BF240778, |
| | | | | | BF802840, AA176708, AW592984, AA737167, AA431700, AW006451, T95961, BF807473, AI352253, |
| | | | | | AI372503, AA229521, T95866, AA972235, AU158023, AI733502, BE767129, AA226924, AA323327, |
| | | | | | AW388658, AL046918, T95860, H13591, W26197, BE909498, BF476991, AA865022, AI148858, |
| | | | | | AA936123, BF371957, AA641404, AA876362, BF957886, AI905350, AA813410, AA173027, AI879823, |
| | | | | | AA876167, AA031577, AW518440, AI784024, AI015568, H54187, R77485, AW405360, AA031456, |
| | | | | | H13222, AA384005, AA470650, AI275659, W80351, AA431493, AA861578, N35164, AW513500, |
| | | | | | AW088915, BE241964, BE171388, R69693, R38031, AA054553, AW749739, W21999, AI378983, |
| | | | | | N78203, BF317122, BF205960, W25254, AI364635, BE546333, AI961834, BE770665, AA928539, |
| | | | | | AB026628.1, BC002773.1, AB018357.1, AK001420.1, AK024944.1, AL109672.1, AK027098.1, |
| | | | | | AL136913.1, AK000251.1. |
| HPTVI96 | 185 | 636064 | 1-506 | 15-520 | |
| HPWBA29 | 186 | 561956 | 1-311 | 15-325 | |
| HRDAI17 | 187 | 560720 | 1-1486 | 15-1500 | AW974589, AW867451, AA579866, AW965263, AA460591, AW298601, AA461519, H56628, |
| | | | | | BF845119, AA018544, AA331634, BF244465, AI630413, AV741309, AI254046, AW302016, AA661929, |
| | | | | | AI754721, AI255060, AI270853, AI252826, AI435754, AW086343, AW301997, BE857819, AI271005, |
| | | | | | BE139221, BE139213, AI254826, AW271081, AI224422, AI252060, AW302086, AI254783, AI307025, |
| | | | | | AI254056, AI254683, AI223591, AI252493, AA484479, AI362694, AI524022, AI251312, AI308320, |
| | | | | | AW237905, AW407632, AI141964, AA730035, AA678950, AV709139, AI189682, BF448904, |
| | | | | | AU146063, AW275432, AL037777, AI365618, AI206841, AW963594, AL047480, BF971214, |
| | | | | | AW009653, AI284543, AI356264, AI280678, AU153717, AI432851, AI859438, AA741301, AW504168, |
| | | | | | AI251944, AW975383, AW468349, AU154166, AV749092, AI251034, AA484428, AI364568, BF794808, |
| | | | | | AV735872, AW023111, BG254947, AI358776, AW732205, AW020891, AI860535, AI354602, |
| | | | | | BG109444, BF185528, AI381490, BF844773, BF971280, AI254770, AI251203, AW976024, AI417469, |
| | | | | | AI251284, T08386, BF809775, AI732671, AI961983, AI345334, AI859906, AV740423, AA807704, |
| | | | | | AI363851, T51556, BE439681, AI928890, BE837822, AW958711, AI754567, AL037927, AI754105, |
| | | | | | AL042667, AL042670, AI755214, AU133267, AW963599, AW303098, AI246594, AI687972, |
| | | | | | AW502185, AL047645, AW019964, AW958427, AI250552, BF673849, N33587, AU160445, BF967309, |
| | | | | | AU159614, T12424, AW064007, H62343, AW341882, AW303872, AA554866, AA609834, BE392753, |
| | | | | | AA657910, AV738171, AW068853, BF920612, AA604751, AA523695, AW272389, AI866996, |
| | | | | | AA831638, AW576251, AA057522, AW132097, AL039057, AV755634, AA363957, AF238381.1, |
| | | | | | AC018766.2, BC001801.1, AC090941.1, AB014085.1, AC004187.1, AP000515.1, AL109963.4, |
| | | | | | AC011555.5, AK025621.1, Z82195.1, AC004846.2, Z68873.1, AC011526.7, X64467.1, AC006323.3, |
| | | | | | AL022336.1, AL022318.2, AL139022.4, L35532.1, AC005338.1, AC006529.1, AC018755.3, |
| | | | | | AL353777.18, AL445928.8, AL353692.14, AL354808.24, AL022313.1, AC005393.1, AC005740.1, |
| | | | | | AL049312.1, BC009183.1, AF109907.1, Z94865.1, AC023359.26, AL035415.22, AL049282.1, |
| | | | | | AL031602.14, AC008055.6, AC000134.14, Z84469.1, AL359792.3, AL138881.12, AK022536.1, |
| | | | | | AL589656.5, AL157365.19, AC067722.21, AL136123.19, AC079754.4, AK023233.1, AC007011.1, |
| | | | | | AF090925.1, AB045364.1, AL021578.4, AC026398.4, AL031728.12, AC078846.2, AF280899.1, |
| | | | | | AF283321.1, AC008537.5, AF092858.1, AC005800.1, AL136172.16, AC021068.17, AL136979.16, |
| | | | | | AC003029.2, AC006071.1, AC007384.3, AC005954.1, AC005779.1, AL133507.8, AC005409.1, |
| | | | | | AF281936.1, AL133260.12, AC006025.2, AC090509.1, AC090005.1, AC068319.4, AC011442.5, |
| | | | | | AL133380.5, AC005379.1, AC005594.1, AC004659.1, AC024157.4, AL158836.16, AC015541.21, |
| | | | | | AC026162.5, AL138968.18, AC008755.6, AC018816.5, AC018494.6, AC006084.1, AC004826.3, |
| | | | | | AL390061.9, AC004792.1, AL035423.4, AC087072.2, AF254822.1, AC009399.5, AL133548.6, |
| | | | | | AC006014.2, AL022316.2, AL009172.1, AC006362.2, AC024082.6, AL136231.12, AL356316.18, |
| | | | | | AC023798.16, Z83844.5, AC011452.6, AC008766.4, AC008750.7, AC005231.2, AP000689.1, |
| | | | | | AC004241.1, AC008985.6, AC002312.1, AL050307.13, AL034429.1, AL132639.4, AC004257.1, |
| | | | | | AP002534.1, AL096841.6, AC002551.1, AC008754.8, AC004805.1, AC004019.20, AC068724.7, |
| | | | | | AC053480.5, Z68870.1, AC012306.11, AC004655.1, AC010521.4, AC008747.5, AK027639.1, |
| | | | | | AC004263.1, AC005837.1, AL022721.1, AP000130.1, AC064814.7, AL355052.3, AL359753.9, |
| | | | | | AF288742.1, U91321.1, AC003662.2, AC008102.17, AC073532.18, AC003102.1, AC084865.2, |
| | | | | | AL008707.1, AL136365.9, U52112.1, AL078638.9, AL078591.18, AL356354.10, AF314058.1, |
| | | | | | AP000967.2, AC073917.19, AL358133.11, AL138743.5, AC007679.4, AL121992.24, AL513550.9, |
| | | | | | AL021394.10, AC009475.4, AL109827.8, AC026464.6, AF111168.2, AL121890.34, AC005257.1, |
| | | | | | AP002815.3, AC002994.2, AL022162.1, AC008543.7, AF200465.1, AC027319.5, AL021453.1, |
| | | | | | AC011242.8, AB015355.1, AK022032.1, AC004831.1, AC004103.1, AC005844.7, AL353807.18, |
| | | | | | AC009060.7, AP000359.1, AC009263.6, AL138784.30, AL139008.10, AC006121.1, Z68128.1, |
| | | | | | AC010168.6, AC007201.1, AC004089.25, AC000159.6, AL139318.9, AC090937.1, AC004686.1, |
| | | | | | AC002352.1, AL109921.21, AC002404.1, AC026776.4, AF283256.1, D64108.1, AC003966.1, |
| | | | | | AC010616.5, AL022334.1, AL035071.17, AC015651.18, AC008745.6, Z80232.1, AL121753.30, |
| | | | | | AL136136.7, AC010679.6, AC011510.7, AL160159.12, AL159997.14, AL450265.11, Z94044.1, |
| | | | | | AC010083.5, AC004797.1, AC008699.5, AL049747.1, AC005796.1, AC004885.2, AL031662.26, |
| | | | | | AC011472.7, AL133246.2, AL121989.12, AL355480.22, AC016620.6, AC009481.4, AL135744.4, |
| | | | | | AL135927.14, AC007227.3, AL159988.12, BC000970.1, AL109920.15. |
| HRDDQ39 | 188 | 840405 | 1-762 | 15-776 | AA564252, AV763026, AV763058, AI499954, AI654738, BF763954, AI066646, AW813668, AI537020, |
| | | | | | AI801505, AI491765, AI251576, AW502796, AW272294, AA935409, AI040051, AI306232, AA503298, |
| | | | | | BE062545, AA225406, AI583466, AW274191, AI755202, BF771774, AW962251, AI635028, AV764259, |
| | | | | | AC008073.4, AC020604.9, U95740.1, AB020867.1, AF001552.1, AL049712.12, AC025168.7, |
| | | | | | AL512347.14, AC012469.9, AC007066.4, AC002996.1, AP003439.2, AL357752.19, AC073273.9, |
| | | | | | AC008372.6, AP001883.5, AC004973.1, AC013264.4, AL163285.2, AC073657.5, AC009516.19, |
| | | | | | AC012284.5, AL031230.1, AC005034.1, AC012476.8, AP002815.3, AC011485.6, AL365338.17, |
| | | | | | AL160397.17, AL008635.1, AL158830.17, AL033518.14, AC007172.6, AL391065.6, AC005768.17, |
| | | | | | AC007425.16, AL031123.14, AC005911.6, AC090947.1, AL157838.24, AL591398.2, AC009756.9, |
| | | | | | AC009274.9, AC006600.4, AC007748.2, AF312915.1, Z99716.4, AC008733.7, Z83822.1, AC004675.1, |
| | | | | | AL121753.30, AL121754.18, AL109804.41, AC006511.5, AC005157.1, AL133324.13, AC006480.3, |
| | | | | | AL080243.21, AF088219.1, AC004887.2, AL139353.3, AC002563.1, AC006435.7, AC005081.3, |
| | | | | | AL160236.4, AC005859.1, AC010651.7, AC022414.6, AC025679.4, AP001752.1, AL442167.1, |
| | | | | | AC018738.4, AL031685.18, AL352978.6, AC025262.27, AP000557.2, AC012320.6, AL133229.40, |
| | | | | | AL031311.1, AC008440.8, AC003962.1, AL034372.33, AL133295.16, Z93020.1, AC004209.1, |
| | | | | | AL078581.11, AC010654.8, AC007226.3, AL356503.18, AP001922.4, AC010789.9, AC018690.5, |
| | | | | | AF168787.1, AL080314.29, AC011510.7, AE000658.1, AL160492.5, AL133244.1, AL117380.28, |
| | | | | | AL161629.10, AC010320.9, AC002546.1, AP000692.1, AC011742.3, AC008720.6, AC005023.1, |
| | | | | | AC025588.1, AC004584.1, AC004848.1, AP001725.1, AF019413.1, AC005013.1, AC011443.6, |
| | | | | | AL121899.37, AC006449.19, AP001694.1, AL359682.4, AL109825.23, AC034240.4, AP000355.1, |
| | | | | | AC011473.4, AC008569.6, AC009570.13, AC007381.3, AL365295.4, U91321.1, AC007363.3, |
| | | | | | AC009502.4, AL157882.5, AC006130.1, AL445201.14, AL137061.12, AL135818.3, AD000092.1, |
| | | | | | AL121578.1, AL035404.20, AP000513.1, AC069548.4, U91323.1, AC008507.8, AC005747.1, |
| | | | | | AC005071.2, AC009503.3, AL121653.2, AL359644.10, AL031622.1, AL031659.9, AC004526.1, |
| | | | | | AC010102.3, AC006270.1, AC021752.5, AC068319.4, AF031078.1, AP003357.2, AC008511.6, |
| | | | | | AC078846.2, AL445184.11, AC009275.6, AC009194.8, AF030876.1, AC018663.3, Z84474.1, |
| | | | | | AC008556.5, AC002350.1, AC010543.8, AC003108.1, AC007276.3, AJ003147.1, AC008764.7, |
| | | | | | AC015982.9, AL049830.3, AF003529.1, AL080239.11, AC020931.5, AC004125.1, AL391827.18, |
| | | | | | AC010150.3, AC005043.2, AL137222.17, AC011005.7, AC020750.3, AC004859.2, AP000356.1, |
| | | | | | AF001549.1, Z94801.1, AC005914.1, AL133342.14, AC007308.13, AL355836.3, AC009953.4, |
| | | | | | AC005138.1, AC008493.4, AC006116.1, AP001052.1, AL122001.32, AL139100.9, AP001732.1, |
| | | | | | AC009137.6, AL035450.1, AC003037.1, AC006042.2, Z84484.1, AC004089.25, AL357519.19, |
| | | | | | AC002312.1, AC026368.37, AL449223.7, AL359695.6, AL022159.1, AC009955.4, AF279660.2, |
| | | | | | AC008616.6, AL139230.25, AC005952.1, AC006443.1, AL121586.31, AC008551.5, AL035367.5, |
| | | | | | AL133245.2, AL354720.14, AC005740.1, AC023114.5, AC007318.4, AC090951.1, AC066597.4, |
| | | | | | AC003049.1, AC008821.5, AL162571.9, AC019171.4, AL136162.17, AC022083.6. |
| HRDEX93 | 189 | 816046 | 1-1667 | 15-1681 | AL527900, AL529036, AL529408, AL533906, AL533907, AL529035, AL527941, BE903615, BE791071, |
| | | | | | BG166982, BE299248, BE793113, BE909498, BF205960, BE900230, BF663336, BE900477, AU138677, |
| | | | | | BF317122, BE902376, BG105338, AL046917, BG248168, BE387420, AU128036, BF796169, BF674884, |
| | | | | | BE734698, AW247351, AW245938, BG122744, BF794696, AI832791, AU139448, BE295651, AI310124, |
| | | | | | AW674400, AI792211, AW515975, BE265061, AW245495, AW675728, BE394504, AA226400, |
| | | | | | AA569956, BE300693, AW388658, AU150370, AI890679, AW402628, AL527942, AI962952, AI221330, |
| | | | | | AI245352, AI601125, AW469172, BF957886, W80352, AW188512, AW405360, AI215909, AI564190, |
| | | | | | AI208267, AA533187, AA633700, N95345, AA431700, AA311285, AA643585, AI865794, BF221803, |
| | | | | | W26197, BF241479, N90770, AA040058, BE251149, AW512882, AA031577, N30739, AI890616, |
| | | | | | AA349670, AA994951, AI372503, N59649, H91459, AW731826, AW672782, BE265966, BF807476, |
| | | | | | AA554209, BF802350, AA226371, AA737167, AW592984, BF802840, AA349671, H72140, AW006451, |
| | | | | | AA176708, AA037422, BF807473, AI352253, AA972235, AW934951, AI905350, AU158023, T95955, |
| | | | | | AI733502, AA229521, AA226888, T95961, AA226924, AA323327, BF767741, BF371957, W67484, |
| | | | | | BE767129, AW247493, T95866, T95860, AL046918, AI148858, AA876362, AA216424, AA936123, |
| | | | | | BF240778, BF476991, H13591, AA813410, AA173027, C03952, AA641404, N78203, AA865022, |
| | | | | | AA876167, AI879823, AW518440, BE303017, AI015568, H26512, AI784024, AA040044, W25254, |
| | | | | | AA431493, AA031456, AI275659, AW513500, AA861578, H54187, N35164, BE770665, R77485, |
| | | | | | AW088915, AA384005, AA470650, H13222, BF767990, BE241964, R38117, AA368017, W80351, |
| | | | | | AA336001, BE872227, AA054613, H91107, BE546333, AA054553, BE171388, AI378983, R69693, |
| | | | | | R38031, W21999, AW749739, AI364635, AI961834, BE242695, AA303798, R57459, AA994783, |
| | | | | | AW958926, AB026628.1, AB018357.1, BC002773.1, AK001420.1. |
| HRTAP63 | 190 | 780698 | 1-2562 | 15-2576 | AL530903, BF980210, AV713636, AV714538, BF795697, BG165908, BG034785, AW954212, |
| | | | | | AA476834, AA454040, BE787658, W87846, W95796, AV723163, AA210879, BG121323, AI140750, |
| | | | | | AA394298, BE544064, BF110177, BG260733, AW957532, AW835225, AV715167, AW043868, W95753, |
| | | | | | BE675523, AI830085, AV684273, BF669098, AW575257, AI719282, AW402599, AA594596, BF030937, |
| | | | | | AV751996, AA151651, BF439829, AI972457, AA203350, AW835231, AV698320, AW835223, |
| | | | | | BF195333, BF245739, AI458367, BF217997, AW103450, AV646999, AA443779, AI804705, AA779750, |
| | | | | | AA609993, AV646707, AI161426, AA883267, AV761220, AW105020, AI859827, N21490, AA769659, |
| | | | | | AI961457, AI963269, AV748401, AV702852, AA454948, BF477944, BE378300, BF507584, AA398140, |
| | | | | | AA829928, AA723665, AA152423, AI066682, C05924, AI342144, AI818909, AI949342, AW173168, |
| | | | | | H95180, AI150177, AI744274, AI373130, AI936317, BF131934, AW935736, AI373127, BF184877, |
| | | | | | AW848815, AI168246, AW630390, AA703773, AI809600, AI858227, AI620702, BF211545, AA453622, |
| | | | | | AW511827, BE550555, BF352641, AI811412, BF216016, AI149376, BF028661, AA777078, AA988774, |
| | | | | | AA825373, AA745603, AA447847, AI634257, AI148253, BE568959, AW474847, H50762, AW340117, |
| | | | | | AI148595, AA152318, AA455325, H18773, AA446817, AI983483, N70494, AI950667, AI367305, |
| | | | | | AA447696, AA165032, BF349702, AA595127, W37577, AI865137, W60533, H27027, AI088311, |
| | | | | | AA781728, BE244882, AA411860, AI380799, BF130302, AI927370, AA150348, AW876985, R96314, |
| | | | | | AV726405, AA729374, W32295, AA448492, AI453093, AW769995, W04863, AI263830, AA083837, |
| | | | | | AA133757, AV734814, H24217, BE564563, N99875, N77905, AA679441, AI352336, AI188487, |
| | | | | | AI432136, AA033645, AI266690, AI433965, AA877077, AA055324, W44808, H49413, AA411995, |
| | | | | | AA833544, AI300087, BE972332, AV682350, AA992809, AA814064, AA741027, AV702746, W32538, |
| | | | | | AA683291, AA621431, AA902136, AA214623, AV647110, AA663647, AA494354, BE245415, |
| | | | | | AW151578, AW150662, W60562, AA705000, AI950580, N27003, AA345942, H85708, AA133758, |
| | | | | | AI627657, AA224004, W37452, T80362, AA452695, AI146286, H49227, AW074691, BG142207, |
| | | | | | H47030, F25806, H85509, BE244420, C17218, H24204, AA480190, AV651579, AI272131, T80478, |
| | | | | | AI381311, W87586, W37696, H18682, H24218, AV647065, N29206, N28458, AW468405, BF081529, |
| | | | | | W44802, AA927134, AW821055, BF854323, AA083939, F35729, AA682763, R31829, AA148436, |
| | | | | | AA125918, H95144, BE246322, W44717, AW194993, AA729762, H50669, AA343940, BE244987, |
| | | | | | AA115539, R26021, N35260, H46491, AI902181, AI149536, R37220, AA325890, AF151885.1, |
| | | | | | AK025730.1, BC000836.1, AF135161.1, AB062991.1, AC007298.17, AF172940.1, AC022149.3, R26823, |
| | | | | | R38842, H88357, H88417, H88357, N40125, W05840, W25309, W32702, AA027857, AA027923, |
| | | | | | AA034476, AA115050, AA151732. |
| HSAVW42 | 191 | 637660 | 1-581 | 15-595 | AI336192, AI911235, BE644656, AI459354, BF030919, AI333569, AA652155, AW974708, AI700779, |
| | | | | | AA932386, AI922689, AI888953, AA848053, AI863382, AI932794, AI554821, AI539687, AW081231, |
| | | | | | AI587156, AW189415, AI610362, AA225339, AI934011, AI498067, AW168373, BG031338, AI280732, |
| | | | | | AI590423, AI590686, BF724894, BG036614, AV709522, AI242251, AV756150, AI890907, AI687065, |
| | | | | | AV682074, AI583065, AI472536, BF811793, BF812960, AW167222, AI636588, AI249946, BF970652, |
| | | | | | AW169234, AI431909, AI610115, BF981148, AI635016, AI874243, BF970768, BF727034, AI798351, |
| | | | | | AI580254, AI627988, AL037582, AL037602, AW022682, AI916419, AI872804, AW072719, AW151714, |
| | | | | | AI613038, AI470293, AV704962, AI588892, BF725644, BE965169, AV757161, AA470491, AW172723, |
| | | | | | AI281867, AL514791, AW983783, AI802542, AV682875, BG256090, AA502794, AI758437, AI609409, |
| | | | | | AI798456, AI345551, AI628833, AI590830, AI560683, AW198090, BG108070, AV733470, AI591407, |
| | | | | | AW090071, AI335426, AI348777, AI521244, AW983832, AI955906, AI288050, BE963244, AW084117, |
| | | | | | BE546262, BE783819, AL514627, AI274541, AI274745, AW059713, AI612913, AI493576, BG165979, |
| | | | | | BF726207, AW268302, BF033757, BG001235, AW104196, AI538764, AW983754, AI633125, BF726237, |
| | | | | | R36271, AL042628, AI539771, BG108268, BF528717, BF970263, BE621472, AI680498, AI269696, |
| | | | | | AV714710, AI655841, AA910956, AI890223, AI921281, AW169039, AI686073, AI583085, AV682224, |
| | | | | | AW162189, AW105601, AV648430, AV714100, AI567612, AI697372, AI702073, AW827227, |
| | | | | | BG179993, AI866082, BE018334, BG114304, AI633000, BG112239, AI950664, AL039086, AL046849, |
| | | | | | AI816947, AW302954, AV734180, AL036980, AV682791, AW169604, AI249877, AW082088, |
| | | | | | AL041105, AI866770, AI887772, AA427700, AI376180, AW002174, AW089179, BG036846, BE966927, |
| | | | | | AA807352, AI241923, AW167918, AV755589, AI864836, BE892503, AI621362, AL048323, AL040827, |
| | | | | | AI570807, AI634345, AL048340, BE785868, AI608932, BE910373, AI537677, AI879064, AW081255, |
| | | | | | AI738854, AI956080, AL080046, AI440263, AI862135, AI690748, AI865906, BG180295, BF868489, |
| | | | | | AA833760, BG108309, AI537261, BF342157, BF764528, AI866083, AI623941, AI922315, AI433157, |
| | | | | | AI870192, AI597731, AA641818, AW198112, AI637584, AI440239, AI345677, AW151729, BF753013, |
| | | | | | BF924882, AW004886, AW079336, AW983691, BF762612, AI520785, AL119863, BF344691, |
| | | | | | AW022699, BF814357, AI580694, AI923989, AI499986, BF343568, AW169848, AI627893, AI572717, |
| | | | | | AV715462, AW301513, AW081298, AA572758, BG109590, AW089310, AI554344, BF752999, |
| | | | | | BF968017, AW079859, AV656595, BF925729, BG252914, AW301505, AI620093, AW088538, |
| | | | | | AI538850, AW163834, AL036403, AL389939.1, BC005678.1, AB062942.1, BC008485.1, AK000432.1, |
| | | | | | AF000145.1, AB047904.1, AL359618.1, AK024538.1, AL133067.1, AL049452.1, AK025798.1, |
| | | | | | AL389982.1, AK025857.1, AL136844.1, AK027213.1, AB050410.1, AL137476.1, AL122110.1, |
| | | | | | AL137550.1, AK027182.1, AF090901.1, AK026057.1, AL137648.1, AL137488.1, BC008893.1, |
| | | | | | AL049382.1, AL512733.1, AB048974.1, AL136747.1, U38847.1, AF230496.1, AF183393.1, AF090900.1, |
| | | | | | BC006525.1, AL137533.1, AK026532.1, AK025092.1, AF159615.1, S78214.1, S61953.1, AK000614.1, |
| | | | | | AK026480.1, AL117578.1, AL023657.1, AF061943.1, X72889.1, AL389935.1, AJ299431.1, AF143723.1, |
| | | | | | U58996.2, AL133557.1, AF056191.1, AF081197.1, AL122123.1, Y16645.1, AK000083.1, AF057300.1, |
| | | | | | AF057299.1, AL162083.1, AL122049.1, AL137526.1, AB063070.1, AL080159.1, AL137560.1, |
| | | | | | BC006103.1, AL117460.1, AL080074.1, AK027160.1, AK026592.1, AK000418.1, AF090943.1, |
| | | | | | AL359583.1, AF217987.1, AB056420.1, AJ242859.1, AL136749.1, AL110171.1, BC008382.1, |
| | | | | | AL137640.1, Y10936.1, AL137271.1, BC008075.1, AK027204.1, AF113222.1, BC004958.1, AL359601.1, |
| | | | | | AL583915.1, AL133606.1, AK026593.1, AL050366.1, AK000718.1, AF162270.1, AF026816.2, |
| | | | | | AK026642.1, Y10080.1, AK026784.1, AB055368.1, AL117435.1, BC008780.1, AF217966.1, |
| | | | | | BC006440.1, AB047801.1, AL137529.1, BC007680.1, AK027614.1, AK000486.1, AL080148.1, |
| | | | | | AK026600.1, AL136805.1, X98834.1, AB049892.1, AL080086.1, BC008488.1, BC003627.1, |
| | | | | | AK000618.1, AL122050.1, BC009310.1, AL110197.1, AB060908.1, AL136789.1, AF090903.1, |
| | | | | | AL157482.1, AL512765.1, AK000450.1, AL137273.1, AL136845.1, AL133113.1, AL137292.1, |
| | | | | | AK027116.1, AF285167.1, AB019565.1, AL512719.1, AL359941.1, AK026533.1, BC009026.1, |
| | | | | | AL136622.1, AL136615.1, AK026045.1, AF225424.1, AL122106.1, AB056421.1, AK025084.1, |
| | | | | | AK025209.1, AK026741.1, AK027144.1, AK025708.1, AL442072.1, AL117440.1, AL122093.1, |
| | | | | | AB062978.1, AL137294.1, AK026542.1, AF061573.2, AK025383.1, AL162004.1, AK026534.1, |
| | | | | | AL162002.1, AB060912.1, AF090934.1, AL512718.1, AB048964.1, AB050418.1, AL512761.1, |
| | | | | | BC004951.1, AF210052.1, AB048954.1, AK026630.1, AB063084.1, AL133665.1, AL133075.1, |
| | | | | | AL049465.1, AF061795.1, AF151685.1, AK025254.1, BC007198.1, AL157431.1, AL137527.1, |
| | | | | | BC003122.1, AY033593.1, AL136882.1, AF207829.1, AF081195.1, X53587.1, AL137276.1, AF271350.1, |
| | | | | | BC006164.1, U39656.1, AB063008.1, AB050534.1, BC005890.1, AL353957.1, AF177336.1, AK026885.1, |
| | | | | | L30117.1, AB060903.1, AB060825.1, AB056809.1, AF262032.1, AL359620.1, AK026551.1, AL050393.1, |
| | | | | | BC007021.1, S76508.1, BC008983.1, BC008387.1, AK027114.1, L19437.2, AK026504.1, BC008070.1, |
| | | | | | AK025967.1, AK026528.1, BC008284.1, AL136786.1, AL117585.1, U68233.1, AL110221.1, |
| | | | | | AL162062.1, AL050116.1, AL096744.1, AL133077.1, AL110225.1, BC006807.1, AL050138.1, |
| | | | | | AJ006417.1, AF106862.1, AL136790.1, BC009341.1, AK026408.1, AL137429.1, BC009033.1, M64349.1, |
| | | | | | AF097996.1, AL389978.1, Z82022.1, BC006180.1, AB060929.1, AL136843.1, AL133016.1, BC003684.1, |
| | | | | | AF125948.1, AF090896.1, AB056768.1, AB060214.1, AL117432.1, AL110222.1, AL137521.1, |
| | | | | | AL137300.1, AL080060.1. |
| HSAWN53 | 192 | 634697 | 1-335 | 15-349 | AA865128, AI174766, AA047715, AW995665, AA702729, AW900503, N74072, AA584450, AW129249, |
| | | | | | AL079734, AW163293, AV733228, BE313883, AV709273, AA741028, AV733627, AA648990, |
| | | | | | BE827710, BE172296, AA738097, AL043289, AI250083, AV755512, T08298, AA454041, AV716360, |
| | | | | | AI147425, AL138228, AA724782, AI921328, AW468297, AL134242, BF832365, N71746, BE968438, |
| | | | | | AW023265, AI345294, AI732378, AV759518, AI811302, AC078889.20, AC005914.1, Z93930.10, |
| | | | | | AL390838.26, AC005393.1, AC073145.8, AL355096.4, AL160269.14, AC007465.4, AP001671.1, |
| | | | | | AF250324.1, AC009509.7, AC004682.1, AC000120.1, AL033523.14, AC025472.3, AC012170.6, |
| | | | | | AL158830.17, AC006112.2, AC007387.3, AC005670.1, AC004098.1, Z94161.5, AC004531.1, |
| | | | | | AC015853.8, AC004477.1, AC007036.3, AC019205.4, AC026881.6, AL138823.14, AC020647.9, |
| | | | | | AC008750.7, AC069277.5, AL050318.13, AC026179.5, AC003024.1, AC024154.2, AC067941.7, |
| | | | | | AL024498.12, AC006466.3, AL160492.5, AL031055.1, AP000240.1, AL589983.8, AC006204.1, |
| | | | | | AL359092.14, AL133258.16, AC019046.4, AP000269.1, AL159168.15, AL096701.14, AC002449.1, |
| | | | | | AP000103.1, Z99570.1, AC006213.1, AP001438.1, AL359538.8, AP000659.4, AL139316.5, |
| | | | | | AC007488.15, AC023105.7, AC005522.2, AL133320.8, AC011604.10. |
| HSAWZ40 | 193 | 634000 | 1-1005 | 15-1019 | AV730902, BE148579, AW593457, AL120258, AW961858, AW183914, AA724767, AW975579, |
| | | | | | AA630162, AA715979, BE062935, AW862584, AC007023.3, AC010293.5, AL139326.15, AC024564.4, |
| | | | | | AC010977.4, AL139095.15, AL118556.4, AC026421.3, AL034410.8, AC015592.6, AL157700.13, |
| | | | | | AC020637.9, AL445523.11, AL139034.20, AL391139.19, AC017037.10, AL357498.16, AC006343.2, |
| | | | | | AL512430.14, AC026787.4, AC008685.7, AP003112.1, AL353999.3, AC025765.5, AC003015.1, |
| | | | | | AP003111.1, AC008664.5, AC006477.3, AC008450.5, AL513328.12, AL023582.1, AL441985.9, |
| | | | | | AL360270.18, AL354750.12, AL451086.6, AC006928.15, L35657.1, AC012512.7, AL162414.11, |
| | | | | | AL159159.21, AC004147.1, AL391829.9, AC073542.4, AL391689.1, AP000751.4, AC068802.29, |
| | | | | | AC007488.15, Z68868.1, AL035424.7, AF044083.1, AL035562.14, AC090946.1, AL392084.6, |
| | | | | | AC020668.5, AC069462.2, AC007200.1, AL353136.21, AC006515.7, AL136992.22, AL049648.9, |
| | | | | | AC087070.2, AC087431.2, AL035422.12, AL031965.7, AL031012.1, AC079353.5, AC004021.1, |
| | | | | | AL035411.27, AC007345.5, AL158192.15, AC007128.2, AP000457.3, AL590426.6, AL391294.16, |
| | | | | | AC011716.7, AL031312.1, AC010884.10, AC019097.5, U78027.1, AL139112.9, AC003964.1, |
| | | | | | AF223391.1, AL109800.25, AC009399.5, AL121875.9, AC009753.5, AL356865.19, AC016526.6, |
| | | | | | AL359643.27, AC011593.8, AL096827.3, AP001669.1, AC005900.1, AP001609.1, AC008905.6, |
| | | | | | AC006236.1, AC008786.6, AL355052.3, AC010234.5, AL157397.13, AC009476.3, AL583856.6, |
| | | | | | AC004384.1, AC022419.5, AC008865.3, AC010348.4, AL139327.18, AC073927.9, AL031056.1, |
| | | | | | AC009501.3, AL096709.11, AL139101.13, AC004932.4, AC008550.4, AL353659.13, AC007179.3, |
| | | | | | AC026369.21, AC026797.3, AL449189.1, AL157827.17, AC022324.5, AL354831.18, AL353614.9, |
| | | | | | AL358612.8, AL354948.7, AC005612.1, AL359846.11, AC019227.4, AL357312.8, AC016576.7, |
| | | | | | AL442167.1, AL136363.4, Z82212.1, AL163285.2, Z83849.1, AL355382.6, AL590225.4, AC010458.5, |
| | | | | | AL049545.6, AL360232.24, AL512272.15, AC004014.1, AL591770.1, AL137017.9, AL359703.13, |
| | | | | | Z81311.1, AL158825.12, AC008833.5, AL096793.20, AC020549.4, AC026951.5, Z96074.4, AC010235.6, |
| | | | | | AC009721.9, AC006957.1, AL137028.9, AC009901.6, AL390027.11, AL021307.1, AL353739.4, |
| | | | | | AC007656.2, AC023426.29, Z78021.1, AL021997.1, AF095725.1, AP001699.1, AL357774.11, |
| | | | | | AL023877.1, AF052041.1, AL035078.32, AL357054.14, AC004415.1, AL355596.21, AL109938.8, |
| | | | | | AL160255.14, AP002791.3, AC040163.3, AL357912.10. |
| HSAYC41 | 194 | 688057 | 1-200 | 15-214 | AF001545, AA548754, AA909788, AW468262, AI751080, AI251827, AA576709, AI800743, AA875953, |
| | | | | | AW131183, AW149412, AW339554, AI263391, AW168132, BE300485, AI638563, AI920829, AI751079, |
| | | | | | AV700614, AI682030, BF688845, AA665727, BC008593.1, AC000159.6, AB007864.1. |
| HSDBI90 | 195 | 853376 | 1-1043 | 15-1057 | AU145402, H17256, AI341067, R45451, AW294404, BF593070, AA324600, AA348746, Z40844, |
| | | | | | AW295349, AK021734.1, AC010285.4, AC026413.5. |
| HSHAX04 | 196 | 812178 | 1-1273 | 15-1287 | AL518245, AL513560, AL518244, AL527318, BE796445, BE729339, BE794797, BE729215, BF570366, BF969527, BE513213, BE797077, |
| | | | | | BE409736, AV715789, BE729781, BG165883, BF569872, BE730249, |
| | | | | | BF025786, BF971834, BE747502, BF974060, BF127469, BE394313, AI192460, BE277674, BE387113, |
| | | | | | BE408890, BF243019, BF685280, BE252479, BE274070, BE386787, BF686552, BE408335, BG179144, |
| | | | | | BG253243, AI193657, BE383115, BF109402, BE727996, AI978927, BE747511, BE313903, BF027209, |
| | | | | | BE394458, BG167026, BE387005, BE257613, BE395496, BF127655, AI819133, BE408659, AV701134, |
| | | | | | BF975755, BE297737, BE276425, BE257900, AW467999, BE409043, BF129135, BE621412, BE251025, |
| | | | | | BF132821, AV701355, BE736137, BF684777, AA151920, BF205110, AA476567, BE393897, AI589910, |
| | | | | | BE393107, BE266145, BE390224, BF132684, AA746035, AW406080, BF438288, BE745519, BF238211, |
| | | | | | BE258291, BE385352, AA224497, BE789268, BF237992, AV701339, AA476450, BE389845, AA922493, |
| | | | | | AA058904, AV712372, AA809660, AI972258, BE390228, AA031495, AI128546, AA033810, AA934757, |
| | | | | | AA031586, AI167713, BG111292, BE266333, AV736079, BE294483, BF132501, AI086942, AL513559, |
| | | | | | AI749671, AA904234, BE410720, AW069373, AA535057, BF835180, BF000188, AA224434, BF591243, |
| | | | | | AA037753, BF856066, AI189102, AA338222, AI284100, AI198266, BF239384, BF834463, H45086, |
| | | | | | AI079772, AI620932, W87609, C75448, AI498905, BE621931, AW272369, C75433, H45164, T68206, |
| | | | | | C75434, AA039244, AW473012, C75456, AA043857, AA627969, AA961372, AW192043, BF759521, |
| | | | | | AA643805, BE048627, AA916520, AU117291, AA327300, BF836781, AI247228, BF836803, AA480241, |
| | | | | | AA768298, AI187734, BC004898.1, BC008451.1, AF104012.1, AF042385.1, AF042386.1, AF104013.1, |
| | | | | | AL049824.4, AL033526.24, T57534, H45163, N79482, W87900. |
| HSKDR27 | 197 | 580874 | 1-748 | 15-762 | AI984221, AI740960, AW015044, BF591015, W80440, AI141908, AA627626, AA969950, AI581286, |
| | | | | | AW613262, AW170703, AW073992, BF338322, AA480836, R52038, BF436470, AW074677, AA994760, |
| | | | | | BE219883, AI381244, BE677262, R52037, BE327304, R49984, AW304136, BE042923, R47846, |
| | | | | | AA359428, AI538725, AW836013, C00374, BE550516, AA887620, AW873686, BG107838, BE048302, |
| | | | | | H50794, AI961625, W79036, AF177941.1. |
| HSNBM34 | 198 | 635131 | 1-2172 | 15-2186 | AL536186, AL531092, AU122269, AU141256, AL517543, AL536185, BE796661, AI052692, BG253425, |
| | | | | | BE902706, BG259810, BF343446, BE902245, AU121842, BE256726, AL517542, BG120047, |
| | | | | | AW149519, AI569076, BG250631, AI683339, BE902473, AU139256, AL513575, AI679283, BE049376, |
| | | | | | BF219821, AL048381, AI065090, BE867031, BE744360, BE256766, AI935198, AA573792, AI963086, |
| | | | | | BE250714, AW173560, AI690938, AA573194, AW172834, AW192800, BF570159, AW338466, |
| | | | | | AW173515, AI871886, AW264055, AW083435, AL513576, AI972125, AV692704, AI569959, BE252221, |
| | | | | | AW081978, BF569657, BE250299, AI355854, AU137971, AI884543, BF971275, BE279755, AU134876, |
| | | | | | BG119978, AA553785, AL535675, BG256137, AI624040, AW168911, BE251490, AI983677, BE617477, |
| | | | | | AA573798, AW770904, AA553547, AW338256, BF569362, AA151761, BE731933, BF914823, |
| | | | | | AW673207, AW058092, BE378102, BE903055, BF914811, BE328617, AA890369, AW469165, |
| | | | | | AA614295, BF569993, BE293188, BG024165, AI679858, AA527510, AI954296, AA984269, BG167033, |
| | | | | | BF972479, BG249971, AW591878, AV698722, BE546239, AU147891, AI826939, AI570855, AA552428, |
| | | | | | AI905936, AI569573, AL039833, AW250413, BF036826, AI683139, AV693761, AW169566, AL535674, |
| | | | | | BE962440, AL045941, AA677605, AI336684, BF913847, AW440576, AI205324, AA904129, AI564975, |
| | | | | | AI755277, BF914809, AI159924, AI521405, AW088700, BE677468, AA912041, AW380632, BF343383, |
| | | | | | BF341836, AI188483, AA522516, BF220206, AI262223, BE735412, AI361434, BE077394, AA767662, |
| | | | | | AI635929, BE737090, AU147581, BF993076, AI205326, AI521677, AI811718, BF718768, BE711050, |
| | | | | | AI460206, AV702376, AI311639, AI719493, BE735537, AV683959, AI521534, BF342262, AI090856, |
| | | | | | AI699887, AA588032, AA968679, BE350303, AI619645, AU157398, AW674246, AI969109, AA868921, |
| | | | | | BF915943, AW338122, AA845307, AW246981, BF087911, AA578419, AI888653, AI953992, BE300835, |
| | | | | | AA629593, AW250183, AI270688, AI000881, AA513481, AI363752, AW105447, AI270679, AI886380, |
| | | | | | AA812173, AW510415, AA524708, BF340665, AA970400, BF448244, BE219283, AI689550, AI859364, |
| | | | | | BE467489, AI708506, BE710103, BE256117, AA425828, AA937237, BE970114, F22742, BE544342, |
| | | | | | AA158179, AA602317, BF914430, AI689542, AA130387, BF973237, AI632858, AA928357, AA127724, |
| | | | | | AA938081, AW244083, AI682659, AI866898, AI623970, BE710235, BF914962, AI623338, AW073523, |
| | | | | | AA211741, AW973977, AI358676, F28467, AA643658, R48109, AA151925, BE545049, AA534398, |
| | | | | | AV705819, AV708856, AW516425, AI860032, BF055758, C06114, BE463647, AA195968, AI370030, |
| | | | | | BF059039, BE765152, AI581379, R97967, BF001465, AI201086, AW511857, AU135849, BF445756, |
| | | | | | AI365628, AA128332, BC000399.1, X86556.1, D43682.1, L46590.1, AC003688.1, AF156495.1, |
| | | | | | D78298.1, D78288.1, D78285.1, D78284.1, D78286.1, D78287.1, D78279.1, D78289.1, D78292.1, |
| | | | | | D78290.1, D78297.1, D78280.1, D78294.1, D78295.1, D78282.1, D78296.1, D78281.1, D78283.1, |
| | | | | | AJ012053.1, D78291.1, AF244932.1, T78657, R47994, R87991, R97966, H84516, N26144, W40579, |
| | | | | | AA002122, AA085935, AA112919, AA128534, AA157448, AA186877, AA192309, AA199682, |
| | | | | | AA464163, AA464227. |
| HSRFD18 | 199 | 840771 | 1-1875 | 15-1889 | AL037444, BE889424, BF439488, BF446681, AW297772, BE644962, AW295194, BF740081, BF813145, |
| | | | | | BE466328, AA716418, BE675824, BF196138, AI280149, AA814882, AA813632, BE221432, BE677733, |
| | | | | | AA358821, BF246362, BF700198, AW452195, AU144490, BE220601, AA761963, AA658222, |
| | | | | | AA327922, AI123037, AI473112, AW390382, BF992291, BE928864, R99503, AA055144, AU119961, |
| | | | | | AA182647, AW390381, AU130604, AA182483, AW390436, BF693283, AA054934, BF849246, R98214, |
| | | | | | AU117739, BF993158, BF002983, AA248903, AA179387, AA182760, AA934941, AI474620, BF670121, |
| | | | | | BF858341, BE928859, BE150427, AI912621, AA938230, BF919684, AF288393.1, AL096819.17, |
| | | | | | AK023095.1, AK000945.1, AL117441.1. |
| HSSEF77 | 200 | 658725 | 1-1039 | 15-1053 | AL533175, AL529660, AL529659, AL533335, BG111586, BG032361, AL528013, AI452722, BE837574, |
| | | | | | AI810976, AW955455, AA887990, AV684580, BE735736, BF309824, BE906705, BF663962, AA719399, |
| | | | | | AI190326, AI491944, BF976430, AA526699, AI745517, AI291744, AI374991, BF984742, AI828575, |
| | | | | | AI147212, AI291429, AA971270, BF914316, AI681964, AA747482, AI589781, AI760672, AW973135, |
| | | | | | AI191377, AW054812, AI282167, BF448406, AI076763, AI382209, AI819092, BE314426, AI653887, |
| | | | | | AW026209, AI291350, BE144273, AI025483, AW194181, BG032936, AI125991, BE205789, AW005070, |
| | | | | | AW166142, AI479431, AW340398, AI872247, H14119, BG120898, BF475933, AW001576, AI950052, |
| | | | | | AI038728, AA781105, AI983727, AI186987, AA635803, AA446939, AA393844, AA393826, AA041546, |
| | | | | | BE208340, AA595299, AA588205, AA968514, BE905601, AI272049, AA580350, T34621, AI445351, |
| | | | | | BE910075, AA039492, AI588901, W42714, R43919, AI095816, AA224332, AA635837, AI205639, |
| | | | | | AA308975, R88071, AI568018, AI261987, AI299347, AI346541, H19688, T67080, AA427787, |
| | | | | | AA652370, AA618584, N95318, AI133427, H20066, R60201, H19689, AW779512, AA536032, |
| | | | | | AA308974, R88422, T31859, BE140668, AI690936, BE140651, BE140664, BE140646, BE140650, |
| | | | | | BE140649, BF343597, BF726607, BE548803, AA953968, BE255716, AW576046, R88070, AA350360, |
| | | | | | AW178914, AW952572, BG010735, AA069325, AA532555, H52718, AW178907, BF237786, AA362297, |
| | | | | | BF932320, Z38557, AI372759, AA069378, AW178908, AW178912, AA742707, T31898, BF871214, |
| | | | | | AA535292, H19728, AI669449, T31864, AI089055, AW178911, R60434, R18809, AI192912, T29995, |
| | | | | | AA490233, BF871342, AI277302, AA425662, BF971439, AW178906, AA223799, AW973158, |
| | | | | | BF573284, T85919, AI198749, AW578878, AI336808, N75536, W23910, BF737039, AA375056, |
| | | | | | AA328758, AW407842, AW439026, AI354778, AI925482, BE394389, AW050516, AW178903, N91860, |
| | | | | | BG115873, W24575, BE778654, AI281040, W42907, AI028636, AI763001, BF572704, AW172594, |
| | | | | | AW178913, AA083263, BF093554, AA876195, AV685016, Z42333, AI955663, AA443363, BF922099, |
| | | | | | W05329, U79457.1, AC005041.2. |
| HSSGJ58 | 201 | 747714 | 1-1940 | 15-1954 | W88633, W88532, AW270778, R07788. |
| HSVBD37 | 202 | 637110 | 1-450 | 15-464 | |
| HSYBI06 | 203 | 740766 | 1-942 | 15-956 | BE785517, BE787741, BG111705, BG033016, BE745842, BE542832, AL041364, BE273298, AV725539, |
| | | | | | AW957979, AV713687, AV706551, BE612687, AL046322, BF677289, BF381144, BE179216, |
| | | | | | AA573189, AA581202, BF895251, H22202, AA130055, BE393171, BF589066, AI623423, AI889612, |
| | | | | | AA147286, BE872822, BE393266, AW750358, AA301758, R15638, AI264187, T61853, AA649148, |
| | | | | | AA669816, AA374929, BE748901, AA085863, H82057, H54292, AI360690, AW081194, BF847563, |
| | | | | | AI541147, AA642174, AA864575, AA380599, AA806762, AI932902, AW194802, AA348055, |
| | | | | | BE783212, AA078084, AI886434, BF674802, BE378761, BF989809, BF977908, AL041450, AW804415, |
| | | | | | AW955451, BE962907, BF816723, AA551509, BF185308, AV719846, N66945, BF740940, AA601492, |
| | | | | | AA327572, BE542021, AV709064, AA593060, H56721, BF762046, BF725131, AW157326, BF574125, |
| | | | | | AA323547, R29012, AV764386, AA669961, AI082510, AI446638, AI064952, BF680940, AI291823, |
| | | | | | AA984543, BF037677, AI312790, C05755, AI039809, AI336054, BF802386, BF529775, C06327, |
| | | | | | AI355587, AW977134, AW673941, AA558145, AW327960, AW327961, AI926846, AA360260, |
| | | | | | AI689256, BG121085, AV734583, BG056233, BG059938, AA714337, AI345161, BE385456, BF995557, |
| | | | | | N43757, BG056088, AI886365, BF668079, AA450199, BF982646, AA344959, AA723017, AW580735, |
| | | | | | AI921649, AV709707, AW903691, AI376100, BF438574, AW664161, BE221335, N26276, AW074059, |
| | | | | | BF826066, AI356904, AI922654, AI564284, AI244254, BE143666, AI678392, AW274064, AW020340, |
| | | | | | W07032, BF964995, BF574109, BE276559, BF849315, BF975014, R65801, T61559, F31799, AA192337, |
| | | | | | BF084762, AA384502, BF155030, AI926366, AW971960, AW438916, Z30128, BF155049, H25562, |
| | | | | | AI547286, AW503446, BF985073, AI053465, BF700500, AL157529, AI923140, N23643, AL049795.20, |
| | | | | | AK000724.1, AL078584.17, AC002319.1, AC020663.1, AL356421.10, AL354707.17, AL139351.37, |
| | | | | | AC012405.5, AL162417.22, AC009530.5, AC004934.1, AL513131.1, AC008502.7, K02924.1, |
| | | | | | AC078992.22, AP000744.4, AL117258.4, AL031286.1, AC009510.9, AC000087.2, Z83846.1, |
| | | | | | AL136059.2, AC004168.2, AL049796.28, AC004386.1, AL139322.13, AL354977.10, AL357519.19, |
| | | | | | AL161771.17, AL590638.6, AC006205.7, AC073657.5, Z84478.1, AL034346.31, AC074142.3, |
| | | | | | AP000298.1, AP000044.1, AP000112.1, AC008249.14, AC002985.1, AC005197.1, AC009412.6, |
| | | | | | AC007277.2, AC013526.6, Z86062.1, AC004019.20, AC022013.3, AC073347.3, AC009506.5, |
| | | | | | AC004821.3, AL392106.4, AC005625.1, AL121828.17, AL445071.14, AL157382.14, AL050342.42, |
| | | | | | AC005005.1, AC007182.3, AL049829.4, AB050050.1, AL357117.20, AL121891.22, AL354696.11, |
| | | | | | AC002094.1, AL513472.9, AL160408.24, AL035249.6, AL157817.13, AB023052.1, AC006138.1, |
| | | | | | AP000513.1, AL360020.15, AC007546.5, AL133355.12, AC005391.1, AL354861.11, AC010291.5, |
| | | | | | AC004253.1, AL034548.25, AF129075.2, AL354984.17, M33940.1, AC074338.1, AL135818.3, |
| | | | | | AL354995.13, AC006198.1, AC008440.8, AC024576.5, AC008964.6, AC011471.6, AC005548.1, |
| | | | | | AC008394.3, AL157911.4, AC007676.19, AJ312686.1, AC006994.4, AC000360.35, AL121889.8, |
| | | | | | AL161629.10, AL161628.9, AC007055.3, AB008502.1, AC007011.1, AL354871.12, AL138812.13, |
| | | | | | AL353812.13, AL136381.12, AC023347.8, AC005243.1, AJ289880.1, AC018801.4, AL353701.15, |
| | | | | | AC005330.2, AC002117.1, AC006409.2, AC005914.1, AC007179.3, AL133215.16, AL157837.10, |
| | | | | | AC005669.1, Z83843.1, AF039907.1, AC079127.28, AL096703.14, AL117350.12, AL158844.14, |
| | | | | | AC005737.1, AC008969.5, M84371.1, AL136537.4, AP000965.2, AC005866.3, AC007541.9, |
| | | | | | AL161731.20, AL136325.6, AC004477.1, AL078611.1, AC005221.1, Z82170.1, AL139182.24, |
| | | | | | AC004655.1, AC010378.6, AC003029.2, AL354808.24, AL157912.5, AL034405.16, AC007619.22, |
| | | | | | AL441883.11, AP001634.1, Z94801.1, AL161439.15, AC005392.1, AC002992.1, AL121965.19, |
| | | | | | AL033522.1, AC006057.5, AC005998.3, AL049636.22, AC008663.6, AL109935.39, AL354815.10, |
| | | | | | AL035450.1, AC016601.6, AC005231.2, Z84467.1, AP000321.1, AC004234.1, AC005704.1, AP000121.1, |
| | | | | | AL109807.16, Z98742.5, AL354831.18, AC016138.8, AC006028.3, AK024351.1, AL031846.2, |
| | | | | | AL049565.3, AC008753.8, AC024571.4, AL109806.22, AC005211.1, AP001709.1, AC004948.2, |
| | | | | | AL590037.7, AC002310.1, AL359713.25, AC010583.5, AC007312.1, AC008764.7, AC016605.5, |
| | | | | | AL021394.10, AC018682.4, AC008917.6, AL390135.1, AL391001.12, AC002526.1, AC022150.5, |
| | | | | | AC027644.9, AL136962.19, AL160175.5, AP000244.1, AL157776.15, AC008069.3, AP001716.1, |
| | | | | | AC001643.1, AC009318.11, AL133507.8, AL132718.5, AC012070.7, AC008997.5, AL121601.13, |
| | | | | | AC006254.10, AL352978.6, AL138997.18, AL590043.7, X03272.1, AC007246.3, AL132712.4, |
| | | | | | AL022163.1, AL158203.12, AP000455.4, AC011816.17, AF200923.2, AC005390.1, AP000349.1, |
| | | | | | AL355480.22, AP000620.4, AL356095.11, AP000742.4, AP002980.2, AL512506.8, AC007250.2, |
| | | | | | AL136365.9, AC010326.6, AC004531.1, AL445590.4, AL034349.3. |
| HT4FV41 | 204 | 853400 | 1-1750 | 15-1764 | AL515980, BF342485, BG024242, BE392890, BF027674, BF971316, BE298983, BE793618, BF001942, |
| | | | | | BF970981, AI760358, AI936900, BF001764, AI936213, AI972421, AI660472, AI685616, BF111876, |
| | | | | | AI589580, BF438674, AI352548, AI806167, AW001510, AI700727, AA602596, AI589071, BE502182, |
| | | | | | AW515689, AA526910, AI654874, AA854945, AA464374, AI361704, AL515199, AI742777, AI936806, |
| | | | | | AA308365, AA406024, AA480282, AI669893, AA489645, AI360290, AW772255, AI360045, BF794999, |
| | | | | | AA406023, AA427779, AW009207, BE999959, R54865, AA877768, AI224523, BF000485, AI760865, |
| | | | | | AI493484, AW080629, R54856, AI652849, BF738473, AI417480, AA781143, AI123060, D61114, |
| | | | | | AA622333, BE501244, AA781079, AA489750, AW845472, AA464263, R35409, AI672795, BF588552, |
| | | | | | BE501931, AW594675, AI025454, F08867, AW340176, AA349747, AI560405, R49206, AW009575, |
| | | | | | U46337, AA515576, AA443535, AA481437, F11201, AA558995, AW274968, BE892692, BF529100, |
| | | | | | BE908581, AI479915, AW235302, AW951943, BF032318, AW167825, AI382003, AW026765, |
| | | | | | BF769982, AW438845, AA318575, AI417016, AI589752, AI679614, AW674472, BG254199, AI926919, |
| | | | | | AI630739, AW080536, AI658574, AI640408, AI085905, AI917892, R50973, AI951291, AI761329, |
| | | | | | AW198163, AI932976, AW515657, AA228848, AL515981, AI867349, BF514311, AI627215, AW770041, |
| | | | | | AI363926, BE313294, AC011547.4, AC005331.1, AL136567.1, BC003076.1, BC007275.1, AL365369.1, |
| | | | | | BC008920.1. |
| HT5GR59 | 205 | 801930 | 1-1729 | 15-1743 | AI828929, AW293979, AI523779, AA936619, AW450260, AA133205, AA133189, AW368883, |
| | | | | | AI300320, AI087057, AA725865, AI242492, AA908905, AA864400, AA151624, AW075803, AA381038, |
| | | | | | AA381029, AA380752, AW075797, AI826859, AF034970.1. |
| HTDAA78 | 206 | 566861 | 1-811 | 15-825 | AV647189, AA326049, AL038602, AL036785, AA370470, F13152, AA350749, BE242772, AW672833, |
| | | | | | BE969897, AW962768, AU135142, BF701130, AU139947, BE893974, AI752229, AU136362, |
| | | | | | AU134961, AU139203, AL516351, BF182676, AU134839, AU118483, AU139729, AU140089, |
| | | | | | AU137541, AU135872, AU120600, AU117568, AU141398, AA095436, BF691608, AU121384, |
| | | | | | AL519083, BG114606, BG180075, AU116841, BE564255, C14161, AU137009, AW402207, AU120665, |
| | | | | | AU134088, AU135815, AW401697, BF795970, BG253254, BF130890, AU128710, BE276857, |
| | | | | | AW402905, AV742153, AA442195, AU135249, AU139670, AU134411, AU135522, BG177368, |
| | | | | | BE882210, AL537107, AU138561, AL035786, BF903145, AI752757, BF725287, AU134816, AA295005, |
| | | | | | BE896797, BF792619, AA376087, BE565863, BF106248, BF382779, BG169843, BE882021, BF795672, |
| | | | | | BE897424, AU140036, BF217892, AV702812, T19262, BF103674, W07391, BG167199, BG121253, |
| | | | | | Z42435, BF795574, BE730523, BE782289, BE885306, BF208276, BE961165, BE960840, D81404, |
| | | | | | AA093867, T83204, N55664, AA155940, AU076513, AW836346, AA319776, R98163, BF901489, |
| | | | | | BF352223, AL137800.12, AF006088.1, AF017807.1. |
| HTEAG62 | 207 | 812332 | 1-2207 | 15-2221 | AA789205, AI077497, AL138197, AI670821, AW628925, BE176789, BF679705, AW117287, |
| | | | | | AW958637, BE176843, AW369323, W37916, AA608906, AA827227, AA600253, AI160796, AA724269, |
| | | | | | AA278680, AA292636, AI990171, AA421368, AA421286, AA844108, AA292637, AA768446, W37874, |
| | | | | | AV692981, AA917528, AA278688, AA303058, AA625767, BE176924, AA382777, BF063207, |
| | | | | | BE176960, AI972100, BE245143, AA298808, AW316905, H47785, BE299050, BE245089, AA625768, |
| | | | | | BE843867, BE843864, AF117210.1. |
| HTECB02 | 208 | 806305 | 1-1648 | 15-1662 | BE379373, BG031015, AW149498, AL044040, BG031282, BE857201, BF726235, BF364900, |
| | | | | | AW959703, AI553977, BF928562, AW612861, BF000820, BF058081, AI817068, AA613730, AI022220, |
| | | | | | BE830386, AA431887, AI961535, W88594, F25178, AA838686, AI672702, AI333482, AI923896, |
| | | | | | AA402952, F36762, BE837829, BE717758, W78098, AI400106, AV660436, BE837766, AA535716, |
| | | | | | BF057504, BE837678, BF928572, BE830460, AA993708, AW027743, BE717863, R78236, AA085673, |
| | | | | | AA196288, BE837630, BE717820, BE717802, AW237368, F36061, BE837626, BE726105, F29210, |
| | | | | | W89094, T23988, AI263573, W79153, AI830608, T33297, AI914597, AA857862, AA262845, BE837738, |
| | | | | | T33694, BE837804, BF931745, AW028769, AA112222, BE830553, F33601, H26531, BE830491, |
| | | | | | BE830511, T08942, H14458, AA360060, AI300053, AI275634, BF842293, AA374366, AA431886, |
| | | | | | AA397396, BF439691, BE830471, AI660790, AA687775, BE837644, H86606, AA344590, BF795270, |
| | | | | | AI868936, AI554895, BE827734, AW977785, T33693, AI758641, AA196161, AA558873, AA837188, |
| | | | | | AI492169, F24809, BF093769, T24062, BF966806, BE827742, AA025595, AW575651, R84696, |
| | | | | | AI752555, BE247634, F34286, C21165, AA811094, BE717789, AW025207, BE830540, AW844221, |
| | | | | | BG026269, AF353674.1, BC006414.1, AF173358.1, AF111170.3, AF086420.1. |
| HTEDJ28 | 209 | 762845 | 1-1233 | 15-1247 | BE677232, BF061401, AW292792, AI581168, AA877125, AW440444, BE349436, AA071509, |
| | | | | | AA868903, BF732240, BF940844, AI921783, AI342109, AI088444, AI969667, AU144786, AI743896, |
| | | | | | BG057687, AI264619, AU160612, AW613291, AA071344, AU146005, AI026905, AA609802, |
| | | | | | AA010635, AA236218, W47649, AU149858, AW103817, AA548757, AL046684, AI215128, AI131520, |
| | | | | | N25329, AI005190, AI301854, AI244936, AI186155, AI935066, N23317, AA732795, AW148863, |
| | | | | | AI224009, AA694553, AI382106, W69782, AI078650, AA769526, AA969431, AI282266, C06495, |
| | | | | | AW592247, AA234139, AL527621, AW390160, AA083834, AA864608, BG168896, AI491973, |
| | | | | | AA211121, AI797758, AI339980, BE348868, AA707519, AA442229, N45501, N78901, AI139186, |
| | | | | | W05352, AI144536, AA442894, AA961494, AI074988, AI246446, AI392658, AW183376, AA768697, |
| | | | | | F33077, AA484612, AA452819, AI130902, AI352222, AA506594, AL517938, T65403, AW377143, |
| | | | | | AA045703, AA977428, AA431202, R60581, AL518014, AA702219, AW886890, AA056459, AI239789, |
| | | | | | AW295723, BE005894, AI537842, N21105, N90303, F09614, AI092082, T27964, AW021757, BE673087, |
| | | | | | D55099, AV702429, R46091, R43333, AA669902, N72031, AA280650, AI818000, AI254234, BE825634, |
| | | | | | W44412, BE833373, AW884539, AI538078, N80058, AA722648, AI674250, R43151, BF447167, |
| | | | | | BF222134, AA524771, AW518792, AI799830, AA836174, AI658972, AA725477, W19473, AW392973, |
| | | | | | AA431526, W47648, AW869322, AA282028, AI718283, W45674, N99484, BF820635, H94760, |
| | | | | | AI359395, L10413.1, AL138680.15. |
| HTEHU59 | 210 | 840385 | 1-1509 | 15-1523 | BG249175, AL046260, AW963943, AI828967, AW955696, AI760208, AW297718, AI032354, |
| | | | | | AA417102, AL121147, AA806454, BF216179, AW514160, AA417206, W73366, N39447, N75616, |
| | | | | | N22370, W73427, N65972, AI370121, AI440453, C16433, AW470432, N98313, AW204089, AA444140, |
| | | | | | AL046261, H06227, AI796882, AA443958, AA789252, AI221678, AA716720, AW439530, AW873326, |
| | | | | | AI143241, N35303, AW613664, AA887889, AA845989, AW665345, BE218168, AI333474, AI333483, |
| | | | | | AI361785, BE464766, BE326250, AI680844, AA936826, BE348681, N94234, T90568, AI693650, |
| | | | | | AI971432, AI864735, R32990, AA379582, R40841, AA037360, R79419, AA364460, AW502585, T26572, |
| | | | | | BF248365, R79420, AA765052, BE763303, AV710415, AW137034, BF916703, N48559, BE504072, |
| | | | | | AW500077, AA663027, H38490, BE545425, AA953152, AI963960, BE907434, AL049814.6, AL137010.4. |
| HTEJD29 | 211 | 695798 | 1-1310 | 15-1324 | BE671326. |
| HTEKM46 | 212 | 862069 | 1-2102 | 15-2116 | AI207971, AI205594, AA682764, AA682743. |
| HTENR63 | 213 | 877952 | 1-1577 | 15-1591 | AL514834, AL519774, AL519775, AV718320, BG250554, BF977554, BE789757, AV756237, BF671459, |
| | | | | | BG106414, AV715861, BF572599, BG057663, BF217559, AV749968, AI077492, BF184114, AW967760, |
| | | | | | AA846408, AA459210, AA903217, AI347959, AI582241, AW971593, AI278012, AA100876, AI074700, |
| | | | | | AI298343, AI074060, AI311669, BF238802, BG119710, AA406286, AI033923, AA724520, AI763007, |
| | | | | | AI740717, AA128558, AI379680, AA004836, AA833531, AI278000, AI439855, AI400336, AI290630, |
| | | | | | AA634213, AW150186, BE568250, AA421978, AA128559, AI374862, N25943, N77531, AI023705, |
| | | | | | N57673, AI056028, H15660, AI335324, AW959305, H81498, R43996, AI350653, AI373175, AV658593, |
| | | | | | AA814728, AA662834, AA081891, AW955532, H19112, H19113, AV756519, AV733082, W05362, |
| | | | | | N99540, W31289, AV758671, AI247545, H47163, AI248038, W07017, H47079, Z42635, H52184, |
| | | | | | N80057, Z40369, AI279669, F02139, BF724942, AA252585, T34459, H52183, F01223, AA004960, |
| | | | | | F01768, H01616, AA463663, N77397, BE001644, Z44438, N71498, BF590848, H01510, AA082578, |
| | | | | | N39281, Z28427, AW511477, AA252535, AI378080, F05502, BG169062, AW023590, AW983703, |
| | | | | | AW983691, BG105812, BG120816, BG026746, BG031815, AL079963, BG179993, AI491852, BF816037, |
| | | | | | BG029053, AL045774, AI923989, BG121959, AI698391, AV757996, BF343205, BF344652, AW198075, |
| | | | | | AI815855, BG029829, AV756560, BF793176, BF885081, BG026447, BG110517, AI307604, BF341801, |
| | | | | | BF338002, BE789764, BF971336, BE964614, AI468872, BF344734, AI699865, BE964497, BG112718, |
| | | | | | BF970449, BG259944, BE879906, BF814527, BE047737, BG180996, AL119791, AL513907, AV682740, |
| | | | | | BF969228, AI334450, BF792961, AV733397, BG170937, AI917963, BF527014, AL514627, BF970652, |
| | | | | | AV716358, BF982767, AL041150, BF895953, AL047275, F27788, AL041772, AL039086, AI358213, |
| | | | | | BE048026, AL041220, AI802542, AW172723, AI702073, AL043975, BG058150, BG108324, BF970768, |
| | | | | | BG110946, BE047852, Z99428, AL036638, BE964603, AI537677, AV723204, AW961463, BE879612, |
| | | | | | BE886858, AL121365, BF812431, BG113188, AI345180, AV723062, AI866465, AV729934, AV714085, |
| | | | | | BG260037, BF856052, AL119863, BE965067, BG029667, AI521012, BE910373, AV723772, AW269098, |
| | | | | | AI345148, AI632408, BF037484, AV755207, AW268251, BE965599, BG251478, AL514691, AI824576, |
| | | | | | AW029611, AW827103, AW151136, BF885675, AW268220, AW149925, AW161156, AL037454, |
| | | | | | BE874133, BF814357, BG111377, BF054789, AW071417, BF827575, AW079572, AW268768, |
| | | | | | BE045182, AW983829, AW983832, BG257535, AV755459, AW022682, AV722478, AV724569, |
| | | | | | BG107576, BE785868, AA640779, AW163823, AL047344, AF242524.1, AL512746.1, AL096744.1, |
| | | | | | AL117435.1, AL133568.1, AL512719.1, AL512765.1, AL122118.1, AK026592.1, AL122110.1, |
| | | | | | AK027096.1, AK026506.1, AF104032.1, AB063070.1, AL136844.1, AB055361.1, AL050116.1, |
| | | | | | AF125948.1, AL133606.1, AL050277.1, AL136749.1, AL512750.1, AL162006.1, S78214.1, AK024538.1, |
| | | | | | U39656.1, AB048975.1, AK000323.1, AL117457.1, BC008387.1, AF210052.1, AB063088.1, |
| | | | | | AK026927.1, AL136787.1, AK026528.1, AK026480.1, AL389939.1, AB052200.1, AF260566.1, |
| | | | | | BC006195.1, AL359622.1, AK025967.1, AB056420.1, AK026613.1, AF090900.1, AL137273.1, |
| | | | | | AL137429.1, AK027081.1, AL133080.1, AK026762.1, AK025798.1, AL512718.1, AK024588.1, |
| | | | | | AB055374.1, AL049314.1, AB048953.1, AL122093.1, AL133560.1, AF100781.1, AF090934.1, |
| | | | | | BC001967.1, BC004958.1, AF217991.1, AF146568.1, AL137527.1, AF132676.1, AF061836.1, |
| | | | | | BC003682.1, AK027116.1, AL512689.1, AB060839.1, AK025465.1, AL133565.1, BC005858.1, |
| | | | | | BC008280.1, AK025084.1, AB063046.1, AL137459.1, BC002697.1, AF056191.1, BC007199.1, |
| | | | | | BC008365.1, AL359596.1, AK026408.1, AL122050.1, AJ299431.1, AK026542.1, AK026045.1, |
| | | | | | AF113222.1, AL359601.1, AF090903.1, AL353956.1, AK000618.1, BC003683.1, AB052191.1, |
| | | | | | AL137557.1, AK025209.1, AB060908.1, AL136586.1, AL080148.1, AF106862.1, S61953.1, AK026086.1, |
| | | | | | AF097996.1, AL049283.1, AF225424.1, AK026744.1, AK025092.1, AL137480.1, AF252872.1, |
| | | | | | AL133113.1, AL050393.1, U42766.1, AL122121.1, AF111112.1, AB050510.1, AK027114.1, |
| | | | | | AK024992.1, Y16645.1, AB060826.1, AL136622.1, AL390154.1, AB047904.1, AB060863.1, |
| | | | | | AB060916.1, AB048974.1, BC003687.1, AB049758.1, AK025383.1, BC004925.1, AL136843.1, |
| | | | | | AB063079.1, AF090896.1, AK026532.1, AK000718.1, AL137521.1, BC008488.1, AK026865.1, |
| | | | | | AK000614.1, AF348209.1, AL353625.5, AL133067.1, AB055315.1, AL137478.1, AK025339.1, |
| | | | | | U58996.2, AL110221.1, BC007021.1, X98834.1, AL137476.1, AL162002.1, AL162083.1, AL050024.1, |
| | | | | | AK000137.1, AK026784.1, AL137538.1, AL136789.1, AK026534.1, AK024524.1, AL133104.1, |
| | | | | | BC009033.1, AF090943.1, AL512684.1, AL049382.1, AL133640.1, X69819.1, AL359583.1, AK026741.1, |
| | | | | | AL512733.1, AB048954.1, AK026630.1, AB060825.1, AB060852.1, AB056809.1, AL162062.1, |
| | | | | | AK026452.1, AF111847.1, AL110222.1, AK000652.1, AK026464.1, AK026504.1, AL110196.1, |
| | | | | | AK000445.1, AK026583.1, AK000647.1, BC008417.1, AL137550.1, AL512754.1, AK025958.1, |
| | | | | | AK025414.1, AK027204.1, BC006807.1, AB055303.1, AB060887.1, Y14314.1, AK025312.1, |
| | | | | | AL050149.1, AL133016.1, BC003684.1, AK025772.1, AL442072.1, AL353940.1, AL110225.1, U91329.1, |
| | | | | | AK027868.1, AF078844.1, AF091084.1, AL080159.1, AL137271.1, AB047941.1, Z82022.1, AK027193.1, |
| | | | | | AK000083.1, BC002733.1, AK026647.1, AL137488.1, AL136892.1, BC006201.1, AF321617.1, |
| | | | | | AF026816.2, AK026533.1, AK027113.1, AL049466.1, AL137526.1, AK026526.1, AL049430.1, |
| | | | | | AL137560.1, AB063008.1, AF217987.1, AK027164.1, BC009212.1, AB062938.1, AK025632.1, |
| | | | | | AY034001.1, AF061795.1, AF151685.1, BC004556.1, AF090901.1, AL389982.1, AL080124.1, |
| | | | | | AL080060.1, AB060912.1, X82434.1, AK026353.1, BC008899.1, AK000432.1, AF218014.1, |
| | | | | | AB047615.1, AK026959.1, BC004951.1. |
| HTGBK95 | 214 | 834490 | 1-1117 | 15-1131 | AL522125, AL522126, AL519350, AL529333, BF978108, BE217821, AW299468, BG106602, BE326803, AU149173, BE646271, AU153293, |
| | | | | | AU154281, AI432448, AI039818, BE467032, BE042910, AU152129, |
| | | | | | AU160794, AU153911, AI571337, AA237091, AI963695, AI635374, AA932292, AW043706, AI302679, |
| | | | | | AA236679, AA767544, AI735388, N42646, AI590210, AI224546, AI632813, AA234900, BF338277, |
| | | | | | AI085872, AW002721, AI049665, AU149933, AI142800, AI269171, AW242940, AI741857, BF034584, |
| | | | | | AI653576, R94321, N68116, AA513076, R43971, R94225, H05324, H24266, BG111524, R97540, |
| | | | | | Z41226, AA235171, N67392, AA991730, BF925392, AI521589, BF966823, BG110768, AW410784, |
| | | | | | BE205895, AI914747, AV699173, AV752994, BF037819, AL046227, AP001728.1, AP000010.2, |
| | | | | | AP001432.1, AP000151.1, D87343.1, AC007383.4, AP000344.1, AC007172.6, AL021155.1, AC011481.4, |
| | | | | | AC006994.4, AL591104.2, AC011491.5, AC002565.1, AC002073.1, AP000030.1, AL512347.14, |
| | | | | | AC018639.8, AC010092.4, AL391241.21, AC004638.1, AL136168.4, AC084865.2, AP001746.1, |
| | | | | | BC008280.1, AL354760.11, AL132768.15, AL035458.35, AL365338.17, AP001711.1, AK025798.1, |
| | | | | | AC009779.18, AC015982.9, AL031726.22, AL049539.21, AC004797.1, AC034240.4, AP000208.1, |
| | | | | | AP000130.1, AL031733.3, AP000247.1, AC083871.2, AC083884.6, AF042090.1, AC018719.4, |
| | | | | | AC006334.3, AC011811.42, AC007563.2, AC004878.2, AC004227.1, AC020552.4, AP000045.1, |
| | | | | | AP000113.1, AL118520.26, AC008551.5, AC018758.2, AL163282.2, AL353716.18, AL157372.18, |
| | | | | | AL590037.7, AP001710.1, Z82214.23, AC008507.8, AC023880.5, AC020928.6, AC008755.6, |
| | | | | | AL356747.18, AL445645.10, AL031727.42, AC005562.1, AC002425.1, AL079342.17, AL136126.34, |
| | | | | | AC004883.2, AL034374.2, AC019184.3, AC009501.3, AC002558.1, AC006435.7, AC004383.1, |
| | | | | | AL031985.10, AC073316.6, BC007199.1, AF307337.1, AL133444.4, AC011484.4, AP000313.1, |
| | | | | | AC007551.1, AC011450.4, AC006023.2, AL158158.14, AL121897.32, AF334404.1, AC006006.2, |
| | | | | | AC007003.4, AL050307.13, AC009484.3, AL391122.9, AC007597.3, AC005086.2, AC022425.6, |
| | | | | | AC006039.2, AP001695.1, AC073964.3, AC006345.4, AC009220.10, AC004166.12, AP000050.1, |
| | | | | | AJ400877.1, AC005399.19, AL137060.13, AC004750.1, AC025754.4, AC003043.1, AC004882.2, |
| | | | | | AC024028.10, AL022165.1, AL121722.9, AC005212.1, AC005736.1, AL022311.5, AL035423.4, |
| | | | | | AC079602.15, AC010650.8, AC004098.1, AC006487.8, AC012306.11, AP000117.1. |
| HTGGM44 | 215 | 842856 | 1-3002 | 15-3016 | AW974580, BE764084, AA651951, W01997, H68969, AI459019, H70945, AA486949, T66948, T66949, |
| | | | | | AA486772, BF329143, BF108414, AW469166, AI568694, T57664, AL133623.1. |
| HTHBZ06 | 216 | 832477 | 1-609 | 15-623 | BG107523, BG180234, BF668800, AL514985, BF339863, AI400160, AI566873, BE909457, AW262875, |
| | | | | | BE906621, AW470063, AI758577, BE907206, AA777509, AV715444, AW131846, AA406614, |
| | | | | | AW087747, AI811951, AI371781, AI742506, AI337891, BE738291, AA934901, N40173, AW157527, |
| | | | | | AI742505, AI374781, AI081113, AW173107, AI379523, AV756830, AI139790, AA195689, AI801399, |
| | | | | | BG054839, AA532727, AA235284, AI087379, AI792601, AI952545, AI245243, BG026067, AI805770, |
| | | | | | AA600140, AI040546, AV703045, AI753737, AA625963, AW591860, AA159931, AA477326, AI360032, |
| | | | | | N40209, AI864174, BF197737, AA430365, AI829158, AI869836, AI955815, AI804015, BF909529, |
| | | | | | N30689, AA478600, C16344, BE906555, AI640196, AW072764, BF306291, AA905154, AA481723, |
| | | | | | AA758776, AI371005, R78607, BE783860, AA865424, AW242058, AI185821, H64413, AA302463, |
| | | | | | H64463, C16267, C15288, AV750104, H92638, AW972807, AI566669, AA302462, AI468749, |
| | | | | | AW090440, AI336687, AI934133, AW512971, BF542108, C16184, C16080, R78608, F05286, AI269595, |
| | | | | | AW800298, AA021044, C16548, AA315033, R46768, R35721, BE885010, BF870311, R25875, F02653, |
| | | | | | BF675020, AA761420, F22486, D57610, F00189, AA906821, BF028115, BF081348, AW367390, |
| | | | | | BE465797, Z24901, AW963734, C16270, AA527113, AA527036, AA373921, BE074601, AA479641, |
| | | | | | BE074603, AI680768, AW316622, AW606067, AW606056, AW370132, BF766618, C16603, C16455, |
| | | | | | C16334, AI273095, AA833555, AA479334, AA657967, AV748779, BE737983, AW972454, AI857650, |
| | | | | | BE925004, D11915, AA479335, D12263, AA165042, BF379271, BF087468, H89161, BF743712, |
| | | | | | AA732498, AV646354, D12285, AW954020, AW085952, AL514986, AA363869, AV736361, D12284, |
| | | | | | AA989012, AF006484.1, AB006077.1, AC010904.10, AL139184.8. |
| HTLBT80 | 217 | 840045 | 1-2087 | 15-2101 | AL519674, AL518564, AL530114, AL524125, AL518563, AL524124, AL519673, BG119582, BE736220, |
| | | | | | BE734743, BE782619, BF795936, BG248163, BE869185, BE893350, BF435225, BE905414, BG026633, |
| | | | | | BF033083, BF970046, BE885230, BF692625, BF692541, BE892741, BE393898, BE389940, BG163906, |
| | | | | | BE313920, BE312030, AI741613, AI762578, AI241474, AI813813, AI922418, AI990378, AA018345, |
| | | | | | AW631237, AW151233, AI400794, AI420163, BE550276, AI949071, AW963076, AI922430, AA614565, |
| | | | | | AW051437, AA018346, AA612852, AI000311, AI338519, AI360869, AW613433, AI356485, AW590872, |
| | | | | | W56183, AA417581, AI214800, AI671156, AA451942, BE242648, AW390145, AA001019, R69763, |
| | | | | | AI419907, AA768838, AA482598, AI696492, AW473585, AI674961, BE868575, AI247090, H08477, |
| | | | | | AA576510, BE391031, H06603, AI018102, T56902, W56260, BF372172, AA001020, AI285366, R87304, |
| | | | | | BF928779, BG152437, AA814595, AI569050, AI239612, H06633, AI623626, R69764, AA971138, |
| | | | | | H07140, BE856299, AI357631, AI001995, AW243905, R48323, BF003017, H43938, H52166, AA026966, |
| | | | | | BF988194, W22979, BF372164, H89737, R87305, BF677308, R48432, AA347636, AW080561, |
| | | | | | AA593837, AI459770, T56903, H08759, AW750152, AA876261, AA450330, AW797547, BF508949, |
| | | | | | BE833483, BF512980, AW300516, BE076134, AA514688, AI476002, AW884714, BF992680, AI568120, |
| | | | | | AA578364, H89800, BE503792, AA344443, T77366, BF811395, AV699752, BF748071, AW367168, |
| | | | | | AA450329, BE833631, AW198236, R30662, BG115081, BG115274, AW275152, AA216315, AW821860, |
| | | | | | AA347637, AW953095, BF088397, AF132949.1, AL133227.15, Z55376.1, Z55375.1. |
| HTLCX82 | 218 | 847091 | 1-906 | 15-920 | BE895266, AI692666, AW157552, AI015973, AI689900, AW963262, AW131853, BE218199, AA894904, |
| | | | | | AI758863, AA778702, BF437932, AA808247, AI990148, AI692715, AI472271, AW001076, AI369125, |
| | | | | | AI366347, AW172292, BE218953, AL042649, AW663918, AW592717, BF197398, AI671343, AI689434, |
| | | | | | BE327560, AA705479, AI890951, BG056326, AI986066, AA884562, AA443162, AI457884, AI824337, |
| | | | | | AW613722, AW249607, AW245434, AA635189, AW295998, AW016141, AW884250, AA127947, |
| | | | | | AI339109, AI205715, AI983135, AW167189, AI651614, BF115478, AI655941, AW339846, AA576928, |
| | | | | | F34913, BF195244, R44195, AW615232, C17097, Z38497, AA127981, AI674340, BG179291, AA371600, |
| | | | | | BE407998, AI857515, BG057320, AI954654, H55670, AA913215, AA463452, AI968885, AI636240, |
| | | | | | BC003015.1, AC004471.2, L77570.1, L77566.1, L42347.1, U84520.1. |
| HTLDU78 | 219 | 637702 | 1-1304 | 15-1318 | AA417099, AA435761, AA417203, BF748721, AA972917, AI660387, BF748720, AC011444.5. |
| HTLEV48 | 220 | 723799 | 1-1056 | 15-1070 | BG113122, BE246780, F21473, Z18867, T48103, BE246456, F27546, AL079300.11, AB042648.2. |
| HTLFA13 | 221 | 535937 | 1-1146 | 15-1160 | AA599080, AC018808.4, AC034193.4, AC022007.3, AC090958.1, AC018841.3, AC022234.3, |
| | | | | | AC007999.12, AC018828.3, AC018758.2, AF168787.1, U91321.1, AC002091.1, AC010530.7, |
| | | | | | AC004765.2, AL031427.15, AF111168.2, AC005911.6, AC021188.6, AC005783.1, AC010150.3, |
| | | | | | AC078962.30, AC024028.10, AL121585.22, AL049795.20, AL391834.8, AC005829.1, AL353579.17, |
| | | | | | AC022384.4, AL049776.3, AC007030.3, AL096700.14, AC002352.1, AC008011.11, AL158830.17, |
| | | | | | AC006130.1, AL139329.15, AC018500.3, AC005077.5, AL136137.15, AL022315.1, Z85996.1, |
| | | | | | AP001752.1, AC025165.27, AC006449.19, AC009144.5, Y18000.1, AC005056.2, AC006211.1, U95742.1, |
| | | | | | AC010956.12, AL117381.32, AC008162.3, AC022392.4, AL137244.28, AL050335.32, AC011247.10, |
| | | | | | AC005095.2, AL121601.13, AC005531.1, AC074121.16, AC004491.1, AL049780.4, AL035704.9, |
| | | | | | AC010422.7, AC018812.5, AC007707.13, AC018644.6, AC008806.4, AL023583.25, AL031985.10, |
| | | | | | AC018663.3, AC005529.7, AC008755.6, AF190464.1. |
| HTLGI89 | 222 | 835069 | 1-2363 | 15-2377 | AL527649, AL521837, AL521838, AL526812, AL522637, AL516967, BE796246, AL516968, BE733427, |
| | | | | | AW953470, BE267273, BF984794, BF663431, BE746021, BE744871, BE727677, BE792949, BE891911, |
| | | | | | BG032127, BE732800, BE880158, BG029699, BF739970, BE547454, BF033906, BF341854, BE410292, |
| | | | | | BE407731, BF974054, BE730406, BE280141, BE276759, BE396111, BG033296, BE313127, BE266155, |
| | | | | | BE276474, AW245780, AW245421, BF726872, BG259961, AW170348, AA454052, BE387107, |
| | | | | | AI125210, BF888054, AW960189, BF109831, BE883630, BE207211, BG024467, AW403899, BF894254, |
| | | | | | AA789053, AI208601, BF432565, AA031930, AA032048, AI024666, W07699, AW615502, BE296793, |
| | | | | | AI001138, AI200867, AI356072, AA622587, AA632148, AA934612, AI369198, AI570447, AA846843, |
| | | | | | AA758922, BF907531, AI332639, BE276249, BE386995, BE795828, AW271396, AI095065, AI208972, |
| | | | | | N62476, C06239, AA864754, AI278658, AA431596, AA676722, AW402977, AA099581, BF888062, |
| | | | | | AI125001, AA609502, BE901965, BE901394, BE797702, BF110024, BE902040, R87506, AI570705, |
| | | | | | AA847774, AA062669, AI283903, H80426, AI493468, AA351375, AA766390, AA621386, AU141193, |
| | | | | | AA468656, AL522636, AW960190, AW387425, AA813039, BE733825, H24175, AA361930, AI862627, |
| | | | | | AA305197, R98946, BE304538, AA975165, N80670, BE019577, AA644232, BE736900, AI034164, |
| | | | | | AW245820, R23321, AI245639, R78483, BE265415, AW375225, BE266374, BE280632, AA137081, |
| | | | | | BE733565, BE901113, AW955959, AW375213, BE267493, AW375220, BE539912, R23244, BE733342, |
| | | | | | N79196, T16377, T09166, BE799665, BG222879, M85399, R98861, AW080224, AA628355, W73606, |
| | | | | | AI763081, N50148, AI721021, AW089049, AA226886, AW615653, BE464923, AW089305, AI004405, |
| | | | | | R87588, T04952, R10049, AW078905, AW083608, H17382, BG223318, AA811085, AI245727, |
| | | | | | AA380030, R78526, H80425, AA226922, AW371367, AW732928, BF931203, R10928, AA136972, |
| | | | | | AW377690, AW374893, BE841909, R10879, AA353058, AW374895, AA995577, AI001882, AI015767, |
| | | | | | AW363526, AA377815, H24067, BG223317, BF931143, BE827975, AA557715, BG122019, AV747893, |
| | | | | | AA862807, T09167, AW771700, AI338369, AI808072, AA453634, AA100486, BF987667, BF931921, |
| | | | | | AA774221, BG059802, BE539623, AA101981, AA884482, R16694, BF887393, AW749084, BF338616, |
| | | | | | AA768482, AW473754, AW198229, AA357596, AA379498, AK027528.1, AF290613.1, BC005021.1, |
| | | | | | BC003387.1, BC003612.1, AF020797.2, AK023863.1, AF225424.1, AF090900.1, AK026865.1, |
| | | | | | AL133640.1, AK025084.1, AB060916.1, AB063046.1, AL122093.1, AL136749.1, BC008488.1, |
| | | | | | AL512719.1, AL512754.1, AK026532.1, AK024538.1, AL359601.1, AB055361.1, AK000137.1, |
| | | | | | AF106862.1, X82434.1, AK025092.1, AL050149.1, AL122121.1, S78214.1, AB063070.1, AL137527.1, |
| | | | | | AF104032.1, AL512733.1, AL512746.1, AF091084.1, AB060912.1, AL359615.1, AB019565.1, |
| | | | | | AF090901.1, AL122050.1, AL133560.1, AF090934.1, AB060826.1, AK027096.1, AL359618.1, |
| | | | | | BC008387.1, BC002733.1, AL162006.1, BC001045.1, AB060852.1, AL442082.1, AK026542.1, |
| | | | | | AL133606.1, AL049314.1, AK000083.1, AB052200.1, AL136892.1, BC006195.1, BC007021.1, |
| | | | | | AL117460.1, AK026452.1, AL359941.1, AL162083.1, AK000445.1, AK026045.1, AB060863.1, |
| | | | | | AB048954.1, AF125948.1, AK026592.1, AB051158.1, AB048953.1, AB047904.1, AL133080.1, |
| | | | | | BC008899.1, AF218014.1, AB063008.1, AK026959.1, Z82022.1, AB060908.1, AL133075.1, BC003687.1, |
| | | | | | AF097996.1, BC006807.1, AL137459.1, AJ242859.1, AL117435.1, AL049452.1, BC008417.1, |
| | | | | | AL137550.1, AF090943.1, AL050277.1, AL110196.1, AK026741.1, AB060825.1, AL136789.1, |
| | | | | | AF090903.1, AL136799.1, AL157431.1, AB055315.1, AF078844.1, BC007199.1, AL136928.1, |
| | | | | | BC001967.1, AK025339.1, AK026608.1, AL359596.1, AL110221.1, AL117457.1, AK026534.1, |
| | | | | | AL050116.1, AL353940.1, AF090896.1, AL049464.1, AL389978.1, AK026784.1, BC008365.1, |
| | | | | | AL080124.1, AK000618.1, AL050108.1, AK026533.1, AK026744.1, AB056420.1, AL133016.1, |
| | | | | | AL137557.1, AF219137.1, AL136586.1, AL049466.1, AK000652.1, AK027868.1, AK026504.1, |
| | | | | | Y16645.1, AL136844.1, AB062938.1, AB055303.1, AB055368.1, AB060887.1, AL050146.1, |
| | | | | | AL050393.1, AL122123.1, AK027113.1, U42766.1, AB047615.1, AB055366.1, AK025491.1, |
| | | | | | AL117585.1, AF125949.1, AB049758.1, AF111847.1, AL442072.1, AL117394.1, AK026855.1, |
| | | | | | AK026647.1, AF177336.1, BC003683.1, AK025772.1, AF146568.1, AL389982.1, AL137283.1, |
| | | | | | AK026583.1, AL117583.1, AL136768.1, AL512718.1, AL133565.1, AL080060.1, AL133557.1, |
| | | | | | AL096744.1; BC004556.1, AL133093.1, AL136787.1, AK025414.1, AF207829.1, AK000212.1, |
| | | | | | BC008070.1, AL390167.1, AK024524.1, AL049300.1, AL049938.1, AB048964.1, AK000432.1, |
| | | | | | AK025958.1, AK027204.1, AL110225.1, AL080137.1, AL136845.1, AB056768.1, U91329.1, |
| | | | | | AK025967.1, AL049382.1, AF183393.1, BC004951.1, AK026353.1, AL050138.1, AK026086.1, |
| | | | | | BC002839.1, AL136786.1, AB056421.1, AK027213.1, AB047801.1, AK026927.1, AL359583.1, |
| | | | | | BC008485.1, AL512689.1, X65873.1, AK025391.1, AL122098.1, AK000323.1, AL133113.1, |
| | | | | | AK000614.1, AB052191.1, AL512750.1, AL049430.1, AL137271.1, AL080127.1, AK025524.1, |
| | | | | | AF260566.1, U80742.1, BC008382.1, AK027164.1, AK026629.1, AK024588.1, AL050024.1, |
| | | | | | BC008280.1, AK026947.1, AB060929.1, AK000718.1, AL137463.1, AL122110.1, X72889.1, |
| | | | | | AL137648.1, AK025632.1, AL512765.1, AK000647.1, AL512684.1, AL137521.1, BC008983.1, |
| | | | | | AL512761.1, AL137538.1, AK026630.1, AB056809.1, AL162062.1, AK025484.1, AK027116.1, |
| | | | | | BC005168.1, AK026526.1, AL359622.1. |
| HTNBK13 | 223 | 831967 | 1-1146 | 15-1160 | BE799670, BE794458, BF969839, BF116235, BE894258, AI755110, BE693669, AA209372, AA209368, |
| | | | | | AV702645, AW957276, AV724122, AW517214, AW173346, AA197278, AI609300, BF726226, |
| | | | | | AI261762, BE882052, AI400083, AA112077, AI242204, AA114827, AA314213, AI741473, AI828740, |
| | | | | | AI982748, AA197243, AI140451, BF923463, AA838629, AA854805, AA114846, N59363, AA931373, |
| | | | | | AA972617, BF358017, AI687104, AA234016, AA843577, AA625125, AA133768, AA911212, AI553981, |
| | | | | | AA304885, AA133767, R76792, AI559186, AW874604, BF358016, BE180724, AA486696, BG248840, |
| | | | | | AA733214, R75956, H24319, AA447346, AW839247, AA633116, AI187039, AA877750, AA938362, |
| | | | | | AA083910, AA384854, N32060, H23039, AA678500, F16874, AA972329, T84723, AW372424, |
| | | | | | AW372436, AA906710, AW372421, AW372425, AW372444, AW372435, AW372434, AW372427, |
| | | | | | AW372439, BF897466, AW372423, AW062891, AW372443, AW372420, AW372440, AW372433, |
| | | | | | AW372437, AW372422, AW372432, AW372442, AW372430, AW372428, AW372419, AW372429, |
| | | | | | AI383049, AI383050, AW372431, AI702272, AI701769, AW372274, AW372408, AA092723, AA634344, |
| | | | | | AW805484, AI623944, AI985597, AW073164, AW372407, AA352209, AW749114, AW629894, |
| | | | | | AA912615, AA825365, AA029876, H55702, BE814640, AA975153, T52666, AI540674, AW073898, |
| | | | | | AA857847, AA808175, AV721824, AI298026, AW834282, AW952443, AI287233, AI784233, BE966278, |
| | | | | | AA809897, AL514721, AI698391, AI500714, BE905211, AI978703, BE874163, AA868961, AW051088, |
| | | | | | AL514025, AI570884, AI250627, AW827249, AI366900, AV713528, AI633125, AI538564, AI915291, |
| | | | | | AW152182, BE393784, BE843239, AI582932, AI590043, BF970040, BF811804, AI889189, AL514511, |
| | | | | | BF724894, AA641818, AI866469, BE965208, AI884318, AI638644, AI570056, W74529, AI804983, |
| | | | | | AL513779, BF814449, AI699823, AI345745, AL514871, AV733582, AI351959, BE896769, AI628337, |
| | | | | | AL513999, BG026483, AI610714, AW189332, AV726590, BF811802, AI538885, AI274507, AI423198, |
| | | | | | AV753074, AL043070, AI521005, AI621341, BG029667, AI571966, AI539690, AI500061, AI702527, |
| | | | | | AI741158, AW020693, BG105241, AI927233, AI979129, AL514279, BF970768, AI670002, BE881211, |
| | | | | | BE964961, BE963575, BE967219, AA928539, AV712722, BF089679, AI559524, BE964506, AI583558, |
| | | | | | AI499570, AW020095, BE784335, AL514455, AI811603, BF750875, AI473536, AL513911, AI922215, |
| | | | | | AL041150, N33175, AL515033, R41605, AW072349, BF812426, R32821, AV726058, AL513631, |
| | | | | | AL514357, AL513907, AI815232, BG031068, AL121365, AI859991, BF885082, BE880084, AI872423, |
| | | | | | AL050345.1, AL021707.2, AL136686.1, AB015347.1, BC008839.1, BC008899.1, AK026959.1, Y10936.1, |
| | | | | | AK026647.1, AB060893.1, AK027137.1, AL512765.1, AL133637.1, AL389935.1, AL136808.1, |
| | | | | | AB050431.1, AL110269.1, AL049283.1, AF143723.1, BC002733.1, AF141289.1, AL122100.1, |
| | | | | | BC001056.1, AL133010.1, AB060877.1, BC002343.1, BC006494.1, AK000250.1, AF184965.1, S78453.1, |
| | | | | | AB060863.1, BC004925.1, AB047947.1, M85164.1, AK026462.1, BC009311.1, AL049938.1, |
| | | | | | BC001967.1, AL122045.1, AL080156.1, AL080148.1, AL137480.1, S76508.1, AK024538.1, AF097996.1, |
| | | | | | BC004899.1, AK026045.1, AK026613.1, AL137284.1, AF155827.1, AL117648.1, BC008063.1, |
| | | | | | BC005858.1, BC004195.1, BC002372.1, AF058921.1, AF199509.1, AL110218.1, AK000502.1, |
| | | | | | BC007920.1, BC005825.1, AK024992.1, AL137530.1, AL080110.1, S77771.1, AK024747.1, BC001199.1, |
| | | | | | BC002697.1, AC020910.5, BC004945.1, X00474.1, AK026744.1, AL110228.1, AL117394.1, |
| | | | | | AB047904.1, Z82022.1, BC008285.1, AL136747.1, AK025708.1, AL110225.1, BC004556.1, AL133623.1, |
| | | | | | AK025889.1, AL137627.1, AJ406939.1, AL049382.1, BC002409.1, AL050280.1, AF090903.1, |
| | | | | | AL137533.1, BC006287.1, AF227198.1, D83032.1, AF177340.1, BC008920.1, AL136850.1, AK024594.1, |
| | | | | | BC004530.1, AF069506.1, AF232009.1, BC007926.1, BC004513.1, Y14314.1, AL157482.1, AL133049.1, |
| | | | | | AL110280.1, AL133665.1, BC006414.1, AB049849.1, BC004991.1, AL110196.1, AL133080.1, |
| | | | | | AB050410.1, AB047623.1, AK027173.1, AL137574.1, AL137711.1, AB055368.1, AK025312.1, |
| | | | | | AF274348.1, BC002473.1, AF274347.1, AL133112.1, AK026408.1, BC003658.1, X82434.1, BC009221.1, |
| | | | | | AF245044.1, BC000253.1, AL080159.1, BC002809.1, BC003614.1, BC004222.1, AK025375.1, |
| | | | | | AL137523.1, BC005168.1, AK026741.1, BC008037.1, AB056809.1, BC003684.1, AL359941.1, |
| | | | | | AK026550.1, AK024588.1, AL049339.1, AB055361.1, BC008836.1, AL137560.1, AF217987.1, |
| | | | | | AL080139.1, AL137529.1, AL389982.1, AK000653.1, BC007499.1, AL137276.1, AF076464.1, |
| | | | | | AB060912.1, AB048953.1, AB060876.1, AK000103.1, AL390184.1, AB062938.1, AK025435.1, |
| | | | | | BC005165.1, AK000257.1, AL136893.1, AB052200.1, AF262032.1, AL136754.1, AL137488.1, |
| | | | | | AL080126.1, BC004191.1, AL050092.1, AF230402.1, AF098162.1, AL137550.1, AK000690.1, |
| | | | | | BC005002.1, AK026534.1, AL162083.1, BC008781.1, AK026547.1, BC005805.1, AK026480.1, |
| | | | | | BC008686.1, AK025339.1, BC003101.1, BC007347.1, AL133075.1, BC002466.1, AK026927.1, |
| | | | | | AK025857.1, AL136842.1, AL137716.1, AF285167.1, AL162006.1, AL136615.1, BC008918.1, |
| | | | | | BC006164.1, BC006410.1, AK000630.1, AF183393.1, BC007556.1, AK025254.1, AK027142.1, |
| | | | | | BC004416.1, AY026527.1, AL133113.1, AL162004.1, AB055315.1, AL356859.12, AL080162.1, |
| | | | | | AL137526.1, AK000603.1, BC004370.1, BC009310.1, BC006103.1, BC003056.1, BC001652.1, |
| | | | | | AL117416.1, AL137459.1, BC003569.1, AK000083.1, BC000090.1, AF132730.1, D83989.1, AK027152.1, |
| | | | | | AK000323.1, AL353956.1, BC001844.1, BC004264.1, BC001969.1. |
| HTOAM11 | 224 | 664508 | 1-1186 | 15-1200 | AV756491, AW500684, AI821931, AI755214, BF725844, AI754567, AI754105, AW576251, AW340905, AL079734, AL040374, BF879045, |
| | | | | | AA126763, AI732430, AI380617, T74524, AL120343, BE138594, |
| | | | | | AA535216, AA533054, AI732458, AA127499, AI821714, AI792133, AI791913, AA602906, BF725761, |
| | | | | | AI923052, BF868994, AA714110, BE704103, AI821785, AI358712, AW504168, BF526964, AI755202, |
| | | | | | H07953, AW961593, AI066646, AW302711, AI144081, AA515733, AA704393, AW407632, AV764259, |
| | | | | | AW732205, AW973992, BE139267, AW157456, AW957600, AW162697, AV737160, BF917346, |
| | | | | | AV760941, AI669421, AI357823, AA862227, AA659832, AW275971, AI300054, AW079761, |
| | | | | | AW502873, BF724838, AA715814, BF977305, AI312309, AA700943, AP001486.4, AC083868.2, |
| | | | | | AC006970.6, AC027124.4, AL050335.32, AC009144.5, AC006368.2, AC007011.1, AC005821.1, |
| | | | | | AC008569.6, AP002360.4, AC022211.5, AL117334.29, AF038458.1, AC016027.15, AC003101.1, |
| | | | | | AL159977.10, AF107045.1, AC011464.5, AP001719.1, AC012627.4, AC016830.5, AL137792.11, |
| | | | | | AF207550.1, AL121594.6, AC007850.29, AL031845.6, AC073964.3, AC022148.5, AC015853.8, |
| | | | | | AC008962.8, AC008372.6, AC008551.5, AC003046.3, AL355392.7, AP000493.1, AL355094.3, |
| | | | | | AC024163.2, AC020916.7, AC011461.4, AC004840.3, AP001710.1, AC006120.1, AC004841.2, |
| | | | | | AL157838.24, AC005932.1, AC002395.1, AC005874.3, AF134471.1, AC00101.15, AC004526.1, |
| | | | | | AL117381.32, Z83822.1, AC004125.1, AC025593.5, AC005756.1, AL450339.5, AC007227.3, Z83826.12, |
| | | | | | AC011479.6, AP002812.3, AC005512.1, AC027130.5, AL035460.15, AC004386.1, AL513008.14, |
| | | | | | AJ297357.1, AJ251973.1, AC010463.6, AC084373.24, AF312032.1, AC016770.10, AL136126.34, |
| | | | | | AL109804.41, AL121890.34, AC011005.7, AC005231.2, AL445201.14, AC087071.2, AC005702.1, |
| | | | | | AC006141.2, AP001670.1, AL078463.11, AL109915.10, Z97632.1, AC005291.1, AC016025.12, |
| | | | | | AC006468.9, AL133453.3, AL109797.18, AL121601.13, AC005212.1, AC004821.3, AC006285.11, |
| | | | | | AF254822.1, AP001759.1, M37468.1, AC009244.24, AC002300.1, AC008969.5, AL160264.22, |
| | | | | | AC004089.25, AC020947.6, AC016026.13, AL356299.16, AC009996.7, AC016596.5, AC000115.1, |
| | | | | | AC005015.2, AC008857.5, AC005274.1, AL354932.26, AL022721.1, AC009068.10, AC009812.17, |
| | | | | | AL135927.14, AC005071.2, AC005081.3, AL136980.5, AF053356.1, AL139396.17, AC002314.1, |
| | | | | | AL139021.6, AC005225.2, AL096841.6, AL022313.1, AL138756.23, AC090532.1, AC007114.7, |
| | | | | | AC008753.8, AC006236.1, AP001717.1, AC011442.5, AC068533.7, AC005793.1, AC008755.6, |
| | | | | | AC004598.1, AL135752.6, AC018836.4, AC005971.5, AC005914.1, AL049872.3, AL353692.14, |
| | | | | | AL355497.14, AC002350.1, AL035587.5, U96629.1, AC011497.6, AP000455.4, AC008124.8, |
| | | | | | AC005839.1, AF168787.1, AL136137.15, AC007318.4, AL359397.3, AC005091.1, AC078846.2, |
| | | | | | AC007845.12, AL109976.23, AL138717.6, AL139809.16, AC005695.1, AC009530.5, AL133382.8, |
| | | | | | AC006345.4, AC004166.12, AC010358.5, AL354836.13, AC006211.1, AL133312.3, AC069255.18, |
| | | | | | AL353804.22, AC004858.2, AC002429.1, AC008770.6, AL139022.4, AL162390.9, AL008730.1, |
| | | | | | AC011465.4, AC090941.1, AP001672.1, AL023284.1, AL096701.14, AF067844.1, AC005041.2, |
| | | | | | AC022415.5, AC006077.1, Z85996.1, AL353602.10, AP000555.1, AL352984.4, AC021036.5, |
| | | | | | AL031658.11, AL034420.16, AC010854.3, AC005215.1, AL133548.6, AL031602.14, AC016769.10, |
| | | | | | AC011470.5, AC016776.6, AL031276.1, AP002436.3, AC005606.2, AC012379.7, AC005280.3, |
| | | | | | AL591076.5, AP000045.1, AP000113.1, Z99716.4, AC006026.2, AL590763.1, AL160492.5, AL035410.7, |
| | | | | | AC034207.4, AC002476.1, AC008812.7, AC013726.7, AC018764.6, AL035455.30, AL390252.9, |
| | | | | | AL118501.22, AL109743.4, AL136228.8, AC018811.4, AC008267.6, AL133545.10, AL390917.12, |
| | | | | | AC007057.3, AC026172.3, AC009086.5, AC010319.7, AC004973.1, AC008155.9, AF225899.1, |
| | | | | | AC007193.1, AL133215.16. |
| HTODH83 | 225 | 580884 | 1-1967 | 15-1981 | |
| HTODN35 | 226 | 570901 | 1-1580 | 15-1594 | AC009079.4. |
| HTPCO75 | 227 | 853645 | 1-1453 | 15-1467 | BF969488, BG109664, BG113966, BF980916, BF970168, BE465437, AA913515, BF667561, N47676, |
| | | | | | AI984260, AI561226, BE502740, AI016617, BG150307, AW665914, BE081361, BE710057, AA279712, |
| | | | | | BE220910, AI880662, AI812005, AI223871, AW449123, AA460500, BF184599, N47675, BF243896, |
| | | | | | AU145432, AA829587, AA931455, T05743, AI685691, BG121044, AA256899, R56024, AA654665, |
| | | | | | R56025, N51207, BF853453, AI808712, AI765168, BF589254, AW936494, AA910986, BE836669, |
| | | | | | BF114747, AW377241, AL050136.1, AK021741.1, AC002067.1, Z92542.2. |
| HTTCB60 | 228 | 853401 | 1-1490 | 15-1504 | AL527596, AL530567, AI114859, BE407719, AL527597, AL529809, AI830718, AI640304, BF447073, |
| | | | | | AI862404, AI419019, BE899304, AA496239, AI889002, AL514080, BF000126, AI200382, BE048538, |
| | | | | | AA442132, AI798632, AI140806, AI565622, AU156790, AA834046, AW294987, AI183801, W68566, |
| | | | | | AI872891, AA456203, AI364465, AI765479, BE645691, AI468507, BF477789, AI672711, W68567, |
| | | | | | AI187099, AW135628, AI417504, AI004499, AA815198, AL526637, AI371368, Z19140, AI349321, |
| | | | | | AI074599, AA442131, AL529295, AA610289, AI620803, W73758, AW880750, BE782057, AI002625, |
| | | | | | AU136598, BG122646, AA496240, AI298503, AW339508, BE467855, AI310364, AI346793, W73592, |
| | | | | | AI926388, AW452176, AI884667, AI183908, AW470742, AA593079, N92388, AW771410, AU144823, |
| | | | | | AW172442, AI086796, AW104502, AW572529, AI381931, AA707604, AI640676, AW571951, |
| | | | | | AI868834, AI313208, AI861943, AA719132, AW471200, AI990933, AI193543, AI193748, AI921195, |
| | | | | | AA903834, AW023979, AI825347, AI861932, AI919371, AI248156, AI694324, AA442774, AA701903, |
| | | | | | BF433373, BF063027, AA885026, AA723857, BF001754, BF588721, AI916136, AI686495, BF062018, |
| | | | | | AI990711, BF060737, AI202906, AW471024, AI675788, AI910996, AW663382, AW770995, BG057507, |
| | | | | | BF110069, BE670537, BF114632, AA427828, AI537838, AI130863, AI651012, AI148378, AA780173, |
| | | | | | AW079270, AA621634, AI571348, W95356, AA010215, AF206673.2, AK001914.1, AP000501.1, |
| | | | | | AF298153.1, AK027296.1, AL110244.1, AB040964.1, AL137610.1. |
| HTTDN24 | 229 | 766485 | 1-1978 | 15-1992 | AL513751, BG035744, BE792734, BE535814, AI968100, AI638191, AI962526, AW590203, AW593447, |
| | | | | | AW590212, BE541446, BE220296, AA205663, BE564856, BF769037, AI968771, AI632511, AW250856, |
| | | | | | AA205775, AA205709, BF843264, AA773929, N53214, AA486579, N30623, AI655137, AW014522, |
| | | | | | BE564422, AI742717, BF028977, BE672098, AA777617, AI146844, AW577576, AI159827, AA563660, |
| | | | | | BF027920, AI637620, AI078792, AI990191, BF062933, BF062045, AW044164, BF770158, AA256059, |
| | | | | | N32225, BF769030, BF769032, BF445417, AA486679, AW959397, W22630, AA554325, R59984, |
| | | | | | AW006249, AW236554, AW577601, AA765281, AI653704, AI206329, R67166, AW243537, AA205674, |
| | | | | | H00645, T16860, AA256068, N57321, H00733, N41868, T16861, AI149479, AI906144, N59086, |
| | | | | | BF926652, AA909318, AW594490, AA299517, N58615, AA641283, AA644247, AW236428, AI820831, |
| | | | | | BG009693, BF851615, AA743510, Z42234, AA834460, AA548119, AI672532, F07004, Z40114, F01762, |
| | | | | | AA301407, BF085945, BF931293, AA205611, AI638784, BF085928, AA983380, BF059602, AW192770, |
| | | | | | BE714630, AA205702, AI078796, BC001039.1, AF310106.1, BC003592.1, AK000784.1, AK025952.1, |
| | | | | | AF298547.1, AK026387.1. |
| HTTEE41 | 230 | 840950 | 1-1959 | 15-1973 | AL533251, AL514520, AL535565, AL519250, AU120401, AL514519, AL513606, AL517678, AI986262, |
| | | | | | AU139509, AU138912, BF797374, AU124362, AV714807, AI970836, T25350, BG169633, AU126517, |
| | | | | | BG031251, AA854925, AI683290, AI084631, AU130264, BE748699, AU124315, AU133858, BG109529, |
| | | | | | AU135232, AI080278, BG119840, AI114754, BG258768, BG255494, BE786284, AI955296, AU126258, |
| | | | | | BG254492, BF057590, AI342485, BE907879, AV689488, BG035949, AV688329, BE780740, AI982815, |
| | | | | | BE897302, AL037847, BE619295, BF037149, BE547405, BE540421, BE870861, BG119545, BE891546, |
| | | | | | BE872237, BG179989, BE784107, AI992184, AU128577, BE893297, BE798745, AI858401, BE871280, |
| | | | | | BE882225, AI801143, BE748021, BG033360, BF984307, BF795054, BE535364, BE870845, AV711098, |
| | | | | | BG115930, BE787681, BE542328, BE872802, BF700048, BF695387, AI674907, BE439607, BF984686, |
| | | | | | AW079041, BG166631, BE896320, BE541060, BG168465, BF212903, BG165234, BF036631, |
| | | | | | AW276472, AI469127, BG116642, AW304879, BG035549, BE298292, BE383409, AW951669, |
| | | | | | BE789205, AA876301, AI559157, BE618039, BE569054, BE884211, AA314410, AL037869, BF034922, |
| | | | | | BG261406, BE278215, AI567289, AI216294, BE536033, AA160646, BE541100, AI652229, BF793118, |
| | | | | | AA573870, BE781061, AW675729, AV717435, AW967121, AW268555, AW614767, BE871948, |
| | | | | | BF246592, AW302409, BG231674, AL519249, AI623915, AA633523, BG056451, AI554391, BF593678, |
| | | | | | AL513605, AA541705, BE536986, BE540075, BE893524, BF211942, AW403677, BE302004, BF030769, |
| | | | | | AA639701, AW675653, BG114666, BF305722, AI812111, AI003845, AI922596, AI610416, BE874043, |
| | | | | | AI690769, AI423245, BE884372, AI041880, BE972270, BE277936, AI970618, BE564025, AA569371, |
| | | | | | BE536189, AW517408, BF692138, AA838062, AW675629, BE544390, AA665762, AI129259, AI018744, |
| | | | | | AV717173, BE563964, BE278405, AU155033, AA779219, AA935682, AA306144, AA307298, |
| | | | | | AA707035, BF241179, BF207700, BE018391, BE964282, AA916194, BE567396, AA928532, |
| | | | | | AW197045, AA740956, AA877985, AI081121, AV751536, AA102457, AA160479, AA192686, |
| | | | | | AA574025, AU146473, AV739405, AA242865, AI249678, AA081834, AI566278, BF212412, AA188046, |
| | | | | | BF242025, AL517677, W22339, AV748102, AW001935, AU157811, AA634515, AI151103, AI027752, |
| | | | | | AV752496, AA031432, BE535794, AA838373, BG166698, AW023950, AA514375, BE540980, |
| | | | | | BE222647, AI027493, AA308098, AI499910, AU150842, AI537313, BE258575, AW468963, AA665209, |
| | | | | | BF208112, AI288710, AI074560, AA758489, AA307507, AU128978, AL121077, AA224142, BE551072, |
| | | | | | AU152253, AI589777, AA242864, AA865406, AI086547, AA159666, AI082436, AW953920, AA143173, |
| | | | | | BE909718, AW089251, AI240700, W72593, AI919263, AF026166.1, AF026293.1, U91327.1, T55193, |
| | | | | | T70199, T88741, T91070, R11411, R12294, R12806, R19161, R25132, R25131, H02506, H02507, |
| | | | | | H54342, H56330, H63377, H63378, N21157, N29115, N70633, N98764, W00501, W02093, W05515, |
| | | | | | W30995, W32188, W45121, W52697, W76587, AA022658, AA022740, AA031431, AA047132, |
| | | | | | AA045726, AA053378, AA053093, AA084605, AA136549, AA142896, AA151835, AA151836, |
| | | | | | AA159771, AA187179, AA192116, AA224141, AA233936, AA232345, AA488991, AA534693, |
| | | | | | AA586488, AA623003, AA740505, AA829738, AA829916, AA876221, AA932434, AA933813, |
| | | | | | AA968745, AA969795, AI089838, D81695, N84531, C00761, N87565, C14312, C14469, AA641463, |
| | | | | | C17845, AA209312, AA401491, AA400238, AA598835, AA644299, AA705865, AA723334, AA852740, |
| | | | | | AA852739, AI076109, T23525, T16205, T27335, T27402. |
| HTWEH94 | 231 | 561680 | 1-1347 | 15-1361 | AA459162, BE143033, AC004858.2, AF109907.1, AL050349.27, AC008755.6, AC010320.9, |
| | | | | | AL356915.19, AF053356.1, AF312032.1, AC020916.7, AC011895.4, AC020906.6, AF134726.1, |
| | | | | | AC004253.1, AC008738.6, AC020908.6, AL133387.8, AC002126.1, AC005522.2, AC005620.1, |
| | | | | | AC078818.19, AL359091.10, AC005052.2, AC004089.25, AC005071.2, AL160269.14, AC006312.8, |
| | | | | | U91321.1, AC005015.2, AL137792.11, AC004826.3, AC007374.6. |
| HTXDG92 | 232 | 658730 | 1-1148 | 15-1162 | BF034514, AW027319, AA393485, R62243, AI810717, BE999941, W69160, W69286, W57903, |
| | | | | | AA631235, AI766161, AI860626, AW453087, BF991821, AA485564, AA148470, AI298594, BF107486, |
| | | | | | BE048342, AW440613, AI684022, BF110344, R69650, AW958450, R69664, H51376, AA036897, |
| | | | | | AI869096, AA501595, BF910477, AI936365, AA503611, AI962698, H00843, AI473149, BF513848, |
| | | | | | AA036898, R21268, AA355015, BE393026, AW028218, BE265190, R21267, AA400786, BF917732, |
| | | | | | BF917734, BF872260, AA485403, W57902, AA209160, AI620837, R22871, BE622738, BF907430, |
| | | | | | AA148471, AI824248, BE907695. |
| HTXET11 | 233 | 581521 | 1-975 | 15-989 | AC012076.4. |
| HTXFA72 | 234 | 853410 | 1-1847 | 15-1861 | AW007854, BE677425, AW297663, AC008102.17, AC067742.5, AC012476.8, AC007637.9, |
| | | | | | AC004887.2, AC007383.4, AP000426.3, AC020916.7, AC006538.1, AC025166.7, AL133325.20, |
| | | | | | AL121754.18, AC024075.4, AL109758.2, AP001574.3, AL080243.21, AC002365.1, AL499604.9, |
| | | | | | AC005702.1, AL121905.23, AC008738.6, AL049832.3, AC011491.5, AC020744.4, AC004953.1, |
| | | | | | Z84484.1, AC006559.6, AC008440.8, AC003101.1, AL157827.17, AL133214.12, AC008946.6, |
| | | | | | AL357498.16, AC003046.3, AL161793.9, AC011895.4, AC011442.5, AC009756.9, AL157838.24, |
| | | | | | AC004973.1, AL133448.4, AC008699.5, AL356019.5, AC002119.1, AC008537.5, AC011461.4, |
| | | | | | AC074295.7, AC037475.9, AC015842.9, AC008379.6, AC004707.1, U91321.1, AC010458.5, |
| | | | | | AC001231.2, AC002310.1, AL050318.13, AL118559.6, AC006409.2, AC005529.7, AC011472.7, |
| | | | | | AC005670.1, AC005342.1, AL451083.5, AC005995.3, AC023490.5, AC009951.9. |
| HTXJD85 | 235 | 840391 | 1-1103 | 15-1117 | BF511613, R16403, H06356, AC005874.3, AF134471.1, AC018828.3, AC022383.3, AC005261.1, |
| | | | | | AL031588.1, AL132653.22, AC008649.6, AP000689.1, AB003151.1, AC005080.2, Z94056.1, |
| | | | | | AF243527.1, AC011308.8, AC016637.6, AL355074.5, AL391259.15, AC018808.4, AL355543.13, |
| | | | | | AC034193.4, AC008569.6, AC001231.2, AL354720.14. |
| HTXJY08 | 236 | 637774 | 1-1173 | 15-1187 | BG163801, BE892293, AW467952, AI273661, AA937102, AI400753, AA937101, AI571239, Z45153, |
| | | | | | N44737, AA359719, AL049162, BF754319, BE888980, AC004757.1, AC005962.1. |
| HTXLT36 | 237 | 843477 | 1-1026 | 15-1040 | BF038509, BE907863, AW450318, BF064162, AA846547, BF090743, AI743758, AW452088, AI038546, |
| | | | | | AV721433, AI124936, BF221659, AW961339, W88912, AI038218, AI468531, AI401419, AA312153, |
| | | | | | D12023, AA361016, AI024136, AI308237, AI763043, AA722378, AW043671, AA304380, AA329556, |
| | | | | | AI917526, BF507852, AW901911, AA483331, AW969635, AA280698, AI524566, BE898992, C75284, |
| | | | | | AC006160.9. |
| HUFCL31 | 238 | 801938 | 1-1446 | 15-1460 | AI821606, AI791844, AW050605, AA573825, AI660560, AI826629, AI304327, AW009962, AI262416, |
| | | | | | AI983793, AI984141, AI660493, AI991272, AI274929, AI281211, AA593860, AA618335, AI346155, |
| | | | | | AI732165, AI821178, AA469031, AI695625, AI924216, BF917041, AI921289, Z57552.1, Z59954.1. |
| HUKDF20 | 239 | 566823 | 1-1091 | 15-1105 | AL133246.2, AL392023.3, AC008572.6. |
| HUSCJ14 | 240 | 894699 | 1-3328 | 15-3342 | AL530386, AL530385, BE740541, BE793159, BE746303, BG111869, BE743225, BE740593, BE876261, |
| | | | | | AW025458, BE796028, BE872615, BE877735, BE744205, BF314587, BE378561, AW953416, BF965802, |
| | | | | | BG254323, AW964183, BE746753, BF981839, BG248382, BF340579, BE740789, BF697703, AV759552, |
| | | | | | BE395111, AI991200, BG178345, BE547992, BG180982, BG170659, AI245997, BE296958, BF218155, |
| | | | | | BE874752, BG250326, BE537584, BE892651, W37330, AA454974, BE621103, BG249254, AW880574, |
| | | | | | BE315071, AA724393, AW401755, BF981216, BF724854, BE740318, AW602164, AA176450, |
| | | | | | AI798066, BF529155, BF590827, BE938687, AA528038, AA176930, BE007448, BG260090, AA744235, |
| | | | | | BE019877, AI755131, BE019722, AA258968, BE007599, AA888876, BE206323, AA454975, W49835, |
| | | | | | AI658890, AI400439, BE855719, BE965617, AI369432, AI378678, AI814475, BE894966, BE255155, |
| | | | | | N33371, H30709, AI817038, AI079528, AA988238, AI094675, BE296010, BG055258, BE698523, |
| | | | | | BF749938, AA781122, BG008471, BE007089, AI078131, BG012658, H28137, AA636058, BF112108, |
| | | | | | H30791, W52270, AI582733, AI150949, AA410493, AA860936, AA132898, AI278541, BF112247, |
| | | | | | BE044217, BF507690, AA933024, H66966, AA258022, BE247272, AA310300, BE208182, AA256356, |
| | | | | | H30612, H24913, N47554, AA595919, AA921999, BF772395, AW883922, AI050086, BF820414, |
| | | | | | AA326738, H66965, W52173, AW630747, AA987810, BF841176, BF841178, H24636, BF886659, |
| | | | | | AW025934, R85382, AA176415, AW997264, BE769213, BE873578, AA213621, AA213747, AI090506, |
| | | | | | AI350930, AI335914, R88068, BE315307, AA306524, R78161, BF772700, BF755261, R25528, |
| | | | | | BE698518, AA367585, BF880127, BG163239, AW964548, R88419, BE833357, R67073, AW168072, |
| | | | | | AI866652, R66194, W39693, BF512635, AI921135, R77799, BE742426, R88069, Z25017, BE005706, |
| | | | | | T52535, AI084635, AW272406, BE005705, AA368103, AA485159, H44289, H21572, AA335920, |
| | | | | | AA132726, BE007543, W37836, AI080447, T72649, R23331, AI800373, H11232, AI493270, AA633490, |
| | | | | | R61159, R48336, R45587, AW591739, BE315089, AA375973, AA091597, AI961784, AW140066, |
| | | | | | R61873, BF806323, BF342050, Z28722, AI003986, AW608071, T30986, H10607, R48240, AA143657, |
| | | | | | T72717, AA378816, AW768907, H28184, AA320516, W45049, BF743131, N47553, BF115823, |
| | | | | | AA988048, AI698305, AI342699, AA410492, AA176682, AA366872, BF432748, AW895119, AA329961, |
| | | | | | AA873382, N51170, AI802557, AW947291, BF432749, AI468036, BE315041, BE814237, H10399, |
| | | | | | AL045269, AI307370, T52614, AI310496, AW879611, AA463709, AW842163, BE245828, AI364211, |
| | | | | | AA485063, D20903, BE181425, BE281137, AW998715, AL080223.1, AC007040.2. |
| HUVDJ48 | 241 | 564853 | 1-1813 | 15-1827 | AI479925, AV720735, AI886110, AF261918.1, AB037733.1. |
| HWBBU75 | 242 | 780360 | 1-2717 | 15-2731 | BG254332, BG258993, AW189216, AW189167, BG110226, AA621650, AI524238, AW027302, |
| | | | | | AI085248, AI187104, AJ403112, AW129561, AA287508, AA287381, AI569606, AW137239, AI814239, |
| | | | | | BE246677, BF356218, H87267, AI831754, H87322, W15561, AA831701, AA808000, BE086121, |
| | | | | | AW137386, AA932127, H92853, BF916818, R84247, BE672348, BF869463, AI380578, BE696648, |
| | | | | | N80792, AA811717, AA922507, BF945407, AK024474.1. |
| HWBCN36 | 243 | 722259 | 1-994 | 15-1008 | AL031296.1. |
| HWBDJ08 | 244 | 762860 | 1-2071 | 15-2085 | BG029349, AW384103, AI653230, AW384082, AI719268, BG150070, AW404710, AW590965, |
| | | | | | AI952047, AW474522, BF514114, AA074214, AA770535, AI952951, AI138532, AA156247, AW474480, |
| | | | | | AV727834, AI655852, AI656352, AI424794, AI199860, BE867482, AI377297, AA885793, AW236695, |
| | | | | | AA909918, AI650687, AA632416, AA147540, BF896398, BF896399, AA205078, AA730888, AA709293, |
| | | | | | AW016441, AA906134, AI350684, BE243783, BE243699, AA074296, F29482, AW770135, AA971473, |
| | | | | | AI825691, AW818041, BE184408, BE244905, BG236422, AL048135, AW575000, U51144, AV738383, |
| | | | | | BC002538.1, AL133351.33, AL356785.18, AL049245.1, AC083875.1, AC006050.1, AC004408.1, |
| | | | | | AL136443.11, AL008719.1, AL391259.15, AL445237.16, AC007030.3, AC002416.1, AL390798.3, |
| | | | | | AC011242.8, AC004491.1, AP000696.1, AL034422.24, AC004966.2, AC003950.1, AL163285.2, |
| | | | | | AL133342.14, AP001726.1, Z94056.1, AL162231.20, AL121781.38, AC018502.5, AC090426.1, |
| | | | | | AC022392.4, AF003627.2, AF279660.2, U91323.1, AL160281.17, AC006948.4, AC020942.5, |
| | | | | | AC026416.4, AC073316.6, AC011816.17, Z84469.1, AL354889.14, AC079383.17, AC090957.1, |
| | | | | | AL360088.5, AB026898.1, AL135783.6, AL391122.9, AC012377.5, AL138849.12, U52111.2, |
| | | | | | AC004552.1, AC010789.9, AC004953.1, AL079303.3, AL118559.6, AL049758.11, AC003046.3, |
| | | | | | AC023426.29, AC068724.7, AC004033.3, AL138752.5, AC005037.2, AL162385.16, AC020913.6, |
| | | | | | AF029308.1, AP002982.2, AL121656.2, AL356575.8, AC006443.1, AP001753.1, AC079141.7, |
| | | | | | AP003534.1, AC008440.8, AC009623.6, AC005912.1, AC006313.1, AP003467.2, AC073655.26, |
| | | | | | AF111168.2, AC008806.4, AL137787.11, AC004865.1, AC002476.1, AL138756.23, AC051619.7, |
| | | | | | AC091493.1, AC087071.2, AL121754.18, AC005886.2, AC003071.1, AL139193.4, Z84487.2, |
| | | | | | AC011742.3, AL031005.1, AP000011.2, AL049838.3, U82828.1, AL161935.10, AP001728.1, AL031577.1. |
| HWLBO67 | 245 | 834315 | 1-522 | 15-536 | AC011739.7. |
| HWLGP26 | 246 | 834770 | 1-1884 | 15-1898 | AL529987, AV699741, BF530871, AW207742, AI638032, BE540656, AI469103, AW575118, BE503442, |
| | | | | | AI652512, AA928729, AW592532, AI419960, AI057140, BF102699, AI365238, AI392687, N49757, |
| | | | | | AA832314, BF819685, AI025113, AI767982, AA766124, AU151363, AW402473, AI654109, AW070683, |
| | | | | | AI738949, AA815032, BG231904, AW578625, AI365240, AV688777, AA769270, AW613566, |
| | | | | | AA605050, AI459543, AI885560, AW361738, AV689923, AA046663, BE242932, BF895261, AA507121, |
| | | | | | AA046576, AI627311, AW296010, AA814924, BG253328, BE789823, BE243489, AA298793, AI458707, |
| | | | | | AI208523, AA694217, BE247085, AW137352, AV689313, AA077726, BE241524, AL523598, |
| | | | | | AV685517, BE241950, AV697781, AV691130, AV688018, AV697631, N52685, AW182301, AA910584, |
| | | | | | AA126044, AW390687, AL529988, AF176097.1, AK023002.1, AJ131891.2. |
| HILCA24 | 247 | 869856 | 1-1968 | 15-1982 | BE780749, AU137314, AV732875, AW954734, AW138881, BF681107, AI079555, AI624252, |
| | | | | | AA233208, AU157126, AI734898, AW088851, BE221267, AA314962, AV715966, AA971982, |
| | | | | | AA233124, AA129416, AA133798, AA886808, AA353195, AW132033, T98200, H50558, AI888751, |
| | | | | | AI818363, BF917932, BF926224, AI784628, H50559, T98201, AK001989.1, AL512750.1, AC010627.5, |
| | | | | | AC010491.3, AC026749.5, AC016656.5, AC016652.5. |
| HYABC84 | 248 | 865064 | 1-1464 | 15-1478 | BE619984, BG180257, BG253753, BE546940, BE795721, BE871790, BE538846, AW953562, |
| | | | | | AA524254, AW978620, AW970777, AW001609, AI798108, AU159275, AU148477, AA524480, |
| | | | | | AA476556, AW027610, BE207925, AW166935, AL521960, AI934516, AU149354, AW291597, |
| | | | | | AW974311, AA443023, AI186348, AI597811, AI692241, N32579, BE619316, AI689448, AW152379, |
| | | | | | AI271524, AI093466, AI870536, AI149215, AI432467, AA854903, AA781886, AI199164, AI744310, |
| | | | | | AL043754, AI372057, BF725035, AI269272, AW770362, AA399350, AI367106, AA463464, AA812239, |
| | | | | | AW516985, W48832, AW151757, AI086901, AW571473, AW514611, AA292378, AI079461, BE206384, |
| | | | | | AA934644, AI269712, AW189899, AA588341, AA676478, AA126131, AW055258, AW166860, N70058, |
| | | | | | AA916656, AI874191, AW297040, AW083905, AW664480, AA427894, AA453450, AA843278, |
| | | | | | AI687474, AA620899, W49813, AA860641, AI692799, BE676833, AA306455, AA292016, T63718, |
| | | | | | AW236228, AW304861, AW772846, AW468035, BE964404, AI015326, AW662269, AA226903, |
| | | | | | AW090569, AA304032, AA915898, R56660, AW194056, AA293296, AA047874, H28877, AW076091, |
| | | | | | AI126745, AA482627, R50813, AA482480, AI674616, BF926901, AA045575, R68388, W37626, H01650, |
| | | | | | AA598596, AW364253, N59135, AL045883, N23722, AA908894, Z40636, R38774, R68593, AV708320, |
| | | | | | AI474604, R47766, AI611825, AA022933, BE829256, BF244825, AA888168, F03832, C04718, |
| | | | | | AA534374, BE297735, R50403, R56826, R81871, T33719, AI569605, N41917, AW731635, AW050454, |
| | | | | | BF737093, Z44868, AI648412, T06476, AA428005, W37625, BF893080, BF820895, BF769768, F07587, |
| | | | | | F01530, D54185, AI611777, AA902145, AA338785, Z25279, BE617105, F00464, AA084935, BE241564, |
| | | | | | R10512, AI627173, BE252263, AA022983, AV743083, BE940174, N75173, BE929227, H28878, |
| | | | | | AA094149, AW294418, AI261764, AA449769, T63873, AI885556, AA775981, BE710635, BE936751, |
| | | | | | BC008836.1, BC001323.1, AL117480.1, AL132825.35, AF055022.1, AL096738.1. |
| HPWTF23 | 249 | 844775 | 1-1994 | 15-2008 | AL519322, AL519321, AL528621, AL525472, AV708533, AV707483, BG117131, AV701688, AW954252, AV701690, |
| | | | | | AL525317, BF968790, AV709370, AV707363, AV657517, AI635895, |
| | | | | | AL036882, AW857209, AL036883, AV707606, BF128575, BG121441, BE295239, AW392020, |
| | | | | | BF311431, AV762694, AV706829, AA523541, BE073173, BE295817, BF514386, BE675214, AI949219, |
| | | | | | AW262884, BE858056, BG055038, BG249916, BG037033, AW371034, AI674706, AI708919, |
| | | | | | AV715587, AA535070, AA679292, AW022838, N50052, BE830095, AU148045, BE870349, BE349624, |
| | | | | | BE350028, BF837239, AA147899, BF845844, AW073776, AU147814, BF725674, AI368808, AI927857, |
| | | | | | AI342463, AV701888, AI140105, AA487093, AV750709, BE858057, AW190710, AA147844, AI096573, |
| | | | | | AA716187, AA722314, AI862165, W63717, AW262935, AA906753, AL525667, AV748474, AI269618, |
| | | | | | AI760874, AI074133, AA662310, AI924825, AI309724, AW468063, AA613662, W76557, AI089512, |
| | | | | | AI984192, AI707646, AA459957, AI624320, BE164613, BF967589, AW029309, AI640395, AI128327, |
| | | | | | AW176265, AW167854, AA040063, W46859, AI570042, AA618091, AI144525, AA010681, AI379204, |
| | | | | | AA460046, AA862301, AA599534, AV743247, BE138816, AV650781, W67232, AA971998, AI310729, |
| | | | | | N62277, AI597921, AI978845, AI671691, AI766634, W72563, AW316882, AI570060, AA135362, |
| | | | | | R52727, AW468339, AA516433, AW276147, AI800083, AI572626, AI272092, AI368167, N50029, |
| | | | | | AI865786, AI708598, AW316956, BE063387, AW007919, BF725145, AV650618, AV661271, T63404, |
| | | | | | AW243982, AA394163, AA431390, AV739478, AA018926, N47564, AV736149, AI480119, AW263269, |
| | | | | | AI039111, AV650298, W60279, AA765950, AA775091, AV741361, AI672788, W92333, AI913079, |
| | | | | | AA602156, AA010680, AI312732, W58299, AI718214, AV744886, AI865478, W46821, AW338299, |
| | | | | | AA115222, AA026509, AA833692, T65926, BE676820, AW629236, AV760664, AV744890, AW512231, |
| | | | | | AI272268, T79429, AI420676, AI933008, AI720397, H44638, AI699112, W58190, AA318908, |
| | | | | | BE160746, AA576196, T60058, AA318968, AA335541, AA507838, AL038891, BE244391, AI567253, |
| | | | | | T33201, AI422399, BE242438, F28371, W92390, T27118, AV660511, AI198237, AA279281, T32253, |
| | | | | | AA987730, AI521033, AI582582, AA137239, W65468, H26544, AA115157, AI377668, BE245885, |
| | | | | | AA953911, BE241874, AI587551, R22214, AI918377, AW779069, AA953835, AV760987, T79517, |
| | | | | | AW263932, W65469, AI524412, BE241477, AI955974, AW023746, BE160914, AV746796, AI216726, |
| | | | | | BE831539, AI184048, AI598049, AA148643, AI246336, AI538030, W46870, T60102, BE179366, |
| | | | | | AI224380, F09314, AW663101, T63029, AA043646, AA302796, T65354, BE243054, BE063421, T30199, |
| | | | | | AY007119.1, AF183393.1, AF228339.1, AB025432.1, AF153603.1, AL110191.1, Z50781.1, T63278, |
| | | | | | T64499, R22268, R34893, R49280, R49280, H43597, R86094, N47563, N54684, N54707, N77565, |
| | | | | | W60371, W67342, AA019007, AA148642, AA190663, AA464495, AA464496, AA427718, AA429282, |
| | | | | | AA244422, AA244455, AA551457, D79925, N85667, C20552, AA652629, AA652778, AA292345, |
| | | | | | AA293158, AA293176, AA292756, AA432382, AA835434, AA909440, T24090, D45452, F11656, |
| | | | | | F11926, F09572. |
| HLWAU42 | 250 | 695737 | 1-933 | 15-947 | BF575615, BF248388, AI743425, N36954, AW025235, BF589732, AI806452, AW020533, AA917950, |
| | | | | | AI127390, AI828595, BF695312, AI275973, BF671395, AA173611, AI246128, AI373941, BE857030, |
| | | | | | AA132201, N33440, BE878264, AI217284, AI969577, AI242521, W67395, N93171, AA525797, |
| | | | | | AW504320, AW874661, AA670252, AA131236, BE813584, AW844409, AW014620, AA573687, |
| | | | | | AW440586, W67250, BF575996, N51666, AA953867, N42414, H98104, AW069360, AA131940, |
| | | | | | H96912, AA613814, BF155640, AA953290, AI049610, AI525660, AA173610, AW375401, AI370204, |
| | | | | | AI370185, F09577, H05159, H27178, T65023, AA730005, AW799253, H25040, AW337747, BE544553, |
| | | | | | AA601931, AW994202, AW882494, AW021670, BF081928, BE000561, AI149153, AW956671, |
| | | | | | BF095801, BE392121, W38797, AA131357, BF095790, BF224114, BE813540, AL049471.1. |
| HGCAC19 | 251 | 851527 | 1-5047 | 15-5061 | AL527635, AI582588, BE619956, AW003219, AW195551, AI114573, BE888827, BF444977, AU139098, |
| | | | | | AA307878, AI915534, AU117064, BE466128, BG251218, BE619434, AI700569, AI823371, BG260998, |
| | | | | | AI625554, AI478557, AW958690, AI052694, AW963950, AL134475, AU136749, BE326684, AW770747, |
| | | | | | AI803406, AI990669, BF448130, AW770442, AI193790, AI659257, AV757384, AI669806, BE835313, |
| | | | | | AI917737, AA947974, BE881668, BE466358, AI698025, BF061334, BF433914, BE551956, AW003148, |
| | | | | | BF055107, AW237192, BE646481, AW949672, AA910441, AA994008, AA804520, AW058531, |
| | | | | | AI247672, BE890358, AA156928, AI767577, AW949361, AW166817, BG104926, AI971146, |
| | | | | | AW299771, AI990108, AI631706, BG114047, AA824598, AA156804, AA312557, AA677603, AI636032, |
| | | | | | AI400786, BE768656, AI199770, AI989485, AA155855, AI802754, AV650187, AW014065, BF677900, |
| | | | | | BF680207, AA557259, AI925305, AA446690, AI261268, AW150014, AA155958, BE379872, BF215025, |
| | | | | | AW867051, BE672462, BE168338, AI350222, AI624072, AI825185, AA436183, AA916694, AA436309, |
| | | | | | AW867047, BE139075, BF530119, AI656311, AV755927, AV746485, AW770099, AA147323, |
| | | | | | BE768554, AI885519, BE768542, AA446565, AI821288, BE245294, AW129764, AA599626, AW818369, |
| | | | | | BE245262, AI536551, AI040161, AI446564, AI627777, AA020816, AV758283, D80771, AA806383, |
| | | | | | AA136672, H40373, BE042467, AA013438, AI591292, AW472897, AI821040, AI820997, AA180321, |
| | | | | | AI356314, AA312855, AI610014, BF902177, AW195825, C75219, AW015240, AI936012, AI219472, |
| | | | | | AA086094, AW169820, AW983970, AA113317, AI282736, BE175626, BF061715, AI275943, |
| | | | | | AW294050, AV738635, AA358726, AA463692, BF896130, AW183617, H21867, BE168125, AI246262, |
| | | | | | AA059237, AA677761, AA628617, BE768595, AI625290, AA007519, BE768665, AW374169, |
| | | | | | AA355425, T07209, AA377468, AW271631, AA152212, AW189878, AA086093, AW594290, |
| | | | | | AA742173, AI949786, AW023249, AW750461, AA256785, BE872264, AA709003, AA147425, |
| | | | | | AA361135, H40320, AW392416, AW392849, BF081349, AI038854, AW188893, BE763982, AA976161, |
| | | | | | AA345273, AW858464, AW891017, D52302, AA358727, AI699855, D61215, D52967, AA430996, |
| | | | | | AW376216, R81478, AW501079, AA007520, AA353267, AA728991, AA304423, AA356393, AI370683, |
| | | | | | AW024132, T71726, AA361495, AV724116, AI888048, BF844493, T40389, BF089968, T71578, |
| | | | | | AA621423, AW043940, AA513522, BF763717, R62569, BF950322, AA334984, BF091136, BE892057, |
| | | | | | AW188923, AA826001, N24122, BE768735, AW382160, BF985865, T18537, BF365430, AI830982, |
| | | | | | AW452149, AW188842, BE702825, AI637868, AA732593, AA376840, AW858513, BF804806, D19713, |
| | | | | | AW131746, AA256511, AA829191, AI310882, AF109907.1, L40392.1, AK026107.1, AC004858.2, |
| | | | | | S67071.1, AF135593.1, AC006345.4, T60745, R25599, R26428, R26995, AA136788, AA150143, |
| | | | | | AA888518, AI053404, AI053507, AI053899, N64912, N64913, C00711, AA393814, AA905385, |
| | | | | | AI002840. |
| HEQBJ01 | 252 | 876546 | 1-2777 | 15-2791 | AU123703, AI744148, AI744113, AU130720, BE897357, BG105308, AU137281, BF308835, AI860811, |
| | | | | | AI889014, AI765413, BE546221, BE670583, AW237314, BG248530, AW952369, BE502734, BE503479, |
| | | | | | AI765401, BE540301, AL042645, BF212478, AW500417, BG249708, AW674190, AI867571, BE018153, |
| | | | | | AW293518, AA534578, AI432178, AW169762, AA506984, BE389321, AA420605, AI142237, |
| | | | | | AA406169, AW591668, AW188054, AI147954, AA430324, AL040186, AI197943, AW502601, |
| | | | | | AI589634, AA569041, AI015938, AA433904, AA070872, AI188829, AI124780, AA421239, AI149224, |
| | | | | | AA420647, AI916160, W73655, AI076564, AI768356, BF592904, BE464156, AW772442, BE219974, |
| | | | | | AI638215, BG034042, AI125307, R51293, BE812953, W51790, AA172002, AA425349, AA565222, |
| | | | | | AA313542, AA825728, R35270, AW204507, BF306159, BG152825, AA100809, W28763, BF223048, |
| | | | | | AI222042, AI479185, W26572, W45413, W73608, R52192, AI160529, AW440819, AI422286, AI298011, |
| | | | | | AA171761, AA421279, R51403, H62930, R52097, R59309, BF880022, AA581790, W81419, BF844067, |
| | | | | | AI768849, W40121, AI708313, AW511347, AA373236, AW368276, BF844000, AA434583, AV747735, |
| | | | | | Z42217, BE702753, W81420, AI962360, AA325784, BF879714, R59310, AI271621, T25845, BF879715, |
| | | | | | T06069, F05246, BF880008, AA806028, Z38264, AA071023, AA815452, N54389, BE929180, BE929187, |
| | | | | | BE929175, BF092052, AA810542, AA383377, AI370602, R50941, T87272, BF149192, T87186, |
| | | | | | AW867815, F01748, AA947741, BF749400, AA773493, AA890049, AW591526, AI985779, AA984284, |
| | | | | | BF923416, AW272799, AL043147, AB007891.1, BC002701.1, AC009079.4, AL157384.8, AK025058.1, |
| | | | | | AK026926.1, AC009779.18. |
| HBJHT01 | 253 | 587262 | 1-1237 | 15-1251 | AW572853, AW852662, AW794904, AW852694, AA494184, BE092308, AW467441, BG000611, |
| | | | | | BF871414, BF871418, AA715850, AW962959, AI281561, BF899671, AI537814, BF899672, BF970033, |
| | | | | | BF899670, AW975902, BF847493, AW197990, AC084865.2, AL590763.1, AC008403.6, AC002551.1, |
| | | | | | AP001858.4, AP001692.1, AL450224.1, AL160269.14, AL022476.2, AL049762.20, AC011811.42, |
| | | | | | AL356020.3, AC078818.19, AC007842.1, AC007055.3, AC008569.6, AC005803.1, AB020865.1, |
| | | | | | AL353574.8, AL138836.15, AJ277546.2, Z93930.10, AC005484.2, AC069548.4, AC007619.22, L44140.1, |
| | | | | | AL158040.13, Z95115.1, AF196779.1, AC009155.3, AP003116.2, AC005548.1, AL354696.11, |
| | | | | | AC005254.1, AL353579.17, AC012323.7, AC007371.16, AL049780.4, AC000353.27, AL022336.1, |
| | | | | | AC009309.4, AL158830.17, AC005488.2, AL591076.5, AC007954.7, AL031664.1, AC000025.2, |
| | | | | | AL121586.31, AC004859.2, AL365364.19, AL049757.14, AL390205.17, AC007011.1, AL353812.13, |
| | | | | | AL157877.11, AP000893.5, AL021391.2, AC087244.17, Y10196.1, AF001549.1, U91323.1, |
| | | | | | AL096701.14, AC034193.4, AP000501.1, AC022211.5, AC011472.7, AP002852.3, AL031650.22, |
| | | | | | AC008745.6, AC011005.7, AC006930.1, AF053356.1, AL133174.15, AL137918.4, AP001715.1, |
| | | | | | AC018808.4, AC009488.5, AC027319.5, AL110115.38. |
| HE8FD92 | 254 | 901142 | 1-3963 | 15-3977 | BG252727, BG260973, BG180624, BG122157, BE887548, AW948984, AW950907, BF965913, |
| | | | | | AI905469, BE869433, BG032175, AV718334, AV650921, BF793347, BE148077, BF793887, BG120463, |
| | | | | | BF204516, AW969050, BG121940, AL045343, AV649638, BE621758, AL037725, BE620934, |
| | | | | | BG169462, AV708063, AL045344, BE892224, AV708871, AV649666, AV653240, AV721974, |
| | | | | | BF740216, BG110357, AI888249, AV649944, AI814624, BE615208, BE613500, BE540375, AL043485, |
| | | | | | AA401244, BG117844, AV705742, AV762287, AW614902, AI768623, AA404260, W95853, BE614234, |
| | | | | | AW167131, BE542745, BF844095, AW955266, BE551076, AI800419, AL040955, AL040932, BF891913, |
| | | | | | N32025, BF028570, BF980034, BE147946, AA315005, AL531145, AW020997, AI523819, BE162196, |
| | | | | | AV689195, AW196856, AL048907, BF378885, BE615086, AW851278, AW948982, AW069571, |
| | | | | | BF219231, AW664296, BF839881, BE299495, AI859769, AI804043, BE615260, AW439581, AI979070, |
| | | | | | AW873118, BG028790, AW173627, AW138481, BF836425, BE090183, AW470149, W95142, AI954566, |
| | | | | | AW966417, AW382691, AA431381, AI923608, AI920788, BF836432, BG028439, AI074015, AW401596, |
| | | | | | AI096566, AA777093, AW168867, BE350092, AI872178, AL040146, BF832429, BG179393, AW196804, |
| | | | | | AI634706, AI400065, AI983052, AL044108, BF571648, AW874528, AI200933, W94444, AI080172, |
| | | | | | AI073801, AV728394, BG107927, AA614709, AW963612, AA134828, BE349345, AA463288, |
| | | | | | AA625480, AA953123, BE537489, AI589346, AW261884, BF757706, AI026817, AI654244, BE140097, |
| | | | | | AA932332, AV649957, AW002764, AI435532, N51228, AA725887, AI685954, AI247070, R97631, |
| | | | | | AI142752, AI569997, W81307, AI473795, AA962014, AA946853, AI916323, AW382688, AW954051, |
| | | | | | BF725969, AI000904, N69326, AA774786, AI445189, AI348365, BF433144, C17016, BE764894, |
| | | | | | AW193468, AI274717, AI420632, AI471592, AL040335, N94040, AA134827, BE156276, W94957, |
| | | | | | BE181110, AW452484, AV726157, AI077452, AI675925, AW675613, AV694497, AV683792, |
| | | | | | AA868559, AA504467, AV684722, AI241864, AI826322, AA448916, AA872701, AA398843, BE966521, |
| | | | | | BF940653, BF804717, BG036364, AI865471, AW474946, AI088270, BE046420, BE764877, W45368, |
| | | | | | H27416, AV649926, AW020365, AV649742, AW241206, AV649875, BE857361, AA431829, BF923515, |
| | | | | | AI359458, AI439074, W94259, AL045559, BF998123, T78688, AI174662, AW377563, AV649995, |
| | | | | | BE764899, AI094039, AW797490, AA463197, AA494404, AI520933, AA609501, AV659915, |
| | | | | | AV662147, AI125505, BG111536, AI167605, AI149616, AV698723, AA609104, AI913467, BE835924, |
| | | | | | BF197860, AV651144, AA431425, AA975219, AA635251, BE710504, BE816681, D61350, AI811787, |
| | | | | | AV734255, AA341676, AV662120, AI368857, AA630621, AF131738.1, AB051480.1, AL117237.1, |
| | | | | | AL136890.1, AL022240.8, AL359752.11, AL049715.25, AB033071.1, AL050141.1, AK000726.1, |
| | | | | | Y14436.1, T49441, T49442, T65179, T90631, T79315, T79742, T83158, T85864, R16090, R15724, |
| | | | | | R18665, R22674, R38982, R39314, R41620, R43379, R41620, R43379, H24497, H29599, H44475, |
| | | | | | H65354, H65563, N69549, W17223, W40134, W92875, W95598, W95599, AA045010, AA194855, |
| | | | | | AA470492, AA470959, AA483167, AA514556, AA557980, AA729817, AA738229, AA805073, |
| | | | | | AA908302, AA911490, AA938675, AA962188, AA976144, N55792, N74638, N83414, C01293, N88703, |
| | | | | | C14561, C14674, C15258, C15727, C15842, AA091964, AA094573, AA095891, AA247583, AA449426, |
| | | | | | AA599645, AA663625, AA665721, AA813724, AI003102, T10450, D31148, F11837, AA694588, |
| | | | | | AI251461, AI270073, AI280943, AI582507, AI126993, AI203813, AI247468. |
| HBDAB91 | 255 | 864374 | 1-993 | 15-1007 | AI167963, AA782398, BE043035, AW081006, W07319, R23362, N75825, AW195519, BE858969, |
| | | | | | AI701657, R45349, AI468816, AW858522, AW577199, AL135012, BE927373, AW601637, BF084778, |
| | | | | | AL134110, AL134524, AW577201, AL045327, AL045494, AL042523, AW577192, AL045328, |
| | | | | | BF910726, AL042420. |

Description of Table 4

[0131] Table 4 provides a key to the tissue/cell source identifier code disclosed in Table 1B.2, column 5. Column 1 of Table 4 provides the tissue/cell source identifier code disclosed in Table 1B.2, Column 5. Columns 2-5 provide a description of the tissue or cell source. Note that “Description” and “Tissue” sources (i.e. columns 2 and 3) having the prefix “a_” indicates organs, tissues, or cells derived from “adult” sources. Codes corresponding to diseased tissues are indicated in column 6 with the word “disease.” The use of the word “disease” in column 6 is non-limiting. The tissue or cell source may be specific (e.g. a neoplasm), or may be disease-associated (e.g., a tissue sample from a normal portion of a diseased organ). Furthermore, tissues and/or cells lacking the “disease” designation may still be derived from sources directly or indirectly involved in a disease state or disorder, and therefore may have a further utility in that disease state or disorder. In numerous cases where the tissue/cell source is a library, column 7 identifies the vector used to generate the library.

TABLE 4

| Code | Description | Tissue | Organ | Cell Line | Disease | Vector |
|---|---|---|---|---|---|---|
| AR022 | a_Heart | a_Heart | | | | |
| AR023 | a_Liver | a_Liver | | | | |
| AR024 | a_mammary gland | a_mammary gland | | | | |
| AR025 | a_Prostate | a_Prostate | | | | |
| AR026 | a_small intestine | a_small intestine | | | | |
| AR027 | a_Stomach | a_Stomach | | | | |
| AR028 | Blood B cells | Blood B cells | | | | |
| AR029 | Blood B cells activated | Blood B cells activated | | | | |
| AR030 | Blood B cells resting | Blood B cells resting | | | | |
| AR031 | Blood T cells activated | Blood T cells activated | | | | |
| AR032 | Blood T cells resting | Blood T cells resting | | | | |
| AR033 | brain | brain | | | | |
| AR034 | breast | breast | | | | |
| AR035 | breast cancer | breast cancer | | | | |
| AR036 | Cell Line CAOV3 | Cell Line CAOV3 | | | | |
| AR037 | cell line PA-1 | cell line PA-1 | | | | |
| AR038 | cell line transformed | cell line transformed | | | | |
| AR039 | colon | colon | | | | |
| AR040 | colon (9808co65R) | colon (9808co65R) | | | | |
| AR041 | colon (9809co15) | colon (9809co15) | | | | |
| AR042 | colon cancer | colon cancer | | | | |
| AR043 | colon cancer (9808co64R) | colon cancer (9808co64R) | | | | |
| AR044 | colon cancer 9809co14 | colon cancer 9809co14 | | | | |
| AR050 | Donor II B Cells 24 hrs | Donor II B Cells 24 hrs | | | | |
| AR051 | Donor II B Cells 72 hrs | Donor II B Cells 72 hrs | | | | |
| AR052 | Donor II B-Cells 24 hrs. | Donor II B-Cells 24 hrs. | | | | |
| AR053 | Donor II B-Cells 72 hrs | Donor II B-Cells 72 hrs | | | | |
| AR054 | Donor II Resting B Cells | Donor II Resting B Cells | | | | |
| AR055 | Heart | Heart | | | | |
| AR056 | Human Lung (clonetech) | Human Lung (clonetech) | | | | |
| AR057 | Human Mammary | Human Mammary | | | | |
| | (clontech) | (clontech) | | | | |
| AR058 | Human Thymus | Human Thymus | | | | |
| | (clonetech) | (clonetech) | | | | |
| AR059 | Jurkat (unstimulated) | Jurkat (unstimulated) | | | | |
| AR060 | Kidney | Kidney | | | | |
| AR061 | Liver | Liver | | | | |
| AR062 | Liver (Clontech) | Liver (Clontech) | | | | |
| AR063 | Lymphocytes chronic | Lymphocytes chronic | | | | |
| | lymphocytic leukaemia | lymphocytic leukaemia | | | | |
| AR064 | Lymphocytes diffuse large | Lymphocytes diffuse large | | | | |
| | B cell lymphoma | B cell lymphoma | | | | |
| AR065 | Lymphocytes follicular | Lymphocytes follicular | | | | |
| | lymphoma | lymphoma | | | | |
| AR066 | normal breast | normal breast | | | | |
| AR067 | Normal Ovarian | Normal Ovarian | | | | |
| | (4004901) | (4004901) | | | | |
| AR068 | Normal Ovary 9508G045 | Normal Ovary 9508G045 | | | | |
| AR069 | Normal Ovary 9701G208 | Normal Ovary 9701G208 | | | | |
| AR070 | Normal Ovary 9806G005 | Normal Ovary 9806G005 | | | | |
| AR071 | Ovarian Cancer | Ovarian Cancer | | | | |
| AR072 | Ovarian Cancer | Ovarian Cancer | | | | |
| | (9702G001) | (9702G001) | | | | |
| AR073 | Ovarian Cancer | Ovarian Cancer | | | | |
| | (9707G029) | (9707G029) | | | | |
| AR074 | Ovarian Cancer | Ovarian Cancer | | | | |
| | (9804G011) | (9804G011) | | | | |
| AR075 | Ovarian Cancer | Ovarian Cancer | | | | |
| | (9806G019) | (9806G019) | | | | |
| AR076 | Ovarian Cancer | Ovarian Cancer | | | | |
| | (9807G017) | (9807G017) | | | | |
| AR077 | Ovarian Cancer | Ovarian Cancer | | | | |
| | (9809G001) | (9809G001) | | | | |
| AR078 | ovarian cancer 15799 | ovarian cancer 15799 | | | | |
| AR079 | Ovarian Cancer | Ovarian Cancer | | | | |
| | 17717AID | 17717AID | | | | |
| AR080 | Ovarian Cancer | Ovarian Cancer | | | | |
| | 4004664B1 | 4004664B1 | | | | |
| AR081 | Ovarian Cancer | Ovarian Cancer | | | | |
| | 4005315A1 | 4005315A1 | | | | |
| AR082 | ovarian cancer 94127303 | ovarian cancer 94127303 | | | | |
| AR083 | Ovarian Cancer 96069304 | Ovarian Cancer 96069304 | | | | |
| AR084 | Ovarian Cancer 9707G029 | Ovarian Cancer 9707G029 | | | | |
| AR085 | Ovarian Cancer 9807G045 | Ovarian Cancer 9807G045 | | | | |
| AR086 | ovarian cancer 9809G001 | ovarian cancer 9809G001 | | | | |
| AR087 | Ovarian Cancer | Ovarian Cancer | | | | |
| | 9905C032RC | 9905C032RC | | | | |
| AR088 | Ovarian cancer 9907 C00 | Ovarian cancer 9907 C00 | | | | |
| | 3rd | 3rd | | | | |
| AR089 | Prostate | Prostate | | | | |
| AR090 | Prostate (clonetech) | Prostate (clonetech) | | | | |
| AR091 | prostate cancer | prostate cancer | | | | |
| AR092 | prostate cancer #15176 | prostate cancer #15176 | | | | |
| AR093 | prostate cancer #15509 | prostate cancer #15509 | | | | |
| AR094 | prostate cancer #15673 | prostate cancer #15673 | | | | |
| AR095 | Small Intestine (Clontech) | Small Intestine (Clontech) | | | | |
| AR096 | Spleen | Spleen | | | | |
| AR097 | Thymus T cells activated | Thymus T cells activated | | | | |
| AR098 | Thymus T cells resting | Thymus T cells resting | | | | |
| AR099 | Tonsil | Tonsil | | | | |
| AR100 | Tonsil geminal center | Tonsil geminal center | | | | |
| | centroblast | centroblast | | | | |
| AR101 | Tonsil germinal center B | Tonsil germinal center B | | | | |
| | cell | cell | | | | |
| AR102 | Tonsil lymph node | Tonsil lymph node | | | | |
| AR103 | Tonsil memory B cell | Tonsil memory B cell | | | | |
| AR104 | Whole Brain | Whole Brain | | | | |
| AR105 | Xenograft ES-2 | Xenograft ES-2 | | | | |
| AR106 | Xenograft SW626 | Xenograft SW626 | | | | |
| AR119 | 001: IL-2 | 001: IL-2 | | | | |
| AR120 | 001: IL-2.1 | 001: IL-2.1 | | | | |
| AR121 | 001: IL-2_b | 001: IL-2_b | | | | |
| AR124 | 002: Monocytes untreated | 002: Monocytes untreated | | | | |
| | (1 hr) | (1 hr) | | | | |
| AR125 | 002: Monocytes untreated | 002: Monocytes untreated | | | | |
| | (5 hrs) | (5 hrs) | | | | |
| AR126 | 002: Control.1C | 002: Control.1C | | | | |
| AR127 | 002: IL2.1C | 002: IL2.1C | | | | |
| AR130 | 003: Placebo-treated Rat | 003: Placebo-treated Rat | | | | |
| | Lacrimal Gland | Lacrimal Gland | | | | |
| AR131 | 003: Placebo-treated Rat | 003: Placebo-treated Rat | | | | |
| | Submandibular Gland | Submandibular Gland | | | | |
| AR135 | 004: Monocytes untreated | 004: Monocytes untreated | | | | |
| | (5 hrs) | (5 hrs) | | | | |
| AR136 | 004: Monocytes untreated | 004: Monocytes untreated | | | | |
| | 1 hr | 1 hr | | | | |
| AR139 | 005: Placebo (48 hrs) | 005: Placebo (48 hrs) | | | | |
| AR140 | 006: pC4 (24 hrs) | 006: pC4 (24 hrs) | | | | |
| AR141 | 006: pC4 (48 hrs) | 006: pC4 (48 hrs) | | | | |
| AR152 | 007: PHA (1 hr) | 007: PHA (1 hr) | | | | |
| AR153 | 007: PHA (6 HRS) | 007: PHA (6 HRS) | | | | |
| AR154 | 007: PMA (6 hrs) | 007: PMA (6 hrs) | | | | |
| AR155 | 008: 1449_#2 | 008: 1449_#2 | | | | |
| AR161 | 01: A - max 24 | 01: A - max 24 | | | | |
| AR162 | 01: A - max 26 | 01: A - max 26 | | | | |
| AR163 | 01: A - max 30 | 01: A - max 30 | | | | |
| AR164 | 01: B - max 24 | 01: B - max 24 | | | | |
| AR165 | 01: B - max 26 | 01: B - max 26 | | | | |
| AR166 | 01: B - max 30 | 01: B - max 30 | | | | |
| AR167 | 1449 sample | 1449 sample | | | | |
| AR168 | 3T3P10 1.0 uM insulin | 3T3P10 1.0 uM insulin | | | | |
| AR169 | 3T3P10 10 nM Insulin | 3T3P10 10 nM Insulin | | | | |
| AR170 | 3T3P10 10 uM insulin | 3T3P10 10 uM insulin | | | | |
| AR171 | 3T3P10 No Insulin | 3T3P10 No Insulin | | | | |
| AR172 | 3T3P4 | 3T3P4 | | | | |
| AR173 | Adipose (41892) | Adipose (41892) | | | | |
| AR174 | Adipose Diabetic (41611) | Adipose Diabetic (41611) | | | | |
| AR175 | Adipose Diabetic (41661) | Adipose Diabetic (41661) | | | | |
| AR176 | Adipose Diabetic (41689) | Adipose Diabetic (41689) | | | | |
| AR177 | Adipose Diabetic (41706) | Adipose Diabetic (41706) | | | | |
| AR178 | Adipose Diabetic (42352) | Adipose Diabetic (42352) | | | | |
| AR179 | Adipose Diabetic (42366) | Adipose Diabetic (42366) | | | | |
| AR180 | Adipose Diabetic (42452) | Adipose Diabetic (42452) | | | | |
| AR181 | Adipose Diabetic (42491) | Adipose Diabetic (42491) | | | | |
| AR182 | Adipose Normal (41843) | Adipose Normal (41843) | | | | |
| AR183 | Adipose Normal (41893) | Adipose Normal (41893) | | | | |
| AR184 | Adipose Normal (42452) | Adipose Normal (42452) | | | | |
| AR185 | Adrenal Gland | Adrenal Gland | | | | |
| AR186 | Adrenal Gland + Whole | Adrenal Gland + Whole | | | | |
| | Brain | Brain | | | | |
| AR187 | B7(1 hr) + (inverted) | B7(1 hr) + (inverted) | | | | |
| AR188 | Breast (18275A2B) | Breast (18275A2B) | | | | |
| AR189 | Breast (4004199) | Breast (4004199) | | | | |
| AR190 | Breast (4004399) | Breast (4004399) | | | | |
| AR191 | Breast (4004943B7) | Breast (4004943B7) | | | | |
| AR192 | Breast (4005570B1) | Breast (4005570B1) | | | | |
| AR193 | Breast Cancer | Breast Cancer | | | | |
| | (4004127A30) | (4004127A30) | | | | |
| AR194 | Breast Cancer | Breast Cancer | | | | |
| | (400443A21) | (400443A21) | | | | |
| AR195 | Breast Cancer | Breast Cancer | | | | |
| | (4004643A2) | (4004643A2) | | | | |
| AR196 | Breast Cancer | Breast Cancer | | | | |
| | (4004710A7) | (4004710A7) | | | | |
| AR197 | Breast Cancer | Breast Cancer | | | | |
| | (4004943A21) | (4004943A21) | | | | |
| AR198 | Breast Cancer (400553A2) | Breast Cancer (400553A2) | | | | |
| AR199 | Breast Cancer | Breast Cancer | | | | |
| | (9805C046R) | (9805C046R) | | | | |
| AR200 | Breast Cancer | Breast Cancer | | | | |
| | (9806C012R) | (9806C012R) | | | | |
| AR201 | Breast Cancer (ODQ | Breast Cancer (ODQ | | | | |
| | 45913) | 45913) | | | | |
| AR202 | Breast Cancer | Breast Cancer | | | | |
| | (ODQ45913) | (ODQ45913) | | | | |
| AR203 | Breast Cancer | Breast Cancer | | | | |
| | (ODQ4591B) | (ODQ4591B) | | | | |
| AR204 | Colon Cancer (15663) | Colon Cancer (15663) | | | | |
| AR205 | Colon Cancer | Colon Cancer | | | | |
| | (4005144A4) | (4005144A4) | | | | |
| AR206 | Colon Cancer | Colon Cancer | | | | |
| | (4005413A4) | (4005413A4) | | | | |
| AR207 | Colon Cancer | Colon Cancer | | | | |
| | (4005570B1) | (4005570B1) | | | | |
| AR208 | Control RNA #1 | Control RNA #1 | | | | |
| AR209 | Control RNA #2 | Control RNA #2 | | | | |
| AR210 | Cultured Preadipocyte | Cultured Preadipocyte | | | | |
| | (blue) | (blue) | | | | |
| AR211 | Cultured Preadipocyte | Cultured Preadipocyte | | | | |
| | (Red) | (Red) | | | | |
| AR212 | Donor II B-Cells 24 hrs | Donor II B-Cells 24 hrs | | | | |
| AR213 | Donor II Resting B-Cells | Donor II Resting B-Cells | | | | |
| AR214 | H114EP12 10 nM Insulin | H114EP12 10 nM Insulin | | | | |
| AR215 | H114EP12 (10 nM insulin) | H114EP12 (10 nM insulin) | | | | |
| AR216 | H114EP12 (2.6 ug/ul) | H114EP12 (2.6 ug/ul) | | | | |
| AR217 | H114EP12 (3.6 ug/ul) | H114EP12 (3.6 ug/ul) | | | | |
| AR218 | HUVEC #1 | HUVEC #1 | | | | |
| AR219 | HUVEC #2 | HUVEC #2 | | | | |
| AR221 | L6 undiff. | L6 undiff. | | | | |
| AR222 | L6 Undifferentiated | L6 Undifferentiated | | | | |
| AR223 | L6P8 + 10 nM Insulin | L6P8 + 10 nM Insulin | | | | |
| AR224 | L6P8 + HS | L6P8 + HS | | | | |
| AR225 | L6P8 10 nM Insulin | L6P8 10 nM Insulin | | | | |
| AR226 | Liver (00-06-A007B) | Liver (00-06-A007B) | | | | |
| AR227 | Liver (96-02-A075) | Liver (96-02-A075) | | | | |
| AR228 | Liver (96-03-A144) | Liver (96-03-A144) | | | | |
| AR229 | Liver (96-04-A138) | Liver (96-04-A138) | | | | |
| AR230 | Liver (97-10-A074B) | Liver (97-10-A074B) | | | | |
| AR231 | Liver (98-09-A242A) | Liver (98-09-A242A) | | | | |
| AR232 | Liver Diabetic (1042) | Liver Diabetic (1042) | | | | |
| AR233 | Liver Diabetic (41616) | Liver Diabetic (41616) | | | | |
| AR234 | Liver Diabetic (41955) | Liver Diabetic (41955) | | | | |
| AR235 | Liver Diabetic (42352R) | Liver Diabetic (42352R) | | | | |
| AR236 | Liver Diabetic (42366) | Liver Diabetic (42366) | | | | |
| AR237 | Liver Diabetic (42483) | Liver Diabetic (42483) | | | | |
| AR238 | Liver Diabetic (42491) | Liver Diabetic (42491) | | | | |
| AR239 | Liver Diabetic (99-09- | Liver Diabetic (99-09- | | | | |
| | A281A) | A281A) | | | | |
| AR240 | Lung | Lung | | | | |
| AR241 | Lung (27270) | Lung (27270) | | | | |
| AR242 | Lung (2727Q) | Lung (2727Q) | | | | |
| AR243 | Lung Cancer | Lung Cancer | | | | |
| | (4005116A1) | (4005116A1) | | | | |
| AR244 | Lung Cancer | Lung Cancer | | | | |
| | (4005121A5) | (4005121A5) | | | | |
| AR245 | Lung Cancer | Lung Cancer | | | | |
| | (4005121A5)) | (4005121A5)) | | | | |
| AR246 | Lung Cancer | Lung Cancer | | | | |
| | (4005340A4) | (4005340A4) | | | | |
| AR247 | Mammary Gland | Mammary Gland | | | | |
| AR248 | Monocyte (CT) | Monocyte (CT) | | | | |
| AR249 | Monocyte (OCT) | Monocyte (OCT) | | | | |
| AR250 | Monocytes (CT) | Monocytes (CT) | | | | |
| AR251 | Monocytes (INFG 18 hr) | Monocytes (INFG 18 hr) | | | | |
| AR252 | Monocytes (INFG 18 hr) | Monocytes (INFG 18 hr) | | | | |
| AR253 | Monocytes (INFG 8-11) | Monocytes (INFG 8-11) | | | | |
| AR254 | Monocytes (O CT) | Monocytes (O CT) | | | | |
| AR255 | Muscle (91-01-A105) | Muscle (91-01-A105) | | | | |
| AR256 | Muscle (92-04-A059) | Muscle (92-04-A059) | | | | |
| AR257 | Muscle (97-11-A056d) | Muscle (97-11-A056d) | | | | |
| AR258 | Muscle (99-06-A210A) | Muscle (99-06-A210A) | | | | |
| AR259 | Muscle (99-07-A203B) | Muscle (99-07-A203B) | | | | |
| AR260 | Muscle (99-7-A203B) | Muscle (99-7-A203B) | | | | |
| AR261 | Muscle Diabetic (42352R) | Muscle Diabetic (42352R) | | | | |
| AR262 | Muscle Diabetic (42366) | Muscle Diabetic (42366) | | | | |
| AR263 | NK-19 Control | NK-19 Control | | | | |
| AR264 | NK-19 IL Treated 72 hrs | NK-19 IL Treated 72 hrs | | | | |
| AR265 | NK-19 UK Treated 72 hrs. | NK-19 UK Treated 72 hrs. | | | | |
| AR266 | Omentum Normal (94-08- | Omentum Normal (94-08- | | | | |
| | B009) | B009) | | | | |
| AR267 | Omentum Normal (97-01- | Omentum Normal (97-01- | | | | |
| | A039A) | A039A) | | | | |
| AR268 | Omentum Normal (97-04- | Omentum Normal (97-04- | | | | |
| | A114C) | A114C) | | | | |
| AR269 | Omentum Normal (97-06- | Omentum Normal (97-06- | | | | |
| | A117C) | A117C) | | | | |
| AR270 | Omentum Normal (97-09- | Omentum Normal (97-09- | | | | |
| | B004C) | B004C) | | | | |
| AR271 | Ovarian Cancer | Ovarian Cancer | | | | |
| | (17717AID) | (17717AID) | | | | |
| AR272 | Ovarian Cancer | Ovarian Cancer | | | | |
| | (9905C023RC) | (9905C023RC) | | | | |
| AR273 | Ovarian Cancer | Ovarian Cancer | | | | |
| | (9905C032RC) | (9905C032RC) | | | | |
| AR274 | Ovary (9508G045) | Ovary (9508G045) | | | | |
| AR275 | Ovary (9701G208) | Ovary (9701G208) | | | | |
| AR276 | Ovary 9806G005 | Ovary 9806G005 | | | | |
| AR277 | Pancreas | Pancreas | | | | |
| AR278 | Placebo | Placebo | | | | |
| AR279 | rIL2 Control | rIL2 Control | | | | |
| AR280 | RSS288L | RSS288L | | | | |
| AR281 | RSS288LC | RSS288LC | | | | |
| AR282 | Salivary Gland | Salivary Gland | | | | |
| AR283 | Skeletal Muscle | Skeletal Muscle | | | | |
| AR284 | Skeletal Muscle (91-01- | Skeletal Muscle (91-01- | | | | |
| | A105) | A105) | | | | |
| AR285 | Skeletal Muscle (42180) | Skeletal Muscle (42180) | | | | |
| AR286 | Skeletal Muscle (42386) | Skeletal Muscle (42386) | | | | |
| AR287 | Skeletal Muscle (42461) | Skeletal Muscle (42461) | | | | |
| AR288 | Skeletal Muscle (91-01- | Skeletal Muscle (91-01- | | | | |
| | A105) | A105) | | | | |
| AR289 | Skeletal Muscle (92-04- | Skeletal Muscle (92-04- | | | | |
| | A059) | A059) | | | | |
| AR290 | Skeletal Muscle (96-08- | Skeletal Muscle (96-08- | | | | |
| | A171) | A171) | | | | |
| AR291 | Skeletal Muscle (97-07- | Skeletal Muscle (97-07- | | | | |
| | A190A) | A190A) | | | | |
| AR292 | Skeletal Muscle Diabetic | Skeletal Muscle Diabetic | | | | |
| | (42352) | (42352) | | | | |
| AR293 | Skeletal Muscle Diabetic | Skeletal Muscle Diabetic | | | | |
| | (42366) | (42366) | | | | |
| AR294 | Skeletal Muscle Diabetic | Skeletal Muscle Diabetic | | | | |
| | (42395) | (42395) | | | | |
| AR295 | Skeletal Muscle Diabetic | Skeletal Muscle Diabetic | | | | |
| | (42483) | (42483) | | | | |
| AR296 | Skeletal Muscle Diabetic | Skeletal Muscle Diabetic | | | | |
| | (42491) | (42491) | | | | |
| AR297 | Skeletal Muscle Diabetic | Skeletal Muscle Diabetic | | | | |
| | 42352 | 42352 | | | | |
| AR298 | Skeletal Musle (42461) | Skeletal Musle (42461) | | | | |
| AR299 | Small Intestine | Small Intestine | | | | |
| AR300 | Stomach | Stomach | | | | |
| AR301 | T-Cell + HDPBQ71.fc | T-Cell + HDPBQ71.fc | | | | |
| | 1449 16 hrs | 1449 16 hrs | | | | |
| AR302 | T-Cell + HDPBQ71.fc | T-Cell + HDPBQ71.fc | | | | |
| | 1449 6 hrs | 1449 6 hrs | | | | |
| AR303 | T-Cell + IL2 16 hrs | T-Cell + IL2 16 hrs | | | | |
| AR304 | T-Cell + IL2 6 hrs | T-Cell + IL2 6 hrs | | | | |
| AR306 | T-Cell Untreated 16 hrs | T-Cell Untreated 16 hrs | | | | |
| AR307 | T-Cell Untreated 6 hrs | T-Cell Untreated 6 hrs | | | | |
| AR308 | T-Cells 24 hours | T-Cells 24 hours | | | | |
| AR309 | T-Cells 24 hrs | T-Cells 24 hrs | | | | |
| AR310 | T-Cells 24 hrs. | T-Cells 24 hrs. | | | | |
| AR311 | T-Cells 24 hrs | T-Cells 24 hrs | | | | |
| AR312 | T-Cells 4 days | T-Cells 4 days | | | | |
| AR313 | Thymus | Thymus | | | | |
| AR314 | TRE | TRE | | | | |
| AR315 | TREC | TREC | | | | |
| AR316 | Virtual Mixture | Virtual Mixture | | | | |
| AR317 | B lymphocyte, | B lymphocyte, | | | | |
| AR318 | (non-T; non-B) | (non-T; non-B) | | | | |
| AR326 | 001 - 293 RNA (Vector | 001 - 293 RNA (Vector | | | | |
| | Control) | Control) | | | | |
| AR327 | 001: Control | 001: Control | | | | |
| AR328 | 001: Control.1 | 001: Control.1 | | | | |
| AR355 | Acute Lymphocyte | Acute Lymphocyte | | | | |
| | Leukemia | Leukemia | | | | |
| AR356 | AML Patient #11 | AML Patient #11 | | | | |
| AR357 | AML Patient #2 | AML Patient #2 | | | | |
| AR358 | AML Patient #2 SGAH | AML Patient #2 SGAH | | | | |
| AR359 | AML Patient#2 | AML Patient#2 | | | | |
| AR360 | Aorta | Aorta | | | | |
| AR361 | B Cell | B Cell | | | | |
| AR362 | B lymphoblast | B lymphoblast | | | | |
| AR363 | B lymphocyte | B lymphocyte | | | | |
| AR364 | B lymphocytes | B lymphocytes | | | | |
| AR365 | B-cell | B-cell | | | | |
| AR366 | B-Cells | B-Cells | | | | |
| AR367 | B-Lymphoblast | B-Lymphoblast | | | | |
| AR368 | B-Lymphocytes | B-Lymphocytes | | | | |
| AR369 | Bladder | Bladder | | | | |
| AR370 | Bone Marrow | Bone Marrow | | | | |
| AR371 | Bronchial Epithelial Cell | Bronchial Epithelial Cell | | | | |
| AR372 | Bronchial Epithelial Cells | Bronchial Epithelial Cells | | | | |
| AR373 | Caco-2A | Caco-2A | | | | |
| AR374 | Caco-2B | Caco-2B | | | | |
| AR375 | Caco-2C | Caco-2C | | | | |
| AR376 | Cardiac #1 | Cardiac #1 | | | | |
| AR377 | Cardiac #2 | Cardiac #2 | | | | |
| AR378 | Chest Muscle | Chest Muscle | | | | |
| AR381 | Dendritic Cell | Dendritic Cell | | | | |
| AR382 | Dendritic cells | Dendritic cells | | | | |
| AR383 | E. coli | E. coli | | | | |
| AR384 | Epithelial Cells | Epithelial Cells | | | | |
| AR385 | Esophagus | Esophagus | | | | |
| AR386 | FPPS | FPPS | | | | |
| AR387 | FPPSC | FPPSC | | | | |
| AR388 | HepG2 Cell Line | HepG2 Cell Line | | | | |
| AR389 | HepG2 Cell line Buffer 1 hr. | HepG2 Cell line Buffer 1 hr. | | | | |
| AR390 | HepG2 Cell line Buffer 06 hr. | HepG2 Cell line Buffer 06 hr | | | | |
| AR391 | HepG2 Cell line Buffer 24 hr. | HepG2 Cell line Buffer 24 hr. | | | | |
| AR392 | HepG2 Cell line Insulin | HepG2 Cell line Insulin | | | | |
| | 01 hr. | 01 hr. | | | | |
| AR393 | HepG2 Cell line Insulin | HepG2 Cell line Insulin | | | | |
| | 06 hr. | 06 hr. | | | | |
| AR394 | HepG2 Cell line Insulin | HepG2 Cell line Insulin | | | | |
| | 24 hr. | 24 hr. | | | | |
| AR398 | HMC-1 | HMC-1 | | | | |
| AR399 | HMCS | HMCS | | | | |
| AR400 | HMSC | HMSC | | | | |
| AR401 | HUVEC #3 | HUVEC #3 | | | | |
| AR402 | HUVEC #4 | HUVEC #4 | | | | |
| AR404 | KIDNEY NORMAL | KIDNEY NORMAL | | | | |
| AR405 | KIDNEY TUMOR | KIDNEY TUMOR | | | | |
| AR406 | KIDNEY TUMOR | | | | | |
| AR407 | Lymph Node | Lymph Node | | | | |
| AR408 | Macrophage | Macrophage | | | | |
| AR409 | Megakarioblast | Megakarioblast | | | | |
| AR410 | Monocyte | Monocyte | | | | |
| AR411 | Monocytes | Monocytes | | | | |
| AR412 | Myocardium | Myocardium | | | | |
| AR413 | Myocardium #3 | Myocardium #3 | | | | |
| AR414 | Myocardium #4 | Myocardium #4 | | | | |
| AR415 | Myocardium #5 | Myocardium #5 | | | | |
| AR416 | NK | NK | | | | |
| AR417 | NK cell | NK cell | | | | |
| AR418 | NK cells | NK cells | | | | |
| AR419 | NKYa | NKYa | | | | |
| AR420 | NXYa019 | NKYa019 | | | | |
| AR421 | Ovary | Ovary | | | | |
| AR422 | Patient #11 | Patient #11 | | | | |
| AR423 | Peripheral blood | Peripheral blood | | | | |
| AR424 | Primary Adipocytes | Primary Adipocytes | | | | |
| AR425 | Promyeloblast | Promyeloblast | | | | |
| AR427 | RSSWT | RSSWT | | | | |
| AR428 | RSSWTC | RSSWTC | | | | |
| AR429 | SW 480(G1) | SW 480(G1) | | | | |
| AR430 | SW 480(G2) | SW 480(G2) | | | | |
| AR431 | SW 480(G3) | SW 480(G3) | | | | |
| AR432 | SW 480(G4) | SW 480(G4) | | | | |
| AR433 | SW 480(G5) | SW 480(G5) | | | | |
| AR434 | T Lymphoblast | T Lymphoblast | | | | |
| AR435 | T Lymphocyte | T Lymphocyte | | | | |
| AR436 | T-Cell | T-Cell | | | | |
| AR438 | T-Cell, | T-Cell, | | | | |
| AR439 | T-Cells | T-Cells | | | | |
| AR440 | T-lymphoblast | T-lymphoblast | | | | |
| AR441 | Th 1 | Th 1 | | | | |
| AR442 | Th 2 | Th 2 | | | | |
| AR443 | Th1 | Th1 | | | | |
| AR444 | Th2 | Th2 | | | | |
| H0002 | Human Adult Heart | Human Adult Heart | Heart | | | Uni-ZAP XR |
| H0003 | Human Adult Liver | Human Adult Liver | Liver | | | Uni-ZAP XR |
| H0004 | Human Adult Spleen | Human Adult Spleen | Spleen | | | Uni-ZAP XR |
| H0008 | Whole 6 Week Old | | | | | Uni-ZAP XR |
| | Embryo | | | | | |
| H0009 | Human Fetal Brain | | | | | Uni-ZAP XR |
| H0011 | Human Fetal Kidney | Human Fetal Kidney | Kidney | | | Uni-ZAP XR |
| H0012 | Human Fetal Kidney | Human Fetal Kidney | Kidney | | | Uni-ZAP XR |
| H0013 | Human 8 Week Whole | Human 8 Week Old | Embryo | | | Uni-ZAP XR |
| | Embryo | Embryo | | | | |
| H0014 | Human Gall Bladder | Human Gall Bladder | Gall Bladder | | | Uni-ZAP XR |
| H0015 | Human Gall Bladder, | Human Gall Bladder | Gall Bladder | | | Uni-ZAP XR |
| | fraction II | | | | | |
| H0018 | Human Greater Omentum, | Human Greater Omentum | peritoneum | | | Uni-ZAP XR |
| | fII remake | | | | | |
| H0019 | Human Fetal Heart | Human Fetal Heart | Heart | | | pBluescript |
| H0022 | Jurkat Cells | Jurkat T-Cell Line | | | | Lambda ZAP II |
| H0024 | Human Fetal Lung III | Human Fetal Lung | Lung | | | Uni-ZAP XR |
| H0026 | Namalwa Cells | Namalwa B-Cell Line, | | | | Lambda ZAP II |
| | | EBV immortalized | | | | |
| H0028 | Human Old Ovary | Human Old Ovary | Ovary | | | pBluescript |
| H0030 | Human Placenta | | | | | Uni-ZAP XR |
| H0031 | Human Placenta | Human Placenta | Placenta | | | Uni-ZAP XR |
| H0032 | Human Prostate | Human Prostate | Prostate | | | Uni-ZAP XR |
| H0033 | Human Pituitary | Human Pituitary | | | | Uni-ZAP XR |
| H0036 | Human Adult Small | Human Adult Small | Small Int. | | | Uni-ZAP XR |
| | Intestine | Intestine | | | | |
| H0038 | Human Testes | Human Testes | Testis | | | Uni-ZAP XR |
| H0039 | Human Pancreas Tumor | Human Pancreas Tumor | Pancreas | | disease | Uni-ZAP XR |
| H0040 | Human Testes Tumor | Human Testes Tumor | Testis | | disease | Uni-ZAP XR |
| H0041 | Human Fetal Bone | Human Fetal Bone | Bone | | | Uni-ZAP XR |
| H0042 | Human Adult Pulmonary | Human Adult Pulmonary | Lung | | | Uni-ZAP XR |
| H0046 | Human Endometrial | Human Endometrial | Uterus | | disease | Uni-ZAP XR |
| | Tumor | Tumor | | | | |
| H0047 | Human Fetal Liver | Human Fetal Liver | Liver | | | Uni-ZAP XR |
| H0049 | Human Fetal Kidney | Human Fetal Kidney | Kidney | | | Uni-ZAP XR |
| H0050 | Human Fetal Heart | Human Fetal Heart | Heart | | | Uni-ZAP XR |
| H0051 | Human Hippocampus | Human Hippocampus | Brain | | | Uni-ZAP XR |
| H0052 | Human Cerebellum | Human Cerebellum | Brain | | | Uni-ZAP XR |
| H0053 | Human Adult Kidney | Human Adult Kidney | Kidney | | | Uni-ZAP XR |
| H0056 | Human Umbilical Vein, | Human Umbilical Vein | Umbilical vein | | | Uni-ZAP XR |
| | Endo. remake | Endothelial Cells | | | | |
| H0057 | Human Fetal Spleen | | | | | Uni-ZAP XR |
| H0059 | Human Uterine Cancer | Human Uterine Cancer | Uterus | | disease | Lambda ZAP II |
| H0060 | Human Macrophage | Human Macrophage | Blood | Cell Line | | pBluescript |
| H0061 | Human Macrophage | Human Macrophage | Blood | Cell Line | | pBluescript |
| H0063 | Human Thymus | Human Thymus | Thymus | | | Uni-ZAP XR |
| H0068 | Human Skin Tumor | Human skin Tumor | Skin | | disease | Uni-ZAP XR |
| H0069 | Human Activated T-Cells | Activated T-Cells | Blood | Cell Line | | Uni-ZAP XR |
| H0070 | Human Pancreas | Human Pancreas | Pancreas | | | Uni-ZAP XR |
| H0071 | Human Infant Adrenal | Human Infant Adrenal | Adrenal gland | | | Uni-ZAP XR |
| | Gland | Gland | | | | |
| H0075 | Human Activated T-Cells | Activated T-Cells | Blood | Cell Line | | Uni-ZAP XR |
| | (II) | | | | | |
| H0081 | Human Fetal Epithelium | Human Fetal Skin | Skin | | | Uni-ZAP XR |
| | (Skin) | | | | | |
| H0082 | Human Fetal Muscle | Human Fetal Muscle | Sk Muscle | | | Uni-ZAP XR |
| H0083 | HUMAN JURKAT | Jurkat Cells | | | | Uni-ZAP XR |
| | MEMBRANE BOUND | | | | | |
| | POLYSOMES | | | | | |
| H0085 | Human Colon | Human Colon | | | | Lambda ZAP II |
| H0086 | Human epithelioid | Epithelioid Sarcoma, | Sk Muscle | | disease | Uni-ZAP XR |
| | sarcoma | muscle | | | | |
| H0087 | Human Thymus | Human Thymus | | | | pBluescript |
| H0090 | Human T-Cell Lymphoma | T-Cell Lymphoma | T-Cell | | disease | Uni-ZAP XR |
| H0095 | Human Greater Omentum | Human Greater Omentum | peritoneum | | | Uni-ZAP XR |
| | RNA Remake | | | | | |
| H0098 | Human Adult Liver, | Human Adult Liver | Liver | | | Uni-ZAP XR |
| | subtracted | | | | | |
| H0099 | Human Lung Cancer, | Human Lung Cancer | Lung | | | pBluescript |
| | subtracted | | | | | |
| H0100 | Human Whole Six Week | Human Whole Six Week | Embryo | | | Uni-ZAP XR |
| | Old Embryo | Old Embryo | | | | |
| H0101 | Human 7 Weeks Old | Human Whole 7 Week | Embryo | | | Lambda ZAP II |
| | Embryo, subtracted | Old Embryo | | | | |
| H0102 | Human Whole 6 Week | Human Whole Six Week | Embryo | | | pBluescript |
| | Old Embryo (II), subt | Old Embryo | | | | |
| H0107 | Human Infant Adrenal | Human Infant Adrenal | Adrenal gland | | | pBluescript |
| | Gland, subtracted | Gland | | | | |
| H0109 | Human Macrophage, | Macrophage | Blood | Cell Line | | pBluescript |
| | subtracted | | | | | |
| H0111 | Human Placenta, | Human Placenta | Placenta | | | pBluescript |
| | subtracted | | | | | |
| H0121 | Human Cornea, subtracted | Human Cornea | eye | | | Uni-ZAP XR |
| H0122 | Human Adult Skeletal | Human Skeletal Muscle | Sk Muscle | | | Uni-ZAP XR |
| | Muscle | | | | | |
| H0123 | Human Fetal Dura Mater | Human Fetal Dura Mater | Brain | | | Uni-ZAP XR |
| H0124 | Human | Human | Sk Muscle | | disease | Uni-ZAP XR |
| | Rhabdomyosarcoma | Rhabdomyosarcoma | | | | |
| H0125 | Cem cells cyclohexamide | Cyclohexamide Treated | Blood | Cell Line | | Uni-ZAP XR |
| | treated | Cem, Jurkat, Raji, and | | | | |
| | | Supt | | | | |
| H0129 | Jurkatcells, thiouridine | Jurkat Cells | | | | Uni-ZAP XR |
| | activated, fract II | | | | | |
| H0130 | LNCAP untreated | LNCAP Cell Line | Prostate | Cell Line | | Uni-ZAP XR |
| H0131 | LNCAP + o.3 nM R1881 | LNCAP Cell Line | Prostate | Cell Line | | Uni-ZAP XR |
| H0132 | LNCAP + 30 nM R1881 | LNCAP Cell Line | Prostate | Cell Line | | Uni-ZAP XR |
| H0134 | Raji Cells, cyclohexamide | Cyclohexamide Treated | Blood | Cell Line | | Uni-ZAP XR |
| | treated | Cem, Jurkat, Raji, and | | | | |
| | | Supt | | | | |
| H0135 | Human Synovial Sarcoma | Human Synovial Sarcoma | Synovium | | | Uni-ZAP XR |
| H0136 | Supt Cells, cyclohexamide | Cyclohexamide Treated | Blood | Cell Line | | Uni-ZAP XR |
| | treated | Cem, Jurkat, Raji, and | | | | |
| | | Supt | | | | |
| H0140 | Activated T-Cells, 8 hrs. | Activated T-Cells | Blood | Cell Line | | Uni-ZAP XR |
| H0141 | Activated T-Cells, 12 hrs. | Activated T-Cells | Blood | Cell Line | | Uni-ZAP XR |
| H0144 | Nine Week Old Early | 9 Wk Old Early Stage | Embryo | | | Uni-ZAP XR |
| | Stage Human | Human | | | | |
| H0147 | Human Adult Liver | Human Adult Liver | Liver | | | Uni-ZAP XR |
| H0149 | 7 Week Old Early Stage | Human Whole 7 Week | Embryo | | | Uni-ZAP XR |
| | Human, subtracted | Old Embryo | | | | |
| H0150 | Human Epididymus | Epididymis | Testis | | | Uni-ZAP XR |
| H0151 | Early Stage Human Liver | Human Fetal Liver | Liver | | | Uni-ZAP XR |
| H0154 | Human Fibrosarcoma | Human Skin Fibrosarcoma | Skin | | disease | Uni-ZAP XR |
| H0156 | Human Adrenal Gland | Human Adrenal Gland | Adrenal Gland | | disease | Uni-ZAP XR |
| | Tumor | Tumor | | | | |
| H0159 | Activated T-Cells, 8 hrs., | Activated T-Cells | Blood | Cell Line | | Uni-ZAP XR |
| | ligation 2 | | | | | |
| H0163 | Human Synovium | Human Synovium | Synovium | | | Uni-ZAP XR |
| H0165 | Human Prostate Cancer, | Human Prostate Cancer, | Prostate | | disease | Uni-ZAP XR |
| | Stage B2 | stage B2 | | | | |
| H0166 | Human Prostate Cancer, | Human Prostate Cancer, | Prostate | | disease | Uni-ZAP XR |
| | Stage B2 fraction | stage B2 | | | | |
| H0167 | Activated T-Cells, 24 hrs. | Activated T-Cells | Blood | Cell Line | | Uni-ZAP XR |
| H0169 | Human Prostate Cancer, | Human Prostate Cancer, | Prostate | | disease | Uni-ZAP XR |
| | Stage C fraction | stage C | | | | |
| H0170 | 12 Week Old Early Stage | Twelve Week Old Early | Embryo | | | Uni-ZAP XR |
| | Human | Stage Human | | | | |
| H0171 | 12 Week Old Early Stage | Twelve Week Old Early | Embryo | | | Uni-ZAP XR |
| | Human, II | Stage Human | | | | |
| H0172 | Human Fetal Brain, | Human Fetal Brain | Brain | | | Lambda ZAP II |
| | random primed | | | | | |
| H0173 | Human Cardiomyopathy, | Human Cardiomyopathy | Heart | | disease | Uni-ZAP XR |
| | RNA remake | | | | | |
| H0177 | CAMA1Ee Cell Line | CAMA1Ee Cell Line | Breast | Cell Line | | Uni-ZAP XR |
| H0178 | Human Fetal Brain | Human Fetal Brain | Brain | | | Uni-ZAP XR |
| H0179 | Human Neutrophil | Human Neutrophil | Blood | Cell Line | | Uni-ZAP XR |
| H0181 | Human Primary Breast | Human Primary Breast | Breast | | disease | Uni-ZAP XR |
| | Cancer | Cancer | | | | |
| H0182 | Human Primary Breast | Human Primary Breast | Breast | | disease | Uni-ZAP XR |
| | Cancer | Cancer | | | | |
| H0183 | Human Colon Cancer | Human Colon Cancer | Colon | | disease | Uni-ZAP XR |
| H0187 | Resting T-Cell | T-Cells | Blood | Cell Line | | Lambda ZAP II |
| H0188 | Human Normal Breast | Human Normal Breast | Breast | | | Uni-ZAP XR |
| H0190 | Human Activated | Human | Blood | Cell Line | | Uni-ZAP XR |
| | Macrophage (LPS) | Macrophage/Monocytes | | | | |
| H0191 | Human Activated | Human | Blood | Cell Line | | Uni-ZAP XR |
| | Macrophage (LPS), thiour | Macrophage/Monocytes | | | | |
| H0194 | Human Cerebellum, | Human Cerebellum | Brain | | | pBluescript |
| | subtracted | | | | | |
| H0196 | Human Cardiomyopathy, | Human Cardiomyopathy | Heart | | | Uni-ZAP XR |
| | subtracted | | | | | |
| H0197 | Human Fetal Liver, | Human Fetal Liver | Liver | | | Uni-ZAP XR |
| | subtracted | | | | | |
| H0199 | Human Fetal Liver, | Human Fetal Liver | Liver | | | Uni-ZAP XR |
| | subtracted, neg clone | | | | | |
| H0200 | Human Greater Omentum, | Human Greater Omentum | peritoneum | | | Uni-ZAP XR |
| | fract II remake, | | | | | |
| H0201 | Human Hippocampus, | Human Hippocampus | Brain | | | pBluescript |
| | subtracted | | | | | |
| H0202 | Jurkat Cells, | Cyclohexamide Treated | Blood | Cell Line | | Uni-ZAP XR |
| | cyclohexamide treated, | Cem, Jurkat, Raji, and | | | | |
| | subtraction | Supt | | | | |
| H0204 | Human Colon Cancer, | Human Colon Cancer | Colon | | | pBluescript |
| | subtracted | | | | | |
| H0205 | Human Colon Cancer, | Human Colon Cancer | Colon | | | pBluescript |
| | differential | | | | | |
| H0208 | Early Stage Human Lung, | Human Fetal Lung | Lung | | | pBluescript |
| | subtracted | | | | | |
| H0209 | Human Cerebellum, | Human Cerebellum | Brain | | | Uni-ZAP XR |
| | differentially expressed | | | | | |
| H0211 | Human | Human Prostate | Prostate | | | pBluescript |
| | Prostate, differential | | | | | |
| | expression | | | | | |
| H0212 | Human Prostate, | Human Prostate | Prostate | | | pBluescript |
| | subtracted | | | | | |
| H0213 | Human Pituitary, | Human Pituitary | | | | Uni-ZAP XR |
| | subtracted | | | | | |
| H0216 | Supt cells, cyclohexamide | Cyclohexamide Treated | Blood | Cell Line | | pBluescript |
| | treated, subtracted | Cem, Jurkat, Raji, and | | | | |
| | | Supt | | | | |
| H0218 | Activated T-Cells, 0 hrs, | Activated T-Cells | Blood | Cell Line | | Uni-ZAP XR |
| | subtracted | | | | | |
| H0219 | Activated T-Cells, 0 hrs, | Activated T-Cells | Blood | Cell Line | | Uni-ZAP XR |
| | differentially expressed | | | | | |
| H0220 | Activated T-Cells, 4 hrs, | Activated T-Cells | Blood | Cell Line | | Uni-ZAP XR |
| | subtracted | | | | | |
| H0222 | Activated T-Cells, 8 hrs, | Activated T-Cells | Blood | Cell Line | | Uni-ZAP XR |
| | subtracted | | | | | |
| H0225 | Activated T-Cells, 12 hrs, | Activated T-Cells | Blood | Cell Line | | Uni-ZAP XR |
| | differentially expressed | | | | | |
| H0229 | Early Stage Human Brain, | Early Stage Human Brain | Brain | | | Lambda ZAP II |
| | random primed | | | | | |
| H0230 | Human Cardiomyopathy, | Human Cardiomyopathy | Heart | | disease | Uni-ZAP XR |
| | diff exp | | | | | |
| H0231 | Human Colon, subtraction | Human Colon | | | | pBluescript |
| H0234 | human colon cancer, | Human Colon Cancer, | Liver | | | pBluescript |
| | metastatic to liver, | metasticized to liver | | | | |
| | differentially expressed | | | | | |
| H0235 | Human colon cancer, | Human Colon Cancer, | Liver | | | pBluescript |
| | metaticized to liver, | metasticized to liver | | | | |
| | subtraction | | | | | |
| H0239 | Human Kidney Tumor | Human Kidney Tumor | Kidney | | disease | Uni-ZAP XR |
| H0241 | C7MCF7 cell line, | C7MCF7 Cell Line, | Breast | Cell Line | | Uni-ZAP XR |
| | estrogen treated, | estrogen treated | | | | |
| | subtraction | | | | | |
| H0242 | Human Fetal Heart, | Human Fetal Heart | Heart | | | pBluescript |
| | Differential (Fetal- | | | | | |
| | Specific) | | | | | |
| H0244 | Human 8 Week Whole | Human 8 Week Old | Embryo | | | Uni-ZAP XR |
| | Embryo, subtracted | Embryo | | | | |
| H0246 | Human Fetal Liver- | Human Fetal Liver | Liver | | | Uni-ZAP XR |
| | Enzyme subtraction | | | | | |
| H0247 | Human Membrane Bound | Human Membrane Bound | Blood | Cell Line | | Uni-ZAP XR |
| | Polysomes-Enzyme | Polysomes | | | | |
| | Subtraction | | | | | |
| H0249 | HE7, subtracted by | Human Whole 7 Week | Embryo | | | Uni-ZAP XR |
| | hybridization with E7 | Old Embryo | | | | |
| | cDNA | | | | | |
| H0250 | Human Activated | Human Monocytes | | | | Uni-ZAP XR |
| | Monocytes | | | | | |
| H0251 | Human Chondrosarcoma | Human Chondrosarcoma | Cartilage | | disease | Uni-ZAP XR |
| H0252 | Human Osteosarcoma | Human Osteosarcoma | Bone | | disease | Uni-ZAP XR |
| H0253 | Human adult testis, large | Human Adult Testis | Testis | | | Uni-ZAP XR |
| | inserts | | | | | |
| H0254 | Breast Lymph node cDNA | Breast Lymph Node | Lymph Node | | | Uni-ZAP XR |
| | library | | | | | |
| H0255 | breast lymph node CDNA | Breast Lymph Node | Lymph Node | | | Lambda ZAP II |
| | library | | | | | |
| H0256 | HL-60, unstimulated | Human HL-60 Cells, | Blood | Cell Line | | Uni-ZAP XR |
| | | unstimulated | | | | |
| H0257 | HL-60, PMA 4 H | HL-60 Cells, PMA | Blood | Cell Line | | Uni-ZAP XR |
| | | stimulated 4 H | | | | |
| H0261 | H. cerebellum, Enzyme | Human Cerebellum | Brain | | | Uni-ZAP XR |
| | subtracted | | | | | |
| H0263 | human colon cancer | Human Colon Cancer | Colon | | disease | Lambda ZAP II |
| H0264 | human tonsils | Human Tonsil | Tonsil | | | Uni-ZAP XR |
| H0265 | Activated T-Cell | T-Cells | Blood | Cell Line | | Uni-ZAP XR |
| | (12 hs)/Thiouridine | | | | | |
| | labelledEco | | | | | |
| H0266 | Human Microvascular | HMEC | Vein | Cell Line | | Lambda ZAP II |
| | Endothelial Cells, fract. A | | | | | |
| H0267 | Human Microvascular | HMEC | Vein | Cell Line | | Lambda ZAP II |
| | Endothelial Cells, fract. B | | | | | |
| H0268 | Human Umbilical Vein | HUVE Cells | Umbilical vein | Cell Line | | Lambda ZAP II |
| | Endothelial Cells, fract. A | | | | | |
| H0269 | Human Umbilical Vein | HUVE Cells | Umbilical vein | Cell Line | | Lambda ZAP II |
| | Endothelial Cells, fract. B | | | | | |
| H0270 | HPAS (human pancreas, | Human Pancreas | Pancreas | | | Uni-ZAP XR |
| | subtracted) | | | | | |
| H0271 | Human Neutrophil, | Human Neutrophil - | Blood | Cell Line | | Uni-ZAP XR |
| | Activated | Activated | | | | |
| H0272 | HUMAN TONSILS, | Human Tonsil | Tonsil | | | Uni-ZAP XR |
| | FRACTION 2 | | | | | |
| H0275 | Human Infant Adrenal | Human Infant Adrenal | Adrenal gland | | | pBluescript |
| | Gland, Subtracted | Gland | | | | |
| H0279 | K562 cells | K562 Cell line | cell line | Cell Line | | ZAP Express |
| H0280 | K562 + PMA (36 hrs) | K562 Cell line | cell line | Cell Line | | ZAP Express |
| H0284 | Human OB MG63 control | Human Osteoblastoma | Bone | Cell Line | | Uni-ZAP XR |
| | fraction I | MG63 cell line | | | | |
| H0286 | Human OB MG63 treated | Human Osteoblastoma | Bone | Cell Line | | Uni-ZAP XR |
| | (10 nM E2) fraction I | MG63 cell line | | | | |
| H0288 | Human OB HOS control | Human Osteoblastoma | Bone | Cell Line | | Uni-ZAP XR |
| | fraction I | HOS cell line | | | | |
| H0290 | Human OB HOS treated | Human Osteoblastoma | Bone | Cell Line | | Uni-ZAP XR |
| | (1 nM E2) fraction I | HOS cell line | | | | |
| H0292 | Human OB HOS treated | Human Osteoblastoma | Bone | Cell Line | | Uni-ZAP XR |
| | (10 nM E2) fraction I | HOS cell line | | | | |
| H0293 | WI 38 cells | | | | | Uni-ZAP XR |
| H0294 | Amniotic Cells - TNF | Amniotic Cells - TNF | Placenta | Cell Line | | Uni-ZAP XR |
| | induced | induced | | | | |
| H0295 | Amniotic Cells - Primary | Amniotic Cells - Primary | Placenta | Cell Line | | Uni-ZAP XR |
| | Culture | Culture | | | | |
| H0300 | CD34 positive cells (Cord | CD34 Positive Cells | Cord Blood | | | ZAP Express |
| | Blood) | | | | | |
| H0305 | CD34 positive cells (Cord | CD34 Positive Cells | Cord Blood | | | ZAP Express |
| | Blood) | | | | | |
| H0306 | CD34 depleted Buffy Coat | CD34 Depleted Buffy | Cord Blood | | | ZAP Express |
| | (Cord Blood) | Coat (Cord Blood) | | | | |
| H0309 | Human Chronic Synovitis | Synovium, Chronic | Synovium | | disease | Uni-ZAP XR |
| | | Synovitis/Osteoarthritis | | | | |
| H0310 | human caudate nucleus | Brain | Brain | | | Uni-ZAP XR |
| H0316 | HUMAN STOMACH | Human Stomach | Stomach | | | Uni-ZAP XR |
| H0318 | HUMAN B CELL | Human B Cell Lymphoma | Lymph Node | | disease | Uni-ZAP XR |
| | LYMPHOMA | | | | | |
| H0327 | human corpus colosum | Human Corpus Callosum | Brain | | | Uni-ZAP XR |
| H0328 | human ovarian cancer | Ovarian Cancer | Ovary | | disease | Uni-ZAP XR |
| H0329 | Dermatofibrosarcoma | Dermatofibrosarcoma | Skin | | disease | Uni-ZAP XR |
| | Protuberance | Protuberans | | | | |
| H0331 | Hepatocellular Tumor | Hepatocellular Tumor | Liver | | disease | Lambda ZAP II |
| H0333 | Hemangiopericytoma | Hemangiopericytoma | Blood vessel | | disease | Lambda ZAP II |
| H0334 | Kidney cancer | Kidney Cancer | Kidney | | disease | Uni-ZAP XR |
| H0339 | Duodenum | Duodenum | | | | Uni-ZAP XR |
| H0340 | Corpus Callosum | Corpus Collosum-93052 | | | | Uni-ZAP XR |
| H0341 | Bone Marrow Cell Line | Bone Marrow Cell Line | Bone Marrow | Cell Line | | Uni-ZAP XR |
| | (RS4; 11) | RS4; 11 | | | | |
| H0343 | stomach cancer (human) | Stomach Cancer - 5383A | | | disease | Uni-ZAP XR |
| | | (human) | | | | |
| H0344 | Adipose tissue (human) | Adipose - 6825A (human) | | | | Uni-ZAP XR |
| H0345 | SKIN | Skin - 4000868H | Skin | | | Uni-ZAP XR |
| H0346 | Brain-medulloblastoma | Brain (Medulloblastoma)- | Brain | | disease | Uni-ZAP XR |
| | | 9405C006R | | | | |
| H0349 | human adult liver cDNA | Human Adult Liver | Liver | | | pCMVSport 1 |
| | library | | | | | |
| H0350 | Human Fetal Liver, mixed | Human Fetal Liver, mixed | Liver | | | Uni-ZAP XR |
| | 10 & 14 week | 10&14 Week | | | | |
| H0351 | Glioblastoma | Glioblastoma | Brain | | disease | Uni-ZAP XR |
| H0352 | wilm''s tumor | Wilm''s Tumor | | | disease | Uni-ZAP XR |
| H0354 | Human Leukocytes | Human Leukocytes | Blood | Cell Line | | pCMVSport 1 |
| H0355 | Human Liver | Human Liver, normal | | | | pCMVSport 1 |
| | | Adult | | | | |
| H0356 | Human Kidney | Human Kidney | Kidney | | | pCMVSport 1 |
| H0357 | H. Normalized Fetal | Human Fetal Liver | Liver | | | Uni-ZAP XR |
| | Liver, II | | | | | |
| H0366 | L428 cell line | L428 | | | | ZAP Express |
| H0369 | H. Atrophic Endometrium | Atrophic Endometrium | | | | Uni-ZAP XR |
| | | and myometrium | | | | |
| H0370 | H. Lymph node breast | Lymph node with Met. | | | disease | Uni-ZAP XR |
| | Cancer | Breast Cancer | | | | |
| H0373 | Human Heart | Human Adult Heart | Heart | | | pCMVSport 1 |
| H0374 | Human Brain | Human Brain | | | | pCMVSport 1 |
| H0375 | Human Lung | Human Lung | | | | pCMVSport 1 |
| H0376 | Human Spleen | Human Adult Spleen | Spleen | | | pCMVSport 1 |
| H0379 | Human Tongue, frac 1 | Human Tongue | | | | pSport1 |
| H0380 | Human Tongue, frac 2 | Human Tongue | | | | pSport1 |
| H0381 | Bone Cancer | Bone Cancer | | | disease | Uni-ZAP XR |
| H0383 | Human Prostate BPH, re- | Human Prostate BPH | | | | Uni-ZAP XR |
| | excision | | | | | |
| H0388 | Human Rejected Kidney, | Human Rejected Kidney | | | disease | pBluescript |
| | 704 re-excision | | | | | |
| H0390 | Human Amygdala | Human Amygdala | | | disease | pBluescript |
| | Depression, re-excision | Depression | | | | |
| H0391 | H. Meniingima, M6 | Human Meningima | brain | | | pSport1 |
| H0392 | H. Meningima, M1 | Human Meningima | brain | | | pSport1 |
| H0393 | Fetal Liver, subtraction II | Human Fetal Liver | Liver | | | pBluescript |
| H0395 | A1-CELL LINE | Redd-Sternberg cell | | | | ZAP Express |
| H0399 | Human Kidney Cortex, re- | Human Kidney Cortex | | | | Lambda ZAP II |
| | rescue | | | | | |
| H0400 | Human Striatum | Human Brain, Striatum | Brain | | | Lambda ZAP II |
| | Depression, re-rescue | Depression | | | | |
| H0401 | Human Pituitary, | Human Pituitary | | | | pBluescript |
| | subtracted V | | | | | |
| H0402 | CD34 depleted Buffy Coat | CD34 Depleted Buffy | Cord Blood | | | ZAP Express |
| | (Cord Blood), re-excision | Coat (Cord Blood) | | | | |
| H0403 | H. Umbilical Vein | HUVE Cells | Umbilical vein | Cell Line | | Uni-ZAP XR |
| | Endothelial Cells, IL4 | | | | | |
| | induced | | | | | |
| H0405 | Human Pituitary, | Human Pituitary | | | | pBluescript |
| | subtracted VI | | | | | |
| H0406 | H Amygdala Depression, | Human Amygdala | | | | Uni-ZAP XR |
| | subtracted | Depression | | | | |
| H0408 | Human kidney Cortex, | Human Kidney Cortex | | | | pBluescript |
| | subtracted | | | | | |
| H0409 | H. Striatum Depression, | Human Brain, Striatum | Brain | | | pBluescript |
| | subtracted | Depression | | | | |
| H0411 | H Female Bladder, Adult | Human Female Adult | Bladder | | | pSport1 |
| | | Bladder | | | | |
| H0412 | Human umbilical vein | HUVE Cells | Umbilical vein | Cell Line | | pSport1 |
| | endothelial cells, IL-4 | | | | | |
| | induced | | | | | |
| H0413 | Human Umbilical Vein | HUVE Cells | Umbilical vein | Cell Line | | pSport1 |
| | Endothelial Cells, | | | | | |
| | uninduced | | | | | |
| H0414 | Ovarian Tumor I, OV5232 | Ovarian Tumor, OV5232 | Ovary | | disease | pSport1 |
| H0415 | H. Ovarian Tumor, II, | Ovarian Tumor, OV5232 | Ovary | | disease | pCMVSport 2.0 |
| | OV5232 | | | | | |
| H0416 | Human Neutrophils, | Human Neutrophil - | Blood | Cell Line | | pBluescript |
| | Activated, re-excision | Activated | | | | |
| H0417 | Human Pituitary, | Human Pituitary | | | | pBluescript |
| | subtracted VIII | | | | | |
| H0419 | Bone Cancer, re-excision | Bone Cancer | | | | Uni-ZAP XR |
| H0421 | Human Bone Marrow, re- | Bone Marrow | | | | pBluescript |
| | excision | | | | | |
| H0422 | T-Cell PHA 16 hrs | T-Cells | Blood | Cell Line | | pSport1 |
| H0423 | T-Cell PHA 24 hrs | T-Cells | Blood | Cell Line | | pSport1 |
| H0424 | Human Pituitary, subt IX | Human Pituitary | | | | pBluescript |
| H0427 | Human Adipose | Human Adipose, left | | | | pSport1 |
| | | hiplipoma | | | | |
| H0428 | Human Ovary | Human Ovary Tumor | Ovary | | | pSport1 |
| H0429 | K562 + PMA (36 hrs), re- | K562 Cell line | cell line | Cell Line | | ZAP Express |
| | excision | | | | | |
| H0431 | H. Kidney Medulla, re- | Kidney medulla | Kidney | | | pBluescript |
| | excision | | | | | |
| H0433 | Human Umbilical Vein | HUVE Cells | Umbilical vein | Cell Line | | pBluescript |
| | Endothelial cells, frac B, | | | | | |
| | re-excision | | | | | |
| H0435 | Ovarian Tumor 10-3-95 | Ovarian Tumor, | Ovary | | | pCMVSport 2.0 |
| | | OV350721 | | | | |
| H0436 | Resting T-Cell Library, II | T-Cells | Blood | Cell Line | | pSport1 |
| H0437 | H Umbilical Vein | HUVE Cells | Umbilical vein | Cell Line | | Lambda ZAP II |
| | Endothelial Cells, frac A, | | | | | |
| | re-excision | | | | | |
| H0438 | H. Whole Brain #2, re- | Human Whole Brain #2 | | | | ZAP Express |
| | excision | | | | | |
| H0439 | Human Eosinophils | Eosinophils | | | | pBluescript |
| H0441 | H. Kidney Cortex, | Kidney cortex | Kidney | | | pBluescript |
| | subtracted | | | | | |
| H0443 | H. Adipose, subtracted | Human Adipose, left | | | | pSport1 |
| | | hiplipoma | | | | |
| H0444 | Spleen metastic melanoma | Spleen, Metastic | Spleen | | disease | pSport1 |
| | | malignant melanoma | | | | |
| H0445 | Spleen, Chronic | Human Spleen, CLL | Spleen | | disease | pSport1 |
| | lymphocytic leukemia | | | | | |
| H0449 | CD34+ cell, I | CD34 positive cells | | | | pSport1 |
| H0450 | CD34+cells, II | CD34 positive cells | | | | pCMVSport 2.0 |
| H0453 | H. Kidney Pyramid, | Kidney pyramids | Kidney | | | pBluescript |
| | subtracted | | | | | |
| H0455 | H. Striatum Depression, | Human Brain, Striatum | Brain | | | pBluescript |
| | subt | Depression | | | | |
| H0457 | Human Eosinophils | Human Eosinophils | | | | pSport1 |
| H0458 | CD34+ cell, I, frac II | CD34 positive cells | | | | pSport1 |
| H0459 | CD34+cells, II, | CD34 positive cells | | | | pCMVSport 2.0 |
| | FRACTION 2 | | | | | |
| H0461 | H. Kidney Medulla, | Kidney medulla | Kidney | | | pBluescript |
| | subtracted | | | | | |
| H0477 | Human Tonsil, Lib 3 | Human Tonsil | Tonsil | | | pSport1 |
| H0478 | Salivary Gland, Lib 2 | Human Salivary Gland | Salivary gland | | | pSport1 |
| H0479 | Salivary Gland, Lib 3 | Human Salivary Gland | Salivary gland | | | pSport1 |
| H0483 | Breast Cancer cell line, | Breast Cancer Cell line, | | | | pSport1 |
| | MDA 36 | MDA 36 | | | | |
| H0484 | Breast Cancer Cell line, | Breast Cancer Cell line, | | | | pSport1 |
| | angiogenic | Angiogenic, 36T3 | | | | |
| H0485 | Hodgkin''s Lymphoma I | Hodgkin''s Lymphoma I | | | disease | pCMVSport 2.0 |
| H0486 | Hodgkin''s Lymphoma II | Hodgkin''s Lymphoma II | | | disease | pCMVSport 2.0 |
| H0487 | Human Tonsils, lib I | Human Tonsils | | | | pCMVSport 2.0 |
| H0488 | Human Tonsils, Lib 2 | Human Tonsils | | | | pCMVSport 2.0 |
| H0492 | HL-60, RA 4 h, Subtracted | HL-60 Cells, RA | Blood | Cell Line | | Uni-ZAP XR |
| | | stimulated for 4 H | | | | |
| H0494 | Keratinocyte | Keratinocyte | | | | pCMVSport 2.0 |
| H0497 | HEL cell line | HEL cell line | | HEL | | pSport1 |
| | | | | 92.1.7 | | |
| H0505 | Human Astrocyte | Human Astrocyte | | | | pSport1 |
| H0506 | Ulcerative Colitis | Colon | Colon | | | pSport1 |
| H0509 | Liver, Hepatoma | Human Liver, Hepatoma, | Liver | | disease | pCMVSport 3.0 |
| | | patient 8 | | | | |
| H0510 | Human Liver, normal | Human Liver, normal, | Liver | | | pCMVSport 3.0 |
| | | Patient # 8 | | | | |
| H0518 | pBMC stimulated w/ poly | pBMC stimulated with | | | | pCMVSport 3.0 |
| | I/C | poly I/C | | | | |
| H0519 | NTERA2, control | NTERA2, | | | | pCMVSport 3.0 |
| | | Teratocarcinoma cell line | | | | |
| H0520 | NTERA2 + retinoic acid, | NTERA2, | | | | pSport1 |
| | 14 days | Teratocarcinoma cell line | | | | |
| H0521 | Primary Dendritic Cells, | Primary Dendritic cells | | | | pCMVSport 3.0 |
| | lib 1 | | | | | |
| H0522 | Primary Dendritic | Primary Dendritic cells | | | | pCMVSport 3.0 |
| | cells, frac 2 | | | | | |
| H0525 | PCR, pBMC I/C treated | pBMC stimulated with | | | | PCRII |
| | | poly I/C | | | | |
| H0528 | Poly[I]/Poly[C] Normal | Poly[I]/Poly[C] Normal | | | | pCMVSport 3.0 |
| | Lung Fibroblasts | Lung Fibroblasts | | | | |
| H0529 | Myoloid Progenitor Cell | TF-1 Cell Line; Myoloid | | | | pCMVSport 3.0 |
| | Line | progenitor cell line | | | | |
| H0530 | Human Dermal | Human Dermal | | | | pSport1 |
| | Endothelial | Endothelial Cells; | | | | |
| | Cells, untreated | untreated | | | | |
| H0535 | Human ovary tumor cell | Ovarian Tumor, | Ovary | | disease | pSport1 |
| | OV350721 | OV350721 | | | | |
| H0538 | Merkel Cells | Merkel cells | Lymph node | | | pSport1 |
| H0539 | Pancreas Islet Cell Tumor | Pancreas Islet Cell | Pancreas | | disease | pSport1 |
| | | Tumour | | | | |
| H0540 | Skin, burned | Skin, leg burned | Skin | | | pSport1 |
| H0542 | T Cell helper I | Helper T cell | | | | pCMVSport 3.0 |
| H0543 | T cell helper II | Helper T cell | | | | pCMVSport 3.0 |
| H0544 | Human endometrial | Human endometrial | | | | pCMVSport 3.0 |
| | stromal cells | stromal cells | | | | |
| H0545 | Human endometrial | Human endometrial | | | | pCMVSport 3.0 |
| | stromal cells-treated with | stromal cells-treated with | | | | |
| | progesterone | proge | | | | |
| H0546 | Human endometrial | Human endometrial | | | | pCMVSport 3.0 |
| | stromal cells-treated with | stromal cells-treated with | | | | |
| | estradiol | estra | | | | |
| H0547 | NTERA2 teratocarcinoma | NTERA2, | | | | pSport1 |
| | cell line + retinoic acid (14 | Teratocarcinoma cell line | | | | |
| | days) | | | | | |
| H0549 | H. Epididiymus, caput & | Human Epididiymus, | | | | Uni-ZAP XR |
| | corpus | caput and corpus | | | | |
| H0550 | H. Epididiymus, cauda | Human Epididiymus, | | | | Uni-ZAP XR |
| | | cauda | | | | |
| H0551 | Human Thymus Stromal | Human Thymus Stromal | | | | pCMVSport 3.0 |
| | Cells | Cells | | | | |
| H0553 | Human Placenta | Human Placenta | | | | pCMVSport 3.0 |
| H0555 | Rejected Kidney, lib 4 | Human Rejected Kidney | Kidney | | disease | pCMVSport 3.0 |
| H0556 | Activated T- | T-Cells | Blood | Cell Line | | Uni-ZAP XR |
| | cell(12 h)/Thiouridine-re- | | | | | |
| | excision | | | | | |
| H0559 | HL-60, PMA 4 H, re- | HL-60 Cells, PMA | Blood | Cell Line | | Uni-ZAP XR |
| | excision | stimulated 4 H | | | | |
| H0560 | KMH2 | KMH2 | | | | pCMVSport 3.0 |
| H0561 | L428 | L428 | | | | pCMVSport 3.0 |
| H0563 | Human Fetal Brain, | Human Fetal Brain | | | | pCMVSport 2.0 |
| | normalized 50021F | | | | | |
| H0565 | HUman Fetal Brain, | Human Fetal Brain | | | | pCMVSport 2.0 |
| | normalized 100024F | | | | | |
| H0566 | Human Fetal | Human Fetal Brain | | | | pCMVSport 2.0 |
| | Brain, normalized c50F | | | | | |
| H0569 | Human Fetal Brain, | Human Fetal Brain | | | | pCMVSport 2.0 |
| | normalized CO | | | | | |
| H0570 | Human Fetal Brain, | Human Fetal Brain | | | | pCMVSport 2.0 |
| | normalized C500H | | | | | |
| H0571 | Human Fetal Brain, | Human Fetal Brain | | | | pCMVSport 2.0 |
| | normalized C500HE | | | | | |
| H0572 | Human Fetal Brain, | Human Fetal Brain | | | | pCMVSport 2.0 |
| | normalized AC5002 | | | | | |
| H0574 | Hepatocellular Tumor; re- | Hepatocellular Tumor | Liver | | disease | Lambda ZAP II |
| | excision | | | | | |
| H0575 | Human Adult | Human Adult Pulmonary | Lung | | | Uni-ZAP XR |
| | Pulmonary; re-excision | | | | | |
| H0576 | Resting T-Cell; re- | T-Cells | Blood | Cell Line | | Lambda ZAP II |
| | excision | | | | | |
| H0580 | Dendritic cells, pooled | Pooled dendritic cells | | | | pCMVSport 3.0 |
| H0581 | Human Bone Marrow, | Human Bone Marrow | Bone Marrow | | | pCMVSport 3.0 |
| | treated | | | | | |
| H0583 | B Cell lymphoma | B Cell Lymphoma | B Cell | | disease | pCMVSport 3.0 |
| H0584 | Activated T-cells, 24 hrs, | Activated T-Cells | Blood | Cell Line | | Uni-ZAP XR |
| | re-excision | | | | | |
| H0585 | Activated T-Cells, 12 hrs, | Activated T-Cells | Blood | Cell Line | | Uni-ZAP XR |
| | re-excision | | | | | |
| H0586 | Healing groin wound, 6.5 | healing groin wound, 6.5 | groin | | disease | pCMVSport 3.0 |
| | hours post incision | hours post incision - 2/ | | | | |
| H0587 | Healing groin wound; 7.5 | Groin-Feb. 19, 1997 | groin | | disease | pCMVSport 3.0 |
| | hours post incision | | | | | |
| H0589 | CD34 positive cells (cord | CD34 Positive Cells | Cord Blood | | | ZAP Express |
| | blood), re-ex | | | | | |
| H0590 | Human adult small | Human Adult Small | Small Int. | | | Uni-ZAP XR |
| | intestine, re-excision | Intestine | | | | |
| H0591 | Human T-cell | T-Cell Lymphoma | T-Cell | | disease | Uni-ZAP XR |
| | lymphoma; re-excision | | | | | |
| H0592 | Healing groin wound - | HGS wound healing | | | disease | pCMVSport 3.0 |
| | zero hr post-incision | project; abdomen | | | | |
| | (control) | | | | | |
| H0593 | Olfactory | Olfactory epithelium from | | | | pCMVSport 3.0 |
| | epithelium; nasalcavity | roof of left nasal cacit | | | | |
| H0594 | Human Lung Cancer; re- | Human Lung Cancer | Lung | | disease | Lambda ZAP II |
| | excision | | | | | |
| H0595 | Stomach cancer | Stomach Cancer - 5383A | | | disease | Uni-ZAP XR |
| | (human); re-excision | (human) | | | | |
| H0596 | Human Colon Cancer; re- | Human Colon Cancer | Colon | | | Lambda ZAP II |
| | excision | | | | | |
| H0597 | Human Colon; re-excision | Human Colon | | | | Lambda ZAP II |
| H0598 | Human Stomach; re- | Human Stomach | Stomach | | | Uni-ZAP XR |
| | excision | | | | | |
| H0599 | Human Adult Heart; re- | Human Adult Heart | Heart | | | Uni-ZAP XR |
| | excision | | | | | |
| H0600 | Healing Abdomen | Abdomen | | | disease | pCMVSport 3.0 |
| | wound; 70&90 min post | | | | | |
| | incision | | | | | |
| H0601 | Healing Abdomen | Abdomen | | | disease | pCMVSport 3.0 |
| | Wound; 15 days post | | | | | |
| | incision | | | | | |
| H0602 | Healing Abdomen | Abdomen | | | disease | pCMVSport 3.0 |
| | Wound; 21&29 days post | | | | | |
| | incision | | | | | |
| H0604 | Human Pituitary, re- | Human Pituitary | | | | pBluescript |
| | excision | | | | | |
| H0606 | Human Primary Breast | Human Primary Breast | Breast | | disease | Uni-ZAP XR |
| | Cancer; re-excision | Cancer | | | | |
| H0607 | H. Leukocytes, normalized | H. Leukocytes | | | | pCMVSport 1 |
| | cot 50A3 | | | | | |
| H0609 | H. Leukocytes, | H. Leukocytes | | | | pCMVSport 1 |
| | normalized cot >500A | | | | | |
| H0611 | H. Leukocytes, | H. Leukocytes | | | | pCMVSport 1 |
| | normalized cot 500 B | | | | | |
| H0613 | H. Leukocytes, normalized | H. Leukocytes | | | | pCMVSport 1 |
| | cot 5B | | | | | |
| H0615 | Human Ovarian Cancer | Ovarian Cancer | Ovary | | disease | Uni-ZAP XR |
| | Reexcision | | | | | |
| H0616 | Human Testes, Reexcision | Human Testes | Testis | | | Uni-ZAP XR |
| H0617 | Human Primary Breast | Human Primary Breast | Breast | | disease | Uni-ZAP XR |
| | Cancer Reexcision | Cancer | | | | |
| H0618 | Human Adult Testes, | Human Adult Testis | Testis | | | Uni-ZAP XR |
| | Large Inserts, Reexcision | | | | | |
| H0619 | Fetal Heart | Human Fetal Heart | Heart | | | Uni-ZAP XR |
| H0620 | Human Fetal Kidney; | Human Fetal Kidney | Kidney | | | Uni-ZAP XR |
| | Reexcision | | | | | |
| H0622 | Human Pancreas Tumor; | Human Pancreas Tumor | Pancreas | | disease | Uni-ZAP XR |
| | Reexcision | | | | | |
| H0623 | Human Umbilical Vein; | Human Umbilical Vein | Umbilical vein | | | Uni-ZAP XR |
| | Reexcision | Endothelial Cells | | | | |
| H0624 | 12 Week Early Stage | Twelve Week Old Early | Embryo | | | Uni-ZAP XR |
| | Human II; Reexcision | Stage Human | | | | |
| H0625 | Ku 812F Basophils Line | Ku 812F Basophils | | | | pSport1 |
| H0626 | Saos2 Cells; Untreated | Saos2 Cell Line; | | | | pSport1 |
| | | Untreated | | | | |
| H0627 | Saos2 Cells; Vitamin D3 | Saos2 Cell Line; Vitamin | | | | pSport1 |
| | Treated | D3 Treated | | | | |
| H0628 | Human Pre-Differentiated | Human Pre-Differentiated | | | | Uni-ZAP XR |
| | Adipocytes | Adipocytes | | | | |
| H0630 | Human | Human Normalized | | | | pCMVSport 1 |
| | Leukocytes, normalized | leukocyte | | | | |
| | control #4 | | | | | |
| H0631 | Saos2, Dexamethosome | Saos2 Cell Line; | | | | pSport1 |
| | Treated | Dexamethosome Treated | | | | |
| H0632 | Hepatocellular Tumor; re- | Hepatocellular Tumor | Liver | | | Lambda ZAP II |
| | excision | | | | | |
| H0633 | Lung Carcinoma A549 | TNFalpha activated A549- | | | disease | pSport1 |
| | TNFalpha activated | Lung Carcinoma | | | | |
| H0634 | Human Testes Tumor, re- | Human Testes Tumor | Testis | | disease | Uni-ZAP XR |
| | excision | | | | | |
| H0635 | Human Activated T-Cells, | Activated T-Cells | Blood | Cell Line | | Uni-ZAP XR |
| | re-excision | | | | | |
| H0637 | Dendritic Cells From | Dentritic cells from CD34 | | | | pSport1 |
| | CD34 Cells | cells | | | | |
| H0638 | CD40 activated monocyte | CD40 activated monocyte | | | | pSport1 |
| | dendridic cells | dendridic cells | | | | |
| H0640 | Ficolled Human Stromal | Ficolled Human Stromal | | | | Other |
| | Cells, Untreated | Cells, Untreated | | | | |
| H0641 | LPS activated derived | LPS activated monocyte | | | | pSport1 |
| | dendritic cells | derived dendritic cells | | | | |
| H0642 | Hep G2 Cells, lambda | Hep G2 Cells | | | | Other |
| | library | | | | | |
| H0643 | Hep G2 Cells, PCR library | Hep G2 Cells | | | | Other |
| H0644 | Human Placenta (re- | Human Placenta | Placenta | | | Uni-ZAP XR |
| | excision) | | | | | |
| H0645 | Fetal Heart, re-excision | Human Fetal Heart | Heart | | | Uni-ZAP XR |
| H0646 | Lung, Cancer (4005313 | Metastatic squamous cell | | | | pSport1 |
| | A3): Invasive Poorly | lung carcinoma, poorly di | | | | |
| | Differentiated Lung | | | | | |
| | Adenocarcinoma, | | | | | |
| H0647 | Lung, Cancer (4005163 | Invasive poorly | | | disease | pSport1 |
| | B7): Invasive, Poorly Diff. | differentiated lung | | | | |
| | Adenocarcinoma, | adenocarcinoma | | | | |
| | Metastatic | | | | | |
| H0648 | Ovary, Cancer: (4004562 | Papillary Cstic neoplasm | | | disease | pSport1 |
| | B6) Papillary Serous | of low malignant potentia | | | | |
| | Cystic Neoplasm, Low | | | | | |
| | Malignant Pot | | | | | |
| H0649 | Lung, Normal: (4005313 | Normal Lung | | | | pSport1 |
| | B1) | | | | | |
| H0650 | B-Cells | B-Cells | | | | pCMVSport 3.0 |
| H0651 | Ovary, Normal: | Normal Ovary | | | | pSport1 |
| | (9805C040R) | | | | | |
| H0652 | Lung, Normal: (4005313 | Normal Lung | | | | pSport1 |
| | B1) | | | | | |
| H0653 | Stromal Cells | Stromal Cells | | | | pSport1 |
| H0656 | B-cells (unstimulated) | B-cells (unstimulated) | | | | pSport1 |
| H0657 | B-cells (stimulated) | B-cells (stimulated) | | | | PSport1 |
| H0658 | Ovary, Cancer | 9809C332-Poorly | Ovary & | | disease | pSport1 |
| | (9809C332): Poorly | differentiate | Fallopian | | | |
| | differentiated | | Tubes | | | |
| | adenocarcinoma | | | | | |
| H0659 | Ovary, Cancer | Grade II Papillary | Ovary | | disease | pSport1 |
| | (15395A1F): Grade II | Carcinoma, Ovary | | | | |
| | Papillary Carcinoma | | | | | |
| H0660 | Ovary, Cancer: | Poorly differentiated | | | disease | pSport1 |
| | (15799A1F) Poorly | carcinoma, ovary | | | | |
| | differentiated carcinoma | | | | | |
| H0661 | Breast, Cancer: (4004943 | Breast cancer | | | disease | pSport1 |
| | A5) | | | | | |
| H0662 | Breast, Normal: | Normal Breast - | Breast | | | pSport1 |
| | (4005522B2) | #4005522(B2) | | | | |
| H0663 | Breast, Cancer: (4005522 | Breast Cancer - | Breast | | disease | pSport1 |
| | A2) | #4005522(A2) | | | | |
| H0664 | Breast, Cancer: | Breast Cancer | Breast | | disease | pSport1 |
| | (9806C012R) | | | | | |
| H0665 | Stromal cells 3.88 | Stromal cells 3.88 | | | | pSport |
| H0666 | Ovary, Cancer: (4004332 | Ovarian Cancer, Sample | | | disease | pSport1 |
| | A2) | #4004332A2 | | | | |
| H0667 | Stromal cells(HBM3.18) | Stromal cell(HBM 3.18) | | | | pSport |
| H0668 | stromal cell clone 2.5 | stromal cell clone 2.5 | | | | pSport1 |
| H0670 | Ovary, Cancer(4004650 | Ovarian Cancer - | | | | pSport1 |
| | A3): Well-Differentiated | 4004650A3 | | | | |
| | Micropapillary Serous | | | | | |
| | Carcinoma | | | | | |
| H0671 | Breast, Cancer: | Breast Cancer-Sample # | | | | pSport1 |
| | (9802C02OE) | 9802C02OE | | | | |
| H0672 | Ovary, Cancer: (4004576 | Ovarian | Ovary | | | pSport1 |
| | A8) | Cancer(4004576A8) | | | | |
| H0673 | Human Prostate Cancer, | Human Prostate Cancer, | Prostate | | | Uni-ZAP XR |
| | Stage B2; re-excision | stage B2 | | | | |
| H0674 | Human Prostate Cancer, | Human Prostate Cancer, | Prostate | | | Uni-ZAP XR |
| | Stage C; re-excission | stage C | | | | |
| H0675 | Colon, Cancer: | Colon Cancer | | | | pCMVSport 3.0 |
| | (9808C064R) | 9808C064R | | | | |
| H0676 | Colon, Cancer: | Colon Cancer | | | | pCMVSport 3.0 |
| | (9808C064R)-total RNA | 9808C064R | | | | |
| H0677 | TNFR degenerate oligo | B-Cells | | | | PCRII |
| H0682 | Serous Papillary | serous papillary | | | | pCMVSport 3.0 |
| | Adenocarcinoma | adenocarcinoma | | | | |
| | | (9606G304SPA3B) | | | | |
| H0683 | Ovarian Serous Papillary | Serous papillary | | | | pCMVSport 3.0 |
| | Adenocarcinoma | adenocarcinoma, stage 3C | | | | |
| | | (9804G01 | | | | |
| H0684 | Serous Papillary | Ovarian Cancer- | Ovaries | | | pCMVSport 3.0 |
| | Adenocarcinoma | 9810G606 | | | | |
| H0685 | Adenocarcinoma of | Adenocarcinoma of | | | | pCMVSport 3.0 |
| | Ovary, Human Cell Line, | Ovary, Human Cell Line, | | | | |
| | # OVCAR-3 | # OVCAR- | | | | |
| H0686 | Adenocarcinoma of | Adenocarcinoma of | | | | pCMVSport 3.0 |
| | Ovary, Human Cell Line | Ovary, Human Cell Line, | | | | |
| | | # SW-626 | | | | |
| H0687 | Human normal | Human normal | Ovary | | | pCMVSport 3.0 |
| | ovary(#9610G215) | ovary(#9610G215) | | | | |
| H0688 | Human Ovarian | Human Ovarian | | | | pCMVSport 3.0 |
| | Cancer(#9807G017) | cancer(#9807G017), mRN | | | | |
| | | A from Maura Ru | | | | |
| H0689 | Ovarian Cancer | Ovarian Cancer, | | | | pCMVSport 3.0 |
| | | #9806G019 | | | | |
| H0690 | Ovarian Cancer, # | Ovarian Cancer, | | | | pCMVSport 3.0 |
| | 9702G001 | #9702G001 | | | | |
| H0691 | Normal Ovary, | normal ovary, #9710G208 | | | | pCMVSport 3.0 |
| | #9710G208 | | | | | |
| H0692 | BLyS Receptor from | B Cell Lymphoma | B Cell | | | pCMVSport 3.0 |
| | Expression Cloning | | | | | |
| H0693 | Normal Prostate | Normal Prostate Tissue # | | | | pCMVSport 3.0 |
| | #ODQ3958EN | ODQ3958EN | | | | |
| H0694 | Prostate gland | Prostate gland, | prostate gland | | | pCMVSport 3.0 |
| | adenocarcinoma | adenocarcinoma, | | | | |
| | | mod/diff, gleason | | | | |
| N0006 | Human Fetal Brain | Human Fetal Brain | | | | |
| S0001 | Brain frontal cortex | Brain frontal cortex | Brain | | | Lambda ZAP II |
| S0002 | Monocyte activated | Monocyte-activated | blood | Cell Line | | Uni-ZAP XR |
| S0003 | Human Osteoclastoma | Osteoclastoma | bone | | disease | Uni-ZAP XR |
| S0005 | Heart | Heart-left ventricle | Heart | | | pCDNA |
| S0007 | Early Stage Human Brain | Human Fetal Brain | | | | Uni-ZAP XR |
| S0010 | Human Amygdala | Amygdala | | | | Uni-ZAP XR |
| S0011 | STROMAL - | Osteoclastoma | bone | | disease | Uni-ZAP XR |
| | OSTEOCLASTOMA | | | | | |
| S0013 | Prostate | Prostate | prostate | | | Uni-ZAP XR |
| S0014 | Kidney Cortex | Kidney cortex | Kidney | | | Uni-ZAP XR |
| S0015 | Kidney medulla | Kidney medulla | Kidney | | | Uni-ZAP XR |
| S0016 | Kidney Pyramids | Kidney pyramids | Kidney | | | Uni-ZAP XR |
| S0022 | Human Osteoclastoma | Osteoclastoma Stromal | | | | Uni-ZAP XR |
| | Stromal Cells - | Cells | | | | |
| | unamplified | | | | | |
| S0024 | Human Kidney Medulla - | Human Kidney Medulla | | | | |
| | unamplified | | | | | |
| S0026 | Stromal cell TF274 | stromal cell | Bone marrow | Cell Line | | Uni-ZAP XR |
| S0027 | Smooth muscle, serum | Smooth muscle | Pulmanary | Cell Line | | Uni-ZAP XR |
| | treated | | artery | | | |
| S0028 | Smooth muscle, control | Smooth muscle | Pulmanary | Cell Line | | Uni-ZAP XR |
| | | | artery | | | |
| S0029 | brain stem | Brain stem | brain | | | Uni-ZAP XR |
| S0031 | Spinal cord | Spinal cord | spinal cord | | | Uni-ZAP XR |
| S0032 | Smooth muscle-ILb | Smooth muscle | Pulmanary | Cell Line | | Uni-ZAP XR |
| | induced | | artery | | | |
| S0036 | Human Substantia Nigra | Human Substantia Nigra | | | | Uni-ZAP XR |
| S0037 | Smooth muscle, IL1b | Smooth muscle | Pulmanary | Cell Line | | Uni-ZAP XR |
| | induced | | artery | | | |
| S0038 | Human Whole Brain #2 - | Human Whole Brain #2 | | | | ZAP Express |
| | Oligo dT >1.5 Kb | | | | | |
| S0039 | Hypothalamus | Hypothalamus | Brain | | | Uni-ZAP XR |
| S0040 | Adipocytes | Human Adipocytes from | | | | Uni-ZAP XR |
| | | Osteoclastoma | | | | |
| S0042 | Testes | Human Testes | | | | ZAP Express |
| S0044 | Prostate BPH | prostate BPH | Prostate | | disease | Uni-ZAP XR |
| S0045 | Endothelial cells-control | Endothelial cell | endothelial | Cell Line | | Uni-ZAP XR |
| | | | cell-lung | | | |
| S0046 | Endothelial-induced | Endothelial cell | endothelial | Cell Line | | Uni-ZAP XR |
| | | | cell-lung | | | |
| S0049 | Human Brain, Striatum | Human Brain, Striatum | | | | Uni-ZAP XR |
| S0050 | Human Frontal Cortex, | Human Frontal Cortex, | | | disease | Uni-ZAP XR |
| | Schizophrenia | Schizophrenia | | | | |
| S0051 | Human | Human Hypothalamus, | | | disease | Uni-ZAP XR |
| | Hypothalmus, Schizophrenia | Schizophrenia | | | | |
| S0052 | neutrophils control | human neutrophils | blood | Cell Line | | Uni-ZAP XR |
| S0053 | Neutrophils IL-1 and LPS | human neutrophil induced | blood | Cell Line | | Uni-ZAP XR |
| | induced | | | | | |
| S0106 | STRIATUM | | BRAIN | | disease | Uni-ZAP XR |
| | DEPRESSION | | | | | |
| S0110 | Brain Amygdala | | Brain | | disease | Uni-ZAP XR |
| | Depression | | | | | |
| S0112 | Hypothalamus | | Brain | | | Uni-ZAP XR |
| S0114 | Anergic T-cell | Anergic T-cell | | Cell Line | | Uni-ZAP XR |
| S0116 | Bone marrow | Bone marrow | Bone marrow | | | Uni-ZAP XR |
| S0118 | Smooth muscle control 2 | Smooth muscle | Pulmanary | Cell Line | | Uni-ZAP XR |
| | | | artery | | | |
| S0124 | Smooth muscle-edited A | Smooth muscle | Pulmanary | Cell Line | | Uni-ZAP XR |
| | | | artery | | | |
| S0126 | Osteoblasts | Osteoblasts | Knee | Cell Line | | Uni-ZAP XR |
| S0132 | Epithelial-TNFa and INF | Airway Epithelial | | | | Uni-ZAP XR |
| | induced | | | | | |
| S0134 | Apoptotic T-cell | apoptotic cells | | Cell Line | | Uni-ZAP XR |
| S0136 | PERM TF274 | stromal cell | Bone marrow | Cell Line | | Lambda ZAP II |
| S0140 | eosinophil-IL5 induced | eosinophil | lung | Cell Line | | Uni-ZAP XR |
| S0142 | Macrophage-oxLDL | macrophage-oxidized | blood | Cell Line | | Uni-ZAP XR |
| | | LDL treated | | | | |
| S0144 | Macrophage (GM-CSF | Macrophage (GM-CSF | | | | Uni-ZAP XR |
| | treated) | treated) | | | | |
| S0146 | prostate-edited | prostate BPH | Prostate | | | Uni-ZAP XR |
| S0148 | Normal Prostate | Prostate | prostate | | | Uni-ZAP XR |
| S0150 | LNCAP prostate cell line | LNCAP Cell Line | Prostate | Cell Line | | Uni-ZAP XR |
| S0152 | PC3 Prostate cell line | PC3 prostate cell line | | | | Uni-ZAP XR |
| S0174 | Prostate-BPH subtracted II | Human Prostate BPH | | | | pBluescript |
| S0176 | Prostate, normal, | Prostate | prostate | | | Uni-ZAP XR |
| | subtraction I | | | | | |
| S0182 | Human B Cell 8866 | Human B-Cell 8866 | | | | Uni-ZAP XR |
| S0188 | Prostate, BPH, Lib 2 | Human Prostate BPH | | | disease | pSport1 |
| S0190 | Prostate BPH, Lib 2, | Human Prostate BPH | | | | pSport1 |
| | subtracted | | | | | |
| S0192 | Synovial Fibroblasts | Synovial Fibroblasts | | | | pSport1 |
| | (control) | | | | | |
| S0194 | Synovial hypoxia | Synovial Fibroblasts | | | | pSport1 |
| S0196 | Synovial IL-1/TNF | Synovial Fibroblasts | | | | pSport1 |
| | stimulated | | | | | |
| S0206 | Smooth Muscle-HASTE | Smooth muscle | Pulmanary | Cell Line | | pBluescript |
| | normalized | | artery | | | |
| S0208 | Messangial cell, frac 1 | Messangial cell | | | | pSport1 |
| S0210 | Messangial cell, frac 2 | Messangial cell | | | | pSport1 |
| S0212 | Bone Marrow Stromal | Bone Marrow Stromal | | | | pSport1 |
| | Cell, untreated | Cell, untreated | | | | |
| S0214 | Human Osteoclastoma, re- | Osteoclastoma | bone | | disease | Uni-ZAP XR |
| | excision | | | | | |
| S0216 | Neutrophils IL-1 and LPS | human neutrophil induced | blood | Cell Line | | Uni-ZAP XR |
| | induced | | | | | |
| S0218 | Apoptotic T-cell, re- | apoptotic cells | | Cell Line | | Uni-ZAP XR |
| | excision | | | | | |
| S0220 | H. hypothalamus, frac | Hypothalamus | Brain | | | ZAP Express |
| | A; re-excision | | | | | |
| S0222 | H. Frontal | H. Brain, Frontal Cortex, | Brain | | disease | Uni-ZAP XR |
| | cortex, epileptic; re- | Epileptic | | | | |
| | excision | | | | | |
| S0242 | Synovial Fibroblasts | Synovial Fibroblasts | | | | pSport1 |
| | (Il1/TNF), subt | | | | | |
| S0250 | Human Osteoblasts II | Human Osteoblasts | Femur | | disease | pCMVSport 2.0 |
| S0260 | Spinal Cord, re-excision | Spinal cord | spinal cord | | | Uni-ZAP XR |
| S0276 | Synovial hypoxia-RSF | Synovial fobroblasts | Synovial tissue | | | pSport1 |
| | subtracted | (rheumatoid) | | | | |
| S0278 | H Macrophage (GM-CSF | Macrophage (GM-CSF | | | | Uni-ZAP XR |
| | treated), re-excision | treated) | | | | |
| S0280 | Human Adipose Tissue, | Human Adipose Tissue | | | | Uni-ZAP XR |
| | re-excision | | | | | |
| S0282 | Brain Frontal Cortex, re- | Brain frontal cortex | Brain | | | Lambda ZAP II |
| | excision | | | | | |
| S0292 | Osteoarthritis (OA-4) | Human Osteoarthritic | Bone | | disease | pSport1 |
| | | Cartilage | | | | |
| S0294 | Larynx tumor | Larynx tumor | Larynx, vocal | | disease | pSport1 |
| | | | cord | | | |
| S0296 | Normal lung | Normal lung | Lung | | | pSport1 |
| S0298 | Bone marrow | Bone marrow | Bone marrow | | | pSport1 |
| | stroma, treated | stroma, treatedSB | | | | |
| S0300 | Frontal lobe, dementia; re- | Frontal Lobe | Brain | | | Uni-ZAP XR |
| | excision | dementia/Alzheimer''s | | | | |
| S0306 | Larynx normal #10 261-273 | Larynx normal | | | | pSport1 |
| S0308 | Spleen/normal | Spleen normal | | | | pSport1 |
| S0310 | Normal trachea | Normal trachea | | | | pSport1 |
| S0312 | Human | Human osteoarthritic | | | disease | pSport1 |
| | osteoarthritic; fraction II | cartilage | | | | |
| S0314 | Human | Human osteoarthritic | | | disease | pSport1 |
| | osteoarthritis; fraction I | cartilage | | | | |
| S0316 | Human Normal | Human Normal Cartilage | | | | pSport1 |
| | Cartilage, Fraction I | | | | | |
| S0318 | Human Normal Cartilage | Human Normal Cartilage | | | | pSport1 |
| | Fraction II | | | | | |
| S0322 | Siebben Polyposis | Siebben Polyposis | | | | pSport1 |
| S0328 | Palate carcinoma | Palate carcinoma | Uvula | | disease | pSport1 |
| S0330 | Palate normal | Palate normal | Uvula | | | pSport1 |
| S0332 | Pharynx carcinoma | Pharynx carcinoma | Hypopharynx | | | pSport1 |
| S0334 | Human Normal Cartilage | Human Normal Cartilage | | | | pSport1 |
| | Fraction III | | | | | |
| S0338 | Human Osteoarthritic | Human osteoarthritic | | | disease | pSport1 |
| | Cartilage Fraction III | cartilage | | | | |
| S0340 | Human Osteoarthritic | Human osteoarthritic | | | disease | pSport1 |
| | Cartilage Fraction IV | cartilage | | | | |
| S0342 | Adipocytes; re-excision | Human Adipocytes from | | | | Uni-ZAP XR |
| | | Osteoclastoma | | | | |
| S0344 | Macrophage-oxLDL; re- | macrophage-oxidized | blood | Cell Line | | Uni-ZAP XR |
| | excision | LDL treated | | | | |
| S0346 | Human Amygdala; re- | Amygdala | | | | Uni-ZAP XR |
| | excision | | | | | |
| S0348 | Cheek Carcinoma | Cheek Carcinoma | | | disease | pSport1 |
| S0350 | Pharynx Carcinoma | Pharynx carcinoma | Hypopharynx | | disease | pSport1 |
| S0352 | Larynx Carcinoma | Larynx carcinoma | | | disease | pSport1 |
| S0354 | Colon Normal II | Colon Normal | Colon | | | pSport1 |
| S0356 | Colon Carcinoma | Colon Carcinoma | Colon | | disease | pSport1 |
| S0358 | Colon Normal III | Colon Normal | Colon | | | pSport1 |
| S0360 | Colon Tumor II | Colon Tumor | Colon | | disease | pSport1 |
| S0362 | Human Gastrocnemius | Gastrocnemius muscle | | | | pSport1 |
| S0364 | Human Quadriceps | Quadriceps muscle | | | | pSport1 |
| S0366 | Human Soleus | Soleus Muscle | | | | pSport1 |
| S0370 | Larynx carcinoma II | Larynx carcinoma | | | disease | pSport1 |
| S0372 | Larynx carcinoma III | Larynx carcinoma | | | disease | pSport1 |
| S0374 | Normal colon | Normal colon | | | | pSport1 |
| S0376 | Colon Tumor | Colon Tumor | | | disease | pSport1 |
| S0378 | Pancreas normal PCA4 | Pancreas Normal PCA4 | | | | pSport1 |
| | No | No | | | | |
| S0380 | Pancreas Tumor PCA4 Tu | Pancreas Tumor PCA4 Tu | | | disease | pSport1 |
| S0382 | Larynx carcinoma IV | Larynx carcinoma | | | disease | pSport1 |
| S0384 | Tongue carcinoma | Tongue carcinoma | | | disease | pSport1 |
| S0388 | Human | Human Hypothalamus, | | | disease | Uni-ZAP XR |
| | Hypothalamus, schizophrenia, | Schizophrenia | | | | |
| | re-excision | | | | | |
| S0390 | Smooth muscle, control; | Smooth muscle | Pulmanary | Cell Line | | Uni-ZAP XR |
| | re-excision | | artery | | | |
| S0392 | Salivary Gland | Salivary gland; normal | | | | pSport1 |
| S0394 | Stomach; normal | Stomach; normal | | | | pSport1 |
| S0398 | Testis; normal | Testis; normal | | | | pSport1 |
| S0404 | Rectum normal | Rectum, normal | | | | pSport1 |
| S0406 | Rectum tumour | Rectum tumour | | | | pSport1 |
| S0408 | Colon, normal | Colon, normal | | | | pSport1 |
| S0410 | Colon, tumour | Colon, tumour | | | | pSport1 |
| S0412 | Temporal cortex- | Temporal cortex, | | | disease | Other |
| | Alzheizmer; subtracted | alzheimer | | | | |
| S0414 | Hippocampus, Alzheimer | Hippocampus, Alzheimer | | | | Other |
| | Subtracted | Subtracted | | | | |
| S0418 | CHME Cell Line; treated 5 hrs | CHME Cell Line; treated | | | | pCMVSport 3.0 |
| S0420 | CHME Cell | CHME Cell line, | | | | pSport1 |
| | Line, untreated | untreatetd | | | | |
| S0422 | Mo7e Cell Line GM-CSF | Mo7e Cell Line GM-CSF | | | | pCMVSport 3.0 |
| | treated (1 ng/ml) | treated (1 ng/ml) | | | | |
| S0424 | TF-1 Cell Line GM-CSF | TF-1 Cell Line GM-CSF | | | | pSport1 |
| | Treated | Treated | | | | |
| S0426 | Monocyte activated; re- | Monocyte-activated | blood | Cell Line | | Uni-ZAP XR |
| | excision | | | | | |
| S0428 | Neutrophils control; re- | human neutrophils | blood | Cell Line | | Uni-ZAP XR |
| | excision | | | | | |
| S0430 | Aryepiglottis Normal | Aryepiglottis Normal | | | | pSport1 |
| S0432 | Sinus piniformis Tumour | Sinus piniformis Tumour | | | | pSport1 |
| S0434 | Stomach Normal | Stomach Normal | | | disease | pSport1 |
| S0436 | Stomach Tumour | Stomach Tumour | | | disease | pSport1 |
| S0438 | Liver Normal Met5No | Liver Normal Met5No | | | | pSport1 |
| S0440 | Liver Tumour Met 5 Tu | Liver Tumour | | | | pSport1 |
| S0442 | Colon Normal | Colon Normal | | | | pSport1 |
| S0444 | Colon Tumor | Colon Tumour | | | disease | pSport1 |
| S0446 | Tongue Tumour | Tongue Tumour | | | | pSport1 |
| S0448 | Larynx Normal | Larynx Normal | | | | pSport1 |
| S0450 | Larynx Tumour | Larynx Tumour | | | | pSport1 |
| S0452 | Thymus | Thymus | | | | pSport1 |
| S0454 | Placenta | Placenta | Placenta | | | pSport1 |
| S0456 | Tongue Normal | Tongue Normal | | | | pSport1 |
| S0460 | Thyroid Tumour | Thyroid Tumour | | | | pSport1 |
| S0462 | Thyroid Thyroiditis | Thyroid Thyroiditis | | | | pSport1 |
| S0464 | Larynx Normal | Larynx Normal | | | | pSport1 |
| S0468 | Ea.hy.926 cell line | Ea.hy.926 cell line | | | | pSport1 |
| S0472 | Lung Mesothelium | PYBT | | | | pSport1 |
| S0474 | Human blood platelets | Platelets | Blood platelets | | | Other |
| S3012 | Smooth Muscle Serum | Smooth muscle | Pulmanary | Cell Line | | pBluescript |
| | Treated, Norm | | artery | | | |
| S3014 | Smooth muscle, serum | Smooth muscle | Pulmanary | Cell Line | | pBluescript |
| | induced, re-exc | | artery | | | |
| S6014 | H. hypothalamus, frac A | Hypothalamus | Brain | | | ZAP Express |
| S6016 | H. Frontal Cortex, | H. Brain, Frontal Cortex, | Brain | | disease | Uni-ZAP XR |
| | Epileptic | Epileptic | | | | |
| S6022 | H. Adipose Tissue | Human Adipose Tissue | | | | Uni-ZAP XR |
| S6024 | Alzheimers, spongy | Alzheimer''s/Spongy | Brain | | disease | Uni-ZAP XR |
| | change | change | | | | |
| S6026 | Frontal Lobe, Dementia | Frontal Lobe | Brain | | | Uni-ZAP XR |
| | | dementia/Alzheimer''s | | | | |
| S6028 | Human Manic Depression | Human Manic depression | Brain | | disease | Uni-ZAP XR |
| | Tissue | tissue | | | | |
| T0002 | Activated T-cells | Activated T-Cell, PBL | Blood | Cell Line | | pBluescript SK− |
| | | fraction | | | | |
| T0003 | Human Fetal Lung | Human Fetal Lung | | | | pBluescript SK− |
| T0004 | Human White Fat | Human White Fat | | | | pBluescript SK− |
| T0006 | Human Pineal Gland | Human Pinneal Gland | | | | pBluescript SK− |
| T0008 | Colorectal Tumor | Colorectal Tumor | | | disease | pBluescript SK− |
| T0010 | Human Infant Brain | Human Infant Brain | | | | Other |
| T0023 | Human Pancreatic | Human Pancreatic | | | disease | pBluescript SK− |
| | Carcinoma | Carcinoma | | | | |
| T0039 | HSA 172 Cells | Human HSA172 cell line | | | | pBluescript SK− |
| T0040 | HSC172 cells | SA172 Cells | | | | pBluescript SK− |
| T0041 | Jurkat T-cell G1 phase | Jurkat T-cell | | | | pBluescript SK− |
| T0042 | Jurkat T-Cell, S phase | Jurkat T-Cell Line | | | | pBluescript SK− |
| T0048 | Human Aortic | Human Aortic | | | | pBluescript SK− |
| | Endothelium | Endothilium | | | | |
| T0049 | Aorta endothelial cells + TNF-a | Aorta endothelial cells | | | | pBluescript SK− |
| T0060 | Human White Adipose | Human White Fat | | | | pBluescript SK− |
| T0067 | Human Thyroid | Human Thyroid | | | | pBluescript SK− |
| T0068 | Normal Ovary, | Normal Ovary, | | | | pBluescript SK− |
| | Premenopausal | Premenopausal | | | | |
| T0069 | Human Uterus, normal | Human Uterus, normal | | | | pBluescript SK− |
| T0071 | Human Bone Marrow | Human Bone Marrow | | | | pBluescript SK− |
| T0078 | Human Liver, normal | Human Liver, normal | | | | pBluescript SK− |
| | adult | Adult | | | | |
| T0082 | Human Adult Retina | Human Adult Retina | | | | pBluescript SK− |
| T0104 | HCC cell line metastisis to | | | | | pBluescript SK− |
| | liver | | | | | |
| T0109 | Human (HCC) cell line | | | | | pBluescript SK− |
| | liver (mouse) metastasis, | | | | | |
| | remake | | | | | |
| T0110 | Human colon carcinoma | | | | | pBluescript SK− |
| | (HCC) cell line, remake | | | | | |
| T0112 | Human (Caco-2) cell line, | | | | | pBluescript SK− |
| | adenocarcinoma, colon | | | | | |
| T0114 | Human (Caco-2) cell line, | | | | | pBluescript SK− |
| | adenocarcinoma, colon, | | | | | |
| | remake | | | | | |
| T0115 | Human Colon Carcinoma | | | | | pBluescript SK− |
| | (HCC) cell line | | | | | |
| L0002 | Atrium cDNA library | | | | | |
| | Human heart | | | | | |
| L0005 | Clontech human aorta | | | | | |
| | polyA+ mRNA (#6572) | | | | | |
| L0021 | Human adult (K. Okubo) | | | | | |
| L0022 | Human adult lung 3″ | | | | | |
| | directed MboI cDNA | | | | | |
| L0040 | Human colon mucosa | | | | | |
| L0041 | Human epidermal | | | | | |
| | keratinocyte | | | | | |
| L0045 | Human keratinocyte | | | | | |
| | differential display | | | | | |
| | (B. Lin) | | | | | |
| L0051 | Human mRNA (Tripodis | | | | | |
| | and Ragoussis) | | | | | |
| L0055 | Human promyelocyte | | | | | |
| L0065 | Liver HepG2 cell line. | | | | | |
| L0105 | Human aorta polyA+ | aorta | | | | |
| | (TFujiwara) | | | | | |
| L0109 | Human brain cDNA | brain | | | | |
| L0138 | Human normal gingiva | normal gingiva | | | | |
| L0142 | Human placenta cDNA | placenta | | | | |
| | (TFujiwara) | | | | | |
| L0143 | Human placenta polyA+ | placenta | | | | |
| | (TFujiwara) | | | | | |
| L0157 | Human fetal brain | | brain | | | |
| | (TFujiwara) | | | | | |
| L0158 | Human fetal brain QBoqin | | brain | | | |
| L0163 | Human heart cDNA | | heart | | | |
| | (YNakamura) | | | | | |
| L0194 | Human pancreatic cancer | pancreatic cancer | | Patu 8988t | | |
| | cell line Patu 8988t | | | | | |
| L0351 | Infant brain, Bento Soares | | | | | BA, M13-derived |
| L0352 | Normalized infant brain, | | | | | BA, M13-derived |
| | Bento Soares | | | | | |
| L0355 | P, Human foetal Brain | | | | | Bluescript |
| | Whole tissue | | | | | |
| L0361 | Stratagene ovary | | ovary | | | Bluescript SK |
| | (#937217) | | | | | |
| L0362 | Stratagene ovarian cancer | | | | | Bluescript SK− |
| | (#937219) | | | | | |
| L0363 | NCI_CGAP_GC2 | germ cell tumor | | | | Bluescript SK− |
| L0364 | NCI_CGAP_GC5 | germ cell tumor | | | | Bluescript SK− |
| L0366 | Stratagene schizo brain | schizophrenic brain S-11 | | | | Bluescript SK− |
| | S11 | frontal lobe | | | | |
| L0367 | NCI_CGAP_Sch1 | Schwannoma tumor | | | | Bluescript SK− |
| L0368 | NCI_CGAP_SS1 | synovial sarcoma | | | | Bluescript SK− |
| L0369 | NCI_CGAP_AA1 | adrenal adenoma | adrenal gland | | | Bluescript SK− |
| L0371 | NCI_CGAP_Br3 | breast tumor | breast | | | Bluescript SK− |
| L0372 | NCI_CGAP_Co12 | colon tumor | colon | | | Bluescript SK− |
| L0373 | NCI_CGAP_Co11 | tumor | colon | | | Bluescript SK− |
| L0374 | NCI_CGAP_Co2 | tumor | colon | | | Bluescript SK− |
| L0375 | NCI_CGAP_Kid6 | kidney tumor | kidney | | | Bluescript SK− |
| L0376 | NCI_CGAP_Lar1 | larynx | larynx | | | Bluescript SK− |
| L0378 | NCI_CGAP_Lu1 | lung tumor | lung | | | Bluescript SK− |
| L0381 | NCI_CGAP_HN4 | squamous cell carcinoma | pharynx | | | Bluescript SK− |
| L0382 | NCI_CGAP_Pr25 | epithelium (cell line) | prostate | | | Bluescript SK− |
| L0383 | NCI_CGAP_Pr24 | invasive tumor (cell line) | prostate | | | Bluescript SK− |
| L0384 | NCI_CGAP_Pr23 | prostate tumor | prostate | | | Bluescript SK− |
| L0386 | NCI_CGAP_HN3 | squamous cell carcinoma | tongue | | | Bluescript SK− |
| | | from base of tongue | | | | |
| L0387 | NCI_CGAP_GCB0 | germinal center B-cells | tonsil | | | Bluescript SK− |
| L0388 | NCI_CGAP_HN6 | normal gingiva (cell line | | | | Bluescnpt SK− |
| | | from immortalized kerati | | | | |
| L0393 | B, Human Liver tissue | | | | | gt11 |
| L0411 | 1-NIB | | | | | Lafmid BA |
| L0414 | b4HB3MA | | | | | Lafmid BA |
| L0415 | b4HB3MA Cot8-HAP-Ft | | | | | Lafmid BA |
| L0435 | Infant brain, LLNL array | | | | | lafmid BA |
| | of Dr. M. Soares 1NIB | | | | | |
| L0438 | normalized infant brain | total brain | brain | | | lafmid BA |
| | cDNA | | | | | |
| L0439 | Soares infant brain 1NIB | | whole brain | | | Lafmid BA |
| L0442 | 4HB3MK | | | | | Lafmid BK |
| L0443 | b4HB3MK | | | | | Lafmid BK |
| L0447 | NHB3MK | | | | | Lafmid BK |
| L0448 | 3HFLSK20 | | | | | Lafmid K |
| L0455 | Human retina cDNA | retina | eye | | | lambda gt10 |
| | randomly primed | | | | | |
| | sublibrary | | | | | |
| L0456 | Human retina cDNA | retina | eye | | | lambda gt10 |
| | Tsp509I-cleaved | | | | | |
| | sublibrary | | | | | |
| L0457 | multi-tissue normalized | multi-tissue | pooled | | | lambda gt10 |
| | short-fragment | | | | | |
| L0462 | WATM1 | | | | | lambda gt11 |
| L0471 | Human fetal heart, | | | | | Lambda ZAP Express |
| | Lambda ZAP Express | | | | | |
| L0475 | KG1-a Lambda Zap | | | KG1-a | | Lambda Zap Express |
| | Express cDNA library | | | | | (Stratagene) |
| L0480 | Stratagene cat#937212 | | | | | Lambda ZAP, |
| | (1992) | | | | | pBluescript SK(−) |
| L0481 | CD34+DIRECTIONAL | | | | | Lambda ZAPII |
| L0483 | Human pancreatic islet | | | | | Lambda ZAPII |
| L0485 | STRATAGENE Human | skeletal muscle | leg muscle | | | Lambda ZAPII |
| | skeletal muscle cDNA | | | | | |
| | library, cat. #936215. | | | | | |
| L0493 | NCI_CGAP_Ov26 | papillary serous carcinoma | ovary | | | pAMP1 |
| L0497 | NCI_CGAP_HSC4 | CD34+, CD38− from | bone marrow | | | pAMP1 |
| | | normal bone marrow | | | | |
| | | donor | | | | |
| L0498 | NCI_CGAP_HSC3 | CD34+, T negative, | bone marrow | | | pAMP1 |
| | | patient with chronic | | | | |
| | | myelogenou | | | | |
| L0500 | NCI_CGAP_Brn20 | oligodendroglioma | brain | | | pAMP1 |
| L0502 | NCI_CGAP_Br15 | adenocarcinoma | breast | | | pAMP1 |
| L0503 | NCI_CGAP_Br17 | adenocarcinoma | breast | | | pAMP1 |
| L0506 | NCI_CGAP_Br16 | lobullar carcinoma in situ | breast | | | pAMP1 |
| L0507 | NCI_CGAP_Br14 | normal epithelium | breast | | | pAMP1 |
| L0512 | NCI_CGAP_Ov36 | borderline ovarian | ovary | | | pAMP1 |
| | | carcinoma | | | | |
| L0515 | NCI_CGAP_Ov32 | papillary serous carcinoma | ovary | | | pAMP1 |
| L0517 | NCI_CGAP_Pr1 | | | | | pAMP10 |
| L0518 | NCI_CGAP_Pr2 | | | | | pAMP10 |
| L0519 | NCI_CGAP_Pr3 | | | | | pAMP10 |
| L0520 | NCI_CGAP_Alv1 | alveolar | | | | pAMP10 |
| | | rhabdomyosarcoma | | | | |
| L0521 | NCI_CGAP_Ew1 | Ewing''s sarcoma | | | | pAMP10 |
| L0522 | NCI_CGAP_Kid1 | kidney | | | | pAMP10 |
| L0523 | NCI_CGAP_Lip2 | liposarcoma | | | | pAMP10 |
| L0524 | NCI_CGAP_Li1 | liver | | | | pAMP10 |
| L0525 | NCI_CGAP_Li2 | liver | | | | pAMP10 |
| L0526 | NCI_CGAP_Pr12 | metastatic prostate bone | | | | pAMP10 |
| | | lesion | | | | |
| L0527 | NCI_CGAP_Ov2 | ovary | | | | pAMP10 |
| L0528 | NCI_CGAP_Pr5 | prostate | | | | pAMP10 |
| L0529 | NCI_CGAP_Pr6 | prostate | | | | pAMP10 |
| L0530 | NCI_CGAP_Pr8 | prostate | | | | pAMP10 |
| L0532 | NCI_CGAP_Thy1 | thyroid | | | | pAMP10 |
| L0533 | NCI_CGAP_HSC1 | stem cells | bone marrow | | | pAMP10 |
| L0534 | Chromosome 7 Fetal | brain | brain | | | pAMP10 |
| | Brain cDNA Library | | | | | |
| L0535 | NCI_CGAP_Br5 | infiltrating ductal | breast | | | pAMP10 |
| | | carcinoma | | | | |
| L0540 | NCI_CGAP_Pr10 | invasive prostate tumor | prostate | | | pAMP10 |
| L0542 | NCI_CGAP_Pr11 | normal prostatic epithelial | prostate | | | pAMP10 |
| | | cells | | | | |
| L0543 | NCI_CGAP_Pr9 | normal prostatic epithelial | prostate | | | pAMP10 |
| | | cells | | | | |
| L0544 | NCI_CGAP_Pr4 | prostatic intraepithelial | prostate | | | pAMP10 |
| | | neoplasia - high grade | | | | |
| L0545 | NCI_CGAP_Pr4.1 | prostatic intraepithelial | prostate | | | pAMP10 |
| | | neoplasia - high grade | | | | |
| L0549 | NCI_CGAP_HN10 | carcinoma in situ from | | | | pAMP10 |
| | | retromolar trigone | | | | |
| L0550 | NCI_CGAP_HN9 | normal squamous | | | | pAMP10 |
| | | epithelium from | | | | |
| | | retromolar trigone | | | | |
| L0551 | NCI_CGAP_HN7 | normal squamous | | | | pAMP10 |
| | | epithelium, floor of mouth | | | | |
| L0555 | NCI_CGAP_Lu34 | large cell carcinoma | lung | | | pAMP10 |
| L0558 | NCI_CGAP_Ov40 | endometrioid ovarian | ovary | | | pAMP10 |
| | | metastasis | | | | |
| L0559 | NCI_CGAP_Ov39 | papillary serous ovarian | ovary | | | pAMP10 |
| | | metastasis | | | | |
| L0561 | NCI_CGAP_HN11 | normal squamous | tongue | | | pAMP10 |
| | | epithelium | | | | |
| L0562 | Chromosome 7 HeLa | | | HeLa | | pAMP10 |
| | cDNA Library | | | cell line; | | |
| | | | | ATCC | | |
| L0563 | Human Bone Marrow | bone marrow | | | | pBluescript |
| | Stromal Fibroblast | | | | | |
| L0564 | Jia bone marrow stroma | bone marrow stroma | | | | pBluescript |
| L0565 | Normal Human | Bone | Hip | | | pBluescript |
| | Trabecular Bone Cells | | | | | |
| L0581 | Stratagene liver (#937224) | | liver | | | pBluescript SK |
| L0584 | Stratagene cDNA library | | | | | pBluescript SK(+) |
| | Human heart, cat#936208 | | | | | |
| L0586 | HTCDL1 | | | | | pBluescript SK(−) |
| L0588 | Stratagene endothelial cell | | | | | pBluescript SK− |
| | 937223 | | | | | |
| L0589 | Stratagene fetal retina | | | | | pBluescript SK− |
| | 937202 | | | | | |
| L0590 | Stratagene fibroblast | | | | | pBluescript SK− |
| | (#937212) | | | | | |
| L0591 | Stratagene HeLa cell s3 | | | | | pBluescript SK− |
| | 937216 | | | | | |
| L0592 | Stratagene hNT neuron | | | | | pBluescript SK− |
| | (#937233) | | | | | |
| L0593 | Stratagene | | | | | pBluescript SK− |
| | neuroepithelium | | | | | |
| | (#937231) | | | | | |
| L0594 | Stratagene | | | | | pBluescript SK− |
| | neuroepithelium | | | | | |
| | NT2RAMI 937234 | | | | | |
| L0595 | Stratagene NT2 neuronal | neuroepithelial cells | brain | | | pBluescript SK− |
| | precursor 937230 | | | | | |
| L0596 | Stratagene colon | | colon | | | pBluescript SK− |
| | (#937204) | | | | | |
| L0597 | Stratagene corneal stroma | | cornea | | | pBluescript SK− |
| | (#937222) | | | | | |
| L0598 | Morton Fetal Cochlea | cochlea | ear | | | pBluescript SK− |
| L0599 | Stratagene lung (#937210) | | lung | | | pBluescript SK− |
| L0600 | Weizmann Olfactory | olfactory epithelium | nose | | | pBluescript SK− |
| | Epithelium | | | | | |
| L0601 | Stratagene pancreas | | pancreas | | | pBluescript SK− |
| | (#937208) | | | | | |
| L0602 | Pancreatic Islet | pancreatic islet | pancreas | | | pBluescript SK− |
| L0603 | Stratagene placenta | | placenta | | | pBluescript SK− |
| | (#937225) | | | | | |
| L0604 | Stratagene muscle 937209 | muscle | skeletal muscle | | | pBluescript SK− |
| L0605 | Stratagene fetal spleen | fetal spleen | spleen | | | pBluescript SK− |
| | (#937205) | | | | | |
| L0606 | NCI_CGAP_Lym5 | follicular lymphoma | lymph node | | | pBluescript SK− |
| L0607 | NCI_CGAP_Lym6 | mantle cell lymphoma | lymph node | | | pBluescript SK− |
| L0608 | Stratagene lung carcinoma | lung carcinoma | lung | NCI-H69 | | pBluescript SK− |
| | 937218 | | | | | |
| L0609 | Schiller astrocytoma | astrocytoma | brain | | | pBluescript SK− |
| | | | | | | (Stratagene) |
| L0611 | Schiller meningioma | meningioma | brain | | | pBluescript SK− |
| | | | | | | (Stratagene) |
| L0612 | Schiller | oligodendroglioma | brain | | | pBluescript SK− |
| | oligodendroglioma | | | | | (Stratagene) |
| L0615 | 22 week old human fetal | | | | | pBluescriptII SK(−) |
| | liver cDNA library | | | | | |
| L0617 | Chromosome 22 exon | | | | | pBluescriptIIKS+ |
| L0619 | Chromosome 9 exon II | | | | | pBluescriptIIKS+ |
| L0622 | HM1 | | | | | pcDNAII (Invitrogen) |
| L0623 | HM3 | pectoral muscle (after | | | | pcDNAII (Invitrogen) |
| | | mastectomy) | | | | |
| L0625 | NCI_CGAP_AR1 | bulk alveolar tumor | | | | pCMV-SPORT2 |
| L0626 | NCI_CGAP_GC1 | bulk germ cell seminoma | | | | pCMV-SPORT2 |
| L0627 | NCI_CGAP_Co1 | bulk tumor | colon | | | pCMV-SPORT2 |
| L0628 | NCI_CGAP_Ov1 | ovary bulk tumor | ovary | | | pCMV-SPORT2 |
| L0629 | NCI_CGAP_Mel3 | metastatic melanoma to | bowel (skin | | | pCMV-SPORT4 |
| | | bowel | primary) | | | |
| L0631 | NCI_CGAP_Br7 | | breast | | | pCMV-SPORT4 |
| L0632 | NCI_CGAP_Li5 | hepatic adenoma | liver | | | pCMV-SPORT4 |
| L0634 | NCI_CGAP_Ov8 | serous adenocarcinoma | ovary | | | pCMV-SPORT4 |
| L0635 | NCI_CGAP_PNS1 | dorsal root ganglion | peripheral | | | pCMV-SPORT4 |
| | | | nervous system | | | |
| L0636 | NCI_CGAP_Pit1 | four pooled pituitary | brain | | | pCMV-SPORT6 |
| | | adenomas | | | | |
| L0637 | NCI_CGAP_Brn53 | three pooled meningiomas | brain | | | pCMV-SPORT6 |
| L0638 | NCI_CGAP_Brn35 | tumor, 5 pooled (see | brain | | | pCMV-SPORT6 |
| | | description) | | | | |
| L0639 | NCI_CGAP_Brn52 | tumor, 5 pooled (see | brain | | | pCMV-SPORT6 |
| | | description) | | | | |
| L0640 | NCI_CGAP_Br18 | four pooled high-grade | breast | | | pCMV-SPORT6 |
| | | tumors, including two | | | | |
| | | prima | | | | |
| L0641 | NCI_CGAP_Co17 | juvenile granulosa tumor | colon | | | pCMV-SPORT6 |
| L0642 | NCI_CGAP_Co18 | moderately differentiated | colon | | | pCMV-SPORT6 |
| | | adenocarcinoma | | | | |
| L0643 | NCI_CGAP_Co19 | moderately differentiated | colon | | | pCMV-SPORT6 |
| | | adenocarcinoma | | | | |
| L0644 | NCI_CGAP_Co20 | moderately differentiated | colon | | | pCMV-SPORT6 |
| | | adenocarcinoma | | | | |
| L0645 | NCI_CGAP_Co21 | moderately differentiated | colon | | | pCMV-SPORT6 |
| | | adenocarcinoma | | | | |
| L0646 | NCI_CGAP_Co14 | moderately-differentiated | colon | | | pCMV-SPORT6 |
| | | adenocarcinoma | | | | |
| L0647 | NCI_CGAP_Sar4 | five pooled sarcomas, | connective | | | pCMV-SPORT6 |
| | | including myxoid | tissue | | | |
| | | liposarcoma | | | | |
| L0648 | NCI_CGAP_Eso2 | squamous cell carcinoma | esophagus | | | pCMV-SPORT6 |
| L0649 | NCI_CGAP_GU1 | 2 pooled high-grade | genitourinary | | | pCMV-SPORT6 |
| | | transitional cell tumors | tract | | | |
| L0650 | NCI_CGAP_Kid13 | 2 pooled Wilms'' tumors, | kidney | | | pCMV-SPORT6 |
| | | one primary and one | | | | |
| | | metast | | | | |
| L0651 | NCI_CGAP_Kid8 | renal cell tumor | kidney | | | pCMV-SPORT6 |
| L0652 | NCI_CGAP_Lu27 | four pooled poorly- | lung | | | pCMV-SPORT6 |
| | | differentiated | | | | |
| | | adenocarcinomas | | | | |
| L0653 | NCI_CGAP_Lu28 | two pooled squamous cell | lung | | | pCMV-SPORT6 |
| | | carcinomas | | | | |
| L0654 | NCI_CGAP_Lu31 | | lung, cell line | | | pCMV-SPORT6 |
| L0655 | NCI_CGAP_Lym12 | lymphoma, follicular | lymph node | | | pCMV-SPORT6 |
| | | mixed small and large cell | | | | |
| L0656 | NCI_CGAP_Ov38 | normal epithelium | ovary | | | pCMV-SPORT6 |
| L0657 | NCI_CGAP_Ov23 | tumor, 5 pooled (see | ovary | | | pCMV-SPORT6 |
| | | description) | | | | |
| L0658 | NCI_CGAP_Ov35 | tumor, 5 pooled (see | ovary | | | pCMV-SPORT6 |
| | | description) | | | | |
| L0659 | NCI_CGAP_Pan1 | adenocarcinoma | pancreas | | | pCMV-SPORT6 |
| L0661 | NCI_CGAP_Mel15 | malignant melanoma, | skin | | | pCMV-SPORT6 |
| | | metastatic to lymph node | | | | |
| L0662 | NCI_CGAP_Gas4 | poorly differentiated | stomach | | | pCMV-SPORT6 |
| | | adenocarcinoma with | | | | |
| | | signet r | | | | |
| L0663 | NCI_CGAP_Ut2 | moderately-differentiated | uterus | | | pCMV-SPORT6 |
| | | endometrial adenocarcino | | | | |
| L0664 | NCI_CGAP_Ut3 | poorly-differentiated | uterus | | | pCMV-SPORT6 |
| | | endometrial | | | | |
| | | adenocarcinoma, | | | | |
| L0665 | NCI_CGAP_Ut4 | serous papillary | uterus | | | pCMV-SPORT6 |
| | | carcinoma, high grade, 2 | | | | |
| | | pooled t | | | | |
| L0666 | NCI_CGAP_Ut1 | well-differentiated | uterus | | | pCMV-SPORT6 |
| | | endometrial | | | | |
| | | adenocarcinoma, 7 | | | | |
| L0667 | NCI_CGAP_CML1 | myeloid cells, 18 pooled | whole blood | | | pCMV-SPORT6 |
| | | CML cases, BCR/ABL | | | | |
| | | rearra | | | | |
| L0669 | Human MCF7 cDNA | breast adenocarcinoma | breast | MCF7 | | pCR II [Invitrogen] |
| | subtracted with MDA- | | | | | |
| | MB-231 cDNA | | | | | |
| L0684 | Stanley Frontal SB pool 1 | frontal lobe (see | brain | | | pCR2.1-TOPO |
| | | description) | | | | (Invitrogen) |
| L0686 | Stanley Frontal SN pool 2 | frontal lobe (see | brain | | | pCR2.1-TOPO |
| | | description) | | | | (Invitrogen) |
| L0698 | Testis 2 | | | | | PGEM 5zf(+) |
| L0700 | Outward Alu-primed | | | | | pGEM-3Z |
| | hncDNA library | | | | | |
| L0710 | NIH_MGC_7 | small cell carcinoma | lung | MGC3 | | pOTB7 |
| L0717 | Gessler Wilms tumor | | | | | pSPORT1 |
| L0718 | Testis 5 | | | | | pSPORT1 |
| L0731 | Soares_pregnant_uterus_NbHPU | | uterus | | | pT7T3-Pac |
| L0738 | Human colorectal cancer | | | | | pT7T3D |
| L0740 | Soares melanocyte | melanocyte | | | | pT7T3D (Pharmacia) |
| | 2NbHM | | | | | with a modified |
| | | | | | | polylinker |
| L0741 | Soares adult brain | | brain | | | pT7T3D (Pharmacia) |
| | N2b4HB55Y | | | | | with a modified |
| | | | | | | polylinker |
| L0742 | Soares adult brain | | brain | | | pT7T3D (Pharmacia) |
| | N2b5HB55Y | | | | | with a modified |
| | | | | | | polylinker |
| L0743 | Soares breast 2NbHBst | | breast | | | pT7T3D (Pharmacia) |
| | | | | | | with a modified |
| | | | | | | polylinker |
| L0744 | Soares breast 3NbHBst | | breast | | | pT7T3D (Pharmacia) |
| | | | | | | with a modified |
| | | | | | | polylinker |
| L0745 | Soares retina N2b4HR | retina | eye | | | pT7T3D (Pharmacia) |
| | | | | | | with a modified |
| | | | | | | polylinker |
| L0746 | Soares retina N2b5HR | retina | eye | | | pT7T3D (Pharmacia) |
| | | | | | | with a modified |
| | | | | | | polylinker |
| L0747 | Soares_fetal_heart_NbHH | | heart | | | pT7T3D (Pharmacia) |
| | 19W | | | | | with a modified |
| | | | | | | polylinker |
| L0748 | Soares fetal liver spleen | | Liver and | | | pT7T3D (Pharmacia) |
| | 1NFLS | | Spleen | | | with a modified |
| | | | | | | polylinker |
| L0749 | Soares_fetal_liver_spleen_1NFLS_S1 | | Liver and | | | pT7T3D (Pharmacia) |
| | | | Spleen | | | with a modified |
| | | | | | | polylinker |
| L0750 | Soares_fetal_lung_NbHL19W | | lung | | | pT7T3D (Pharmacia) |
| | | | | | | with a modified |
| | | | | | | polylinker |
| L0751 | Soares ovary tumor | ovarian tumor | ovary | | | pT7T3D (Pharmacia) |
| | NbHOT | | | | | with a modified |
| | | | | | | polylinker |
| L0752 | Soares_parathyroid_tumor_NbHPA | parathyroid tumor | parathyroid | | | pT7T3D (Pharmacia) |
| | | | gland | | | with a modified |
| | | | | | | polylinker |
| L0753 | Soares_pineal_gland_N3HPG | | pineal gland | | | pT7T3D (Pharmacia) |
| | | | | | | with a modified |
| | | | | | | polylinker |
| L0754 | Soares placenta Nb2HP | | placenta | | | pT7T3D (Pharmacia) |
| | | | | | | with a modified |
| | | | | | | polylinker |
| L0755 | Soares_placenta_8to9week_2NbHP8to9W | | placenta | | | pT7T3D (Pharmacia) |
| | | | | | | with a modified |
| | | | | | | polylinker |
| L0756 | Soares_multiple_sclerosis_2NbHMSP | multiple sclerosis lesions | | | | pT7T3D (Pharmacia) |
| | | | | | | with a modified |
| | | | | | | polylinker V_TYPE |
| L0757 | Soares_senescent_fibroblasts_NbHSF | senescent fibroblast | | | | pT7T3D (Pharmacia) |
| | | | | | | with a modified |
| | | | | | | polylinker V_TYPE |
| L0758 | Soares_testis_NHT | | | | | pT7T3D-Pac |
| | | | | | | (Pharmacia) with a |
| | | | | | | modified polylinker |
| L0759 | Soares_total_fetus_Nb2HF8_9w | | | | | pT7T3D-Pac |
| | | | | | | (Pharmacia) with a |
| | | | | | | modified polylinker |
| L0760 | Barstead aorta HPLRB3 | aorta | | | | pT7T3D-Pac |
| | | | | | | (Pharmacia) with a |
| | | | | | | modified polylinker |
| L0761 | NCI_CGAP_CLL1 | B-cell, chronic lymphotic | | | | pT7T3D-Pac |
| | | leukemia | | | | (Pharmacia) with a |
| | | | | | | modified polylinker |
| L0762 | NCI_CGAP_Br1.1 | breast | | | | pT7T3D-Pac |
| | | | | | | (Pharmacia) with a |
| | | | | | | modified polylinker |
| L0763 | NCI_CGAP_Br2 | breast | | | | pT7T3D-Pac |
| | | | | | | (Pharmacia) with a |
| | | | | | | modified polylinker |
| L0764 | NCI_CGAP_Co3 | colon | | | | pT7T3D-Pac |
| | | | | | | (Pharmacia) with a |
| | | | | | | modified polylinker |
| L0765 | NCI_CGAP_Co4 | colon | | | | pT7T3D-Pac |
| | | | | | | (Pharmacia) with a |
| | | | | | | modified polylinker |
| L0766 | NCI_CGAP_GCB1 | germinal center B cell | | | | pT7T3D-Pac |
| | | | | | | (Pharmacia) with a |
| | | | | | | modified polylinker |
| L0767 | NCI_CGAP_GC3 | pooled germ cell tumors | | | | pT7T3D-Pac |
| | | | | | | (Pharmacia) with a |
| | | | | | | modified polylinker |
| L0768 | NCI_CGAP_GC4 | pooled germ cell tumors | | | | pT7T3D-Pac |
| | | | | | | (Pharmacia) with a |
| | | | | | | modified polylinker |
| L0769 | NCI_CGAP_Brn25 | anaplastic | brain | | | pT7T3D-Pac |
| | | oligodendroglioma | | | | (Pharmacia) with a |
| | | | | | | modified polylinker |
| L0770 | NCI_CGAP_Brn23 | glioblastoma (pooled) | brain | | | pT7T3D-Pac |
| | | | | | | (Pharmacia) with a |
| | | | | | | modified polylinker |
| L0771 | NCI_CGAP_Co8 | adenocarcinoma | colon | | | pT7T3D-Pac |
| | | | | | | (Pharmacia) with a |
| | | | | | | modified polylinker |
| L0772 | NCI_CGAP_Co10 | colon tumor RER+ | colon | | | pT7T3D-Pac |
| | | | | | | (Pharmacia) with a |
| | | | | | | modified polylinker |
| L0773 | NCI_CGAP_Co9 | colon tumor RBR+ | colon | | | pT7T3D-Pac |
| | | | | | | (Pharmacia) with a |
| | | | | | | modified polylinker |
| L0774 | NCI_CGAP_Kid3 | | kidney | | | pT7T3D-Pac |
| | | | | | | (Pharmacia) with a |
| | | | | | | modified polylinker |
| L0775 | NCI_CGAP_Kid5 | 2 pooled tumors (clear cell | kidney | | | pT7T3D-Pac |
| | | type) | | | | (Pharmacia) with a |
| | | | | | | modified polylinker |
| L0776 | NCI_CGAP_Lu5 | carcinoid | lung | | | pT7T3D-Pac |
| | | | | | | (Pharmacia) with a |
| | | | | | | modified polylinker |
| L0777 | Soares_NhHMPu_S1 | Pooled human | mixed (see | | | pT7T3D-Pac |
| | | melanocyte, fetal heart, | below) | | | (Pharmacia) with a |
| | | and pregnant | | | | modified polylinker |
| L0779 | Soares_NFL_T_GBC_S1 | | pooled | | | pT7T3D-Pac |
| | | | | | | (Pharmacia) with a |
| | | | | | | modified polylinker |
| L0780 | Soares_NSF_F8_9W_OT_PA_P_S1 | | pooled | | | pT7T3D-Pac |
| | | | | | | (Pharmacia) with a |
| | | | | | | modified polylinker |
| L0782 | NCI_CGAP_Pr21 | normal prostate | prostate | | | pT7T3D-Pac |
| | | | | | | (Pharmacia) with a |
| | | | | | | modified polylinker |
| L0783 | NCI_CGAP_Pr22 | normal prostate | prostate | | | pT7T3D-Pac |
| | | | | | | (Pharmacia) with a |
| | | | | | | modified polylinker |
| L0784 | NCI_CGAP_Lei2 | leiomyosarcoma | soft tissue | | | pT7T3D-Pac |
| | | | | | | (Pharmacia) with a |
| | | | | | | modified polylinker |
| L0785 | Barstead spleen HPLRB2 | | spleen | | | pT7T3D-Pac |
| | | | | | | (Pharmacia) with a |
| | | | | | | modified polylinker |
| L0786 | Soares_NbHFB | | whole brain | | | pT7T3D-Pac |
| | | | | | | (Pharmacia) with a |
| | | | | | | modified polylinker |
| L0787 | NCI_CGAP_Sub1 | | | | | pT7T3D-Pac |
| | | | | | | (Pharmacia) with a |
| | | | | | | modified polylinker |
| L0788 | NCI_CGAP_Sub2 | | | | | pT7T3D-Pac |
| | | | | | | (Pharmacia) with a |
| | | | | | | modified polylinker |
| L0789 | NCI_CGAP_Sub3 | | | | | pT7T3D-Pac |
| | | | | | | (Pharmacia) with a |
| | | | | | | modified polylinker |
| L0790 | NCI_CGAP_Sub3 | | | | | pT7T3D-Pac |
| | | | | | | (Pharmacia) with a |
| | | | | | | modified polylinker |
| L0791 | NCI_CGAP_Sub5 | | | | | pT7T3D-Pac |
| | | | | | | (Pharmacia) with a |
| | | | | | | modified polylinker |
| L0792 | NCI_CGAP_Sub6 | | | | | pT7T3D-Pac |
| | | | | | | (Pharmacia) with a |
| | | | | | | modified polylinker |
| L0793 | NCI_CGAP_Sub7 | | | | | pT7T3D-Pac |
| | | | | | | (Pharmacia) with a |
| | | | | | | modified polylinker |
| L0794 | NCI_CGAP_GC6 | pooled germ cell tumors | | | | pT7T3D-Pac |
| | | | | | | (Pharmacia) with a |
| | | | | | | modified polylinker |
| L0796 | NCI_CGAP_Brn50 | medulloblastoma | brain | | | pT7T3D-Pac |
| | | | | | | (Pharmacia) with a |
| | | | | | | modified polylinker |
| L0800 | NCI_CGAP_Co16 | colon tumor, RER+ | colon | | | pT7T3D-Pac |
| | | | | | | (Pharmacia) with a |
| | | | | | | modified polylinker |
| L0803 | NCI_CGAP_Kid11 | | kidney | | | pT7T3D-Pac |
| | | | | | | (Pharmacia) with a |
| | | | | | | modified polylinker |
| L0804 | NCI_CGAP_Kid12 | 2 pooled tumors (clear cell | kidney | | | pT7T3D-Pac |
| | | type) | | | | (Pharmacia) with a |
| | | | | | | modified polylinker |
| L0805 | NCI_CGAP_Lu24 | carcinoid | lung | | | pT7T3D-Pac |
| | | | | | | (Pharmacia) with a |
| | | | | | | modified polylinker |
| L0806 | NCI_CGAP_Lu19 | squamous cell carcinoma, | lung | | | pT7T3D-Pac |
| | | poorly differentiated (4 | | | | (Pharmacia) with a |
| | | | | | | modified polylinker |
| L0807 | NCI_CGAP_Ov18 | fibrotheoma | ovary | | | pT7T3D-Pac |
| | | | | | | (Pharmacia) with a |
| | | | | | | modified polylinker |
| L0809 | NCI_CGAP_Pr28 | | prostate | | | pT7T3D-Pac |
| | | | | | | (Pharmacia) with a |
| | | | | | | modified polylinker |
| L1562 | CN0027 | | colon_normal | | | puc18 |
| L2251 | Human fetal lung | Fetal lung | | | | |
| L2252 | Human placenta | placenta | | | | |
| L2255 | GLC | corresponding non | | | | pBluescript sk(−) |
| | | cancerous liver tissue | | | | |
| L2257 | NIH_MGC_65 | adenocarcinoma | colon | | | pCMV-SPORT6 |
| L2258 | NIH_MGC_67 | retinoblastoma | eye | | | pCMV-SPORT6 |
| L2259 | NIH_MGC_68 | large cell carcinoma | lung | | | pCMV-SPORT6 |
| L2260 | NIH_MGC_69 | large cell carcinoma, | lung | | | pCMV-SPORT6 |
| | | undifferentiated | | | | |
| L2261 | NIH_MGC_70 | epithelioid carcinoma | pancreas | | | pCMV-SPORT6 |
| L2262 | NIH_MGC_72 | melanotic melanoma | skin | | | pCMV-SPORT6 |
| L2263 | NIH_MGC_66 | adenocarcinoma | ovary | | | pCMV-SPORT6 |
| L2264 | NIH_MGC_71 | leiomyosarcoma | uterus | | | pCMV-SPORT6 |
| L2265 | NIH_MGC_39 | adenocarcinoma | pancreas | | | pOTB7 |
| L2270 | Lupski_dorsal_root_ganglion | dorsal root ganglia | | | | pCMV-SPORT6 (Life |
| | | | | | | Technologies) |
| L2293 | BT0762 | | breast | | | puc18 |
| L2300 | BT0789 | | breast | | | puc18 |
| L2336 | CT0428 | | colon | | | puc18 |
| L2359 | UT0023 | | uterus_tumor | | | puc18 |
| L2368 | UT0041 | | uterus_tumor | | | puc18 |
| L2482 | HT0497 | | head_neck | | | puc18 |
| L2486 | HT0527 | | head_neck | | | puc18 |
| L2491 | HT0559 | | head_neck | | | puc18 |
| L2497 | HT0618 | | head_neck | | | puc18 |
| L2499 | HT0622 | | head_neck | | | puc18 |
| L2504 | HT0636 | | head_neck | | | puc18 |
| L2528 | HT0713 | | head_neck | | | puc18 |
| L2630 | HT0865 | | head_neck | | | puc18 |
| L2647 | HT0894 | | head_neck | | | puc18 |
| L2652 | NIH_MGC_57 | glioblastoma | brain | | | pDNR-LIB (Clontech) |
| L2653 | NIH_MGC_58 | hypernephroma | kidney | | | pDNR-LIB (Clontech) |
| L2654 | NIH_MGC_9 | adenocarcinoma cell line | ovary | | | pOTB7 |
| L2655 | NIH_MGC_55 | from acute myelogenous | bone marrow | | | pDNR-LIB (Clontech) |
| | | leukemia | | | | |
| L2657 | NIH_MGC_54 | from chronic myelogenous | bone marrow | | | pDNR-LIB (Clontech) |
| | | leukemia | | | | |
| L2669 | NT0022 | | nervous_tumor | | | puc18 |
| L2670 | NT0023 | | nervous_tumor | | | puc18 |
| L2744 | FT0004 | | prostate_tumor | | | puc18 |
| L2759 | FT0028 | | prostate_tumor | | | puc18 |
| L2879 | AN0032 | | amnion_normal | | | puc18 |
| L2904 | BN0042 | | breast_normal | | | puc18 |
| L2906 | BN0047 | | breast_normal | | | puc18 |
| L2909 | BN0067 | | breast_normal | | | puc18 |
| L2910 | BN0070 | | breast_normal | | | puc18 |
| L3109 | ET0046 | | lung_tumor | | | puc18 |
| L3181 | MT0107 | | marrow | | | puc18 |
| L3215 | OT0083 | | ovary | | | puc18 |
| L3271 | FN0094 | | prostate_normal | | | puc18 |
| L3311 | FN0180 | | prostate_normal | | | puc18 |
| L3378 | TN0080 | | testis_normal | | | puc18 |
| L3387 | GKB | hepatocellular carcinoma | | | | pBluescript sk(−) |
| L3388 | GKC | hepatocellular carcinoma | | | | pBluescript sk(−) |
| L3391 | NIH_MGC_53 | carcinoma, cell line | bladder | | | pDNR-LIB (Clontech) |
| L3485 | GN0070 | | placenta_normal | | | puc18 |
| L3499 | HT0617 | | head_neck | | | puc18 |
| L3503 | HT0870 | | head_neck | | | puc18 |
| L3576 | TN0086 | | testis_normal | | | puc18 |
| L3643 | ADB | Adrenal gland | | | | pBluescript sk(−) |
| L3644 | ADC | Adrenal gland | | | | pBluescript sk(−) |
| L3645 | Cu | adrenal cortico adenoma | | | | pBluescript sk(−) |
| | | for Cushing''s syndrome | | | | |
| L3646 | DCA | | | | | pTriplEx2 |
| L3649 | DCB | | | | | pTriplEx2 |
| L3651 | FHTA | hypothalamus | | | | pTriplEx2 |
| L3652 | FHTB | hypothalamus | | | | pTriplEx2 |
| L3653 | HTB | Hypothalamus | | | | pBluescript sk(−) |
| L3655 | HTC | Hypothalamus | | | | pBluescript sk(−) |
| L3658 | cdA | pheochromocytoma | | | | pTriplEx2 |
| L3659 | CB | cord blood | | | | pBluescript |
| L3663 | NIH_MGC_60 | adenocarcinoma | prostate | | | pDNR-LIB (Clontech) |
| L3665 | NIH_MGC_75 | | kidney | | | pDNR-LIB (Clontech) |
| L3709 | CT0515 | | colon | | | puc18 |
| L3726 | GN0038 | | placenta_normal | | | puc18 |
| L3811 | NPC | pituitary | | | | pBluescript sk(−) |
| L3812 | NPD | pituitary | | | | pBluescript sk(−) |
| L3814 | BM | Bone marrow | | | | pTriplEx2 |
| L3815 | MDS | Bone marrow | | | | pTriplEx2 |
| L3816 | HEMBA1 | whole embryo, mainly | | | | pME18SFL3 |
| | | head | | | | |
| L3817 | HEMBB1 | whole embryo, mainly | | | | pME18SFL3 |
| | | body | | | | |
| L3818 | MAMMA1 | mammary gland | | | | pME18SFL3 |
| L3822 | NIH_MGC_59 | mucoepidermoid | lung | | | pDNR-LIB (Clontech) |
| | | carcinoma | | | | |
| L3824 | NT2RM2 | | | NT2 | | pME18SFL3 |
| L3825 | NT2RM4 | | | NT2 | | pME18SFL3 |
| L3826 | NT2RP1 | | | NT2 | | pUC19FL3 |
| L3827 | NT2RP2 | | | NT2 | | pME18SFL3 |
| L3828 | NT2RP3 | | | NT2 | | pME18SFL3 |
| L3829 | NT2RP4 | | | NT2 | | pME18SFL3 |
| L3831 | OVARC1 | ovary, tumor tissue | | | | pME18SFL3 |
| L3832 | PLACE1 | placenta | | | | pME18SFL3 |
| L3833 | PLACE2 | placenta | | | | pME18SFL3 |
| L3834 | PLACE3 | placenta | | | | pME18SFL3 |
| L3872 | NCI_CGAP_Skn1 | | skin, normal, 4 | | | pCMV-SPORT6 |
| | | | pooled sa | | | |
| L3904 | NCI_CGAP_Brn64 | glioblastoma with EGFR | brain | | | pCMV-SPORT6 |
| | | amplification | | | | |
| L3905 | NCI_CGAP_Brn67 | anaplastic | brain | | | pCMV-SPORT6 |
| | | oligodendroglioma with | | | | |
| | | 1p/19q loss | | | | |
| L4497 | NCI_CGAP_Br22 | invasive ductal carcinoma, | breast | | | pCMV-SPORT6 |
| | | 3 pooled samples | | | | |
| L4501 | NCI_CGAP_Sub8 | | | | | pT7T3D-Pac |
| | | | | | | (Pharmacia) with a |
| | | | | | | modified polylinker |
| L4556 | NCI_CGAP_HN13 | squamous cell carcinoma | tongue | | | pCMV-SPORT6 |
| L4559 | NCI_CGAP_Thy3 | follicular carcinoma | thyroid | | | pCMV-SPORT6 |
| L4560 | NCI_CGAP_Ut7 | tumor | uterus | | | pCMV-SPORT6 |
| L4747 | NCI_CGAP_Brn41 | oligodendroglioma | brain | | | pT7T3D-Pac |
| | | | | | | (Pharmacia) with a |
| | | | | | | modified polylinker |
| L5564 | NCI_CGAP_HN20 | | normal | | | pAMP1 |
| | | | head/neck | | | |
| | | | tissue | | | |
| L5565 | NCI_CGAP_Brn66 | glioblastoma with | brain | | | pCMV-SPORT6 |
| | | probably TP53 mutation | | | | |
| | | and witho | | | | |
| L5566 | NCI_CGAP_Brn70 | anaplastic | brain | | | pCMV-SPORT6.ccdb |
| | | oligodendroglioma | | | | |
| L5572 | NCI_CGAP_Co27 | adenocarcinoma | colon | | | pAMP1 |
| | | (mucinous component) | | | | |
| L5574 | NCI_CGAP_HN19 | normal epithelium | nasopharynx | | | pAMP10 |
| L5575 | NCI_CGAP_Brn65 | glioblastoma without | brain | | | pCMV-SPORT6 |
| | | EGFR amplification | | | | |
| L5622 | NCI_CGAP_Skn3 | | skin | | | pCMV-SPORT6 |
| L5623 | NCI_CGAP_Skn4 | squamous cell carcinoma | skin | | | pCMV-SPORT6 |

Description of Table 5

[0132] Table 5 provides a key to the OMIM reference identification numbers disclosed in Table 1B1, column 9. OMIM reference identification numbers (Column 1) were derived from Online Mendelian Inheritance in Man (Online Mendelian Inheritance in Man, OMIM. McKusick-Nathan Institute for Genetic Medicine, Johns Hopkins University (Baltimore, Md.) and National Center for Biotechnology Information, National Library of Medicine, (Bethesda, Md.) 2000. World Wide Web URL: http://www.ncbi.nlm.nih.gov/omim/). Column 2 provides diseases associated with the cytologic band disclosed in Table 1B.1, column 8, as determined using the Morbid Map database.

TABLE 5

| OMIM Reference | Description |
|---|---|
| 100710 | Myasthenic syndrome, slow-channel congenital, 601462 |
| 101000 | Meningioma, NF2-related, sporadic Schwannoma, sporadic |
| 101000 | Neurofibromatosis, type 2 |
| 101000 | Neurolemmomatosis |
| 101000 | Malignant mesothelioma, sporadic |
| 102200 | Somatotrophinoma |
| 102700 | Severe combined immunodeficiency due to ADA deficiency |
| 102700 | Hemolytic anemia due to ADA excess |
| 102770 | Myoadenylate deaminase deficiency |
| 103581 | Albright hereditary osteodystrophy-2 |
| 103600 | [Dysalbuminemic hyperthyroxinemia] |
| 103600 | [Dysalbuminemic hyperzincemia], 194470 |
| 103600 | Analbuminemia |
| 103950 | Emphysema due to alpha-2-macroglobulin deficiency |
| 104150 | [AFP deficiency, congenital] |
| 104150 | [Hereditary persistence of alpha-fetoprotein] |
| 104311 | Alzheimer disease-3 |
| 104500 | Amelogenesis imperfecta-2, hypoplastic local type |
| 106100 | Angioedema, hereditary |
| 106150 | Hypertension, essential, susceptibility to |
| 106150 | Preeclampsia, susceptibility to |
| 106165 | Hypertension, essential, 145500 |
| 106180 | Myocardial infarction, susceptibility to |
| 107250 | Anterior segment mesenchymal dysgenesis |
| 107300 | Antithrombin III deficiency |
| 107741 | Hyperlipoproteinemia, type III |
| 107777 | Diabetes insipidus, nephrogenic, autosomal recessive, 222000 |
| 107970 | Arrhythmogenic right ventricular dysplasia-1 |
| 108120 | Distal arthrogryposis-1 |
| 108725 | Atherosclerosis, susceptibility to |
| 108730 | Brody myopathy, 601003 |
| 108985 | Atrophia areata |
| 109150 | Machado-Joseph disease |
| 110100 | Blepharophimosis, epicanthus inversus, and ptosis, type 1 |
| 112250 | Bone dysplasia with medullary fibrosarcoma |
| 112410 | Hypertension with brachydactyly |
| 113900 | Heart block, progressive familial, type I |
| 114240 | Muscular dystrophy, limb-girdle, type 2A, 253600 |
| 114400 | Lynch cancer family syndrome II |
| 116806 | Colorectal cancer |
| 116860 | Cavernous angiomatous malformations |
| 117700 | [Hypoceruloplasminemia, hereditary] |
| 117700 | Hemosiderosis, systemic, due to aceruloplasminemia |
| 120280 | Stickler syndrome, type III |
| 120280 | Marshall syndrome, 154780 |
| 120550 | C1q deficiency, type A |
| 120570 | C1q deficiency, type B |
| 120575 | C1q deficiency, type C |
| 120700 | C3 deficiency |
| 120950 | C8 deficiency, type I |
| 120960 | C8 deficiency, type II |
| 122720 | Nicotine addiction, protection from |
| 122720 | Coumarin resistance, 122700 |
| 123000 | Craniometaphyseal dysplasia |
| 123270 | [Creatine kinase, brain type, ectopic expression of] |
| 123620 | Cataract, cerulean, type 2, 601547 |
| 123940 | White sponge nevus, 193900 |
| 126340 | Xeroderma pigmentosum, group D, 278730 |
| 126391 | DNA ligase I deficiency |
| 126451 | Schizophrenia, susceptibility to |
| 126650 | Chloride diarrhea, congenital, Finnish type, 214700 |
| 126650 | Colon cancer |
| 129900 | EEC syndrome-1 |
| 130500 | Elliptocytosis-1 |
| 131100 | Multiple endocrine neoplasia I |
| 131100 | Prolactinoma, hyperparathyroidism, carcinoid syndrome |
| 131100 | Carcinoid tumor of lung |
| 131210 | Atherosclerosis, susceptibility to |
| 133171 | [Erythrocytosis, familial], 133100 |
| 133200 | Erythrokeratodermia variabilis |
| 133450 | Neuroepithelioma |
| 133450 | Ewing sarcoma |
| 133780 | Vitreoretinopathy, exudative, familial |
| 134820 | Dysfibrinogenemia, alpha type, causing bleeding diathesis |
| 134820 | Dysfibrinogenemia, alpha type, causing recurrent thrombosis |
| 134820 | Amyloidosis, hereditary renal, 105200 |
| 134830 | Dysfibrinogenemia, beta type |
| 134850 | Dysfibrinogenemia, gamma type |
| 134850 | Hypofibrinogenemia, gamma type |
| 135700 | Fibrosis of extraocular muscles, congenital, 1 |
| 136132 | [Fish-odor syndrome], 602079 |
| 136836 | Fucosyltransferase-6 deficiency |
| 138079 | Hyperinsulinism, familial, 602485 |
| 138079 | MODY, type 2, 125851 |
| 138140 | Glucose transport defect, blood-brain barrier |
| 138190 | Diabetes mellitus, noninsulin-dependent |
| 138300 | Hemolytic anemia due to glutathione reductase deficiency |
| 138700 | [Apolipoprotein H deficiency] |
| 138720 | Bernard-Soulier syndrome, type B |
| 138981 | Pulmonary alveolar proteinosis, 265120 |
| 139250 | Isolated growth hormone deficiency, Illig type with absent GH and Kowarski |
| | type with bioinactive GH |
| 139350 | Epidermolytic hyperkeratosis, 113800 |
| 139350 | Keratoderma, palmoplantar, nonepidermolytic |
| 141750 | Alpha-thalassemia/mental retardation syndrome, type 1 |
| 141800 | Methemoglobinemias, alpha- |
| 141800 | Thalassemias, alpha- |
| 141800 | Erythremias, alpha- |
| 141800 | Heinz body anemias, alpha- |
| 141850 | Thalassemia, alpha- |
| 141850 | Erythrocytosis |
| 141850 | Heinz body anemia |
| 141850 | Hemoglobin H disease |
| 141850 | Hypochromic microcytic anemia |
| 143890 | Hypercholesterolemia, familial |
| 145001 | Hyperparathyroidism-jaw tumor syndrome |
| 145260 | Pseudohypoaldosteronism, type II |
| 145410 | Opitz G syndrome, type II |
| 145981 | Hypocalciuric hypercalcemia, type II |
| 146150 | Hypomelanosis of Ito |
| 147050 | Atopy |
| 147141 | Leukemia, acute lymphoblastic |
| 147200 | [Kappa light chain deficiency] |
| 147670 | Rabson-Mendenhall syndrome |
| 147670 | Diabetes mellitus, insulin-resistant, with acanthosis nigricans |
| 147670 | Leprechaunism |
| 147781 | Atopy, susceptibility to |
| 148040 | Epidermolysis bullosa simplex, Koebner, Dowling-Meara, and Weber- |
| | Cockayne types, 131900, 131760, 131800 |
| 148041 | Pachyonychia congenita, Jadassohn-Lewandowsky type, 167200 |
| 148043 | Meesmann corneal dystrophy, 122100 |
| 148070 | Liver disease, susceptibility to, from hepatotoxins or viruses |
| 148370 | Keratolytic winter erythema |
| 150200 | [Placental lactogen deficiency] |
| 150210 | Lactoferrin-deficient neutrophils, 245480 |
| 150250 | Larsen syndrome, autosomal dominant |
| 150270 | Laryngeal adductor paralysis |
| 150292 | Epidermolysis bullosa, Herlitz junctional type, 226700 |
| 151410 | Leukemia, chronic myeloid |
| 151440 | Leukemia, T-cell acute lymphoblastoid |
| 152760 | Hypogonadotropic hypogonadism due to GNRH deficiency, 227200 |
| 153454 | Ehlers-Danlos syndrome, type VI, 225400 |
| 153700 | Macular dystrophy, vitelliform type |
| 154275 | Malignant hyperthermia susceptibility 2 |
| 154276 | Malignant hyperthermia susceptibility 3 |
| 156850 | Cataract, congenital, with microphthalmia |
| 157147 | Abetalipoproteinemia, 200100 |
| 157640 | PEO with mitochondrial DNA deletions, type 1 |
| 160900 | Myotonic dystrophy |
| 161015 | Mitochondrial complex I deficiency, 252010 |
| 162200 | Neurofibromatosis, type 1 |
| 162200 | Watson syndrome, 193520 |
| 164009 | Leukemia, acute promyelocytic, NUMA/RARA type |
| 164500 | Spinocerebellar ataxia-7 |
| 164731 | Ovarian carcinoma, 167000 |
| 164920 | Piebaldism |
| 164920 | Mast cell leukemia |
| 164920 | Mastocytosis with associated hematologic disorder |
| 164953 | Liposarcoma |
| 165240 | Pallister-Hall syndrome, 146510 |
| 165240 | Postaxial polydactyly type A1, 174200 |
| 165240 | Greig cephalopolysyndactyly syndrome, 175700 |
| 165320 | Hepatocellular carcinoma |
| 166600 | Osteopetrosis, AD, type II |
| 168360 | Paraneoplastic sensory neuropathy |
| 168461 | Multiple myeloma, 254250 |
| 168461 | Parathyroid adenomatosis 1 |
| 168461 | Centrocytic lymphoma |
| 168468 | Metaphyseal chondrodysplasia, Murk Jansen type, 156400 |
| 168470 | Humoral hypercalcemia of malignancy |
| 169600 | Hailey-Hailey disease |
| 170500 | Myotonia congenita, atypical acetazolamide-responsive |
| 170500 | Paramyotonia congenita, 168300 |
| 170500 | Hyperkalemic periodic paralysis |
| 170650 | Periodontitis, juvenile |
| 170995 | Zellweger syndrome-2 |
| 171760 | Hypophosphatasia, adult, 146300 |
| 171760 | Hypophosphatasia, infantile, 241500 |
| 172471 | Glycogenosis, hepatic, autosomal |
| 173360 | Thrombophilia due to excessive plasminogen activator inhibitor |
| 173360 | Hemorrhagic diathesis due to PAI1 deficiency |
| 173610 | Platelet alpha/delta storage pool deficiency |
| 173850 | Polio, susceptibility to |
| 173870 | Xeroderma pigmentosum |
| 173870 | Fanconi anemia |
| 174900 | Polyposis, juvenile intestinal |
| 176100 | Porphyria cutanea tarda |
| 176100 | Porphyria, hepatoerythropoietic |
| 176830 | Obesity, adrenal insufficiency, and red hair |
| 176830 | ACTH deficiency |
| 176960 | Pituitary tumor, invasive |
| 178300 | Ptosis, hereditary congenital, 1 |
| 178640 | Pulmonary alveolar proteinosis, congenital, 265120 |
| 180100 | Retinitis pigmentosa-1 |
| 180104 | Retinitis pigmentosa-9 |
| 180105 | Retinitis pigmentosa-10 |
| 180297 | Anemia, hemolytic, Rh-null, suppressor type, 268150 |
| 180380 | Night blindness, congenital stationery, rhodopsin-related |
| 180380 | Retinitis pigmentosa, autosomal recessive |
| 180380 | Retinitis pigmentosa-4, autosomal dominant |
| 180721 | Retinitis pigmentosa, digenic |
| 180840 | Susceptibility to IDDM |
| 181405 | Scapuloperoneal spinal muscular atrophy, New England type |
| 181430 | Scapuloperoneal syndrome, myopathic type |
| 181600 | Sclerotylosis |
| 182138 | Anxiety-related personality traits |
| 182279 | Prader-Willi syndrome |
| 182280 | Small-cell cancer of lung |
| 182381 | Renal glucosuria, 253100 |
| 182600 | Spastic paraplegia-3A |
| 182601 | Spastic paraplegia-4 |
| 182870 | Spherocytosis-1 |
| 182870 | Elliptocytosis-3 |
| 182870 | Anemia, neonatal hemolytic, fatal and near-fatal |
| 185430 | Atherosclerosis, susceptibility to |
| 186580 | Arthrocutaneouveal granulomatosis |
| 186921 | Leukemia, T-cell acute lymphoblastic |
| 187040 | Leukemia-1, T-cell acute lymphoblastic |
| 188070 | Bleeding disorder due to defective thromboxane A2 receptor |
| 188450 | Goiter, adolescent multinodular |
| 188450 | Goiter, nonendemic, simple |
| 188450 | Hypothyroidism, hereditary congenital |
| 188826 | Sorsby fundus dystrophy, 136900 |
| 189800 | Preeclampsia/eclampsia |
| 190900 | Colorblindness, tritan |
| 191092 | Tuberous sclerosis-2 |
| 191181 | Cervical carcinoma |
| 191540 | [Urate oxidase deficiency] |
| 192340 | Diabetes insipidus, neurohypophyseal, 125700 |
| 193100 | Hypophosphatemic rickets, autosomal dominant |
| 193235 | Vitreoretinopathy, neovascular inflammatory |
| 193400 | von Willebrand disease |
| 200990 | Acrocallosal syndrome |
| 203200 | Albinism, ocular, autosomal recessive |
| 203200 | Albinism, oculocutaneous, type II |
| 203500 | Alkaptonuria |
| 203740 | Alpha-ketoglutarate dehydrogenase deficiency |
| 203800 | Alstrom syndrome |
| 207750 | Hyperlipoproteinemia, type Ib |
| 208250 | Jacobs syndrome |
| 209901 | Bardet-Biedl syndrome 1 |
| 216900 | Achromatopsia |
| 219800 | Cystinosis, nephropathic |
| 222800 | Hemolytic anemia due to bisphosphoglycerate mutase deficiency |
| 224120 | Dyserythropoietic anemia, contenital, type I |
| 225500 | Ellis-van Creveld syndrome |
| 227220 | [Eye color, brown] |
| 227646 | Fanconi anemia, type D |
| 229800 | [Fructosuria] |
| 230000 | Fucosidosis |
| 231550 | Achalasia-addisonianism-alacrimia syndrome |
| 231670 | Glutaricaciduria, type I |
| 231950 | Glutathioninuria |
| 232050 | Propionicacidemia, type II or pccB type |
| 232300 | Glycogen storage disease II |
| 232400 | Glycogen storage disease IIIa |
| 232400 | Glycogen storage disease IIIb |
| 232600 | McArdle disease |
| 233700 | Chronic granulomatous disease due to deficiency of NCF-1 |
| 234200 | Neurodegeneration with brain iron accumulation |
| 236730 | Urofacial syndrome |
| 238600 | Chylomicronemia syndrome, familial |
| 238600 | Combined hyperlipemia, familial |
| 238600 | Hyperlipoproteinemia I |
| 238600 | Lipoprotein lipase deficiency |
| 239100 | Van Buchem disease |
| 239500 | Hyperprolinemia, type I |
| 240400 | Scurvy |
| 245200 | Krabbe disease |
| 246900 | Lipoamide dehydrogenase deficiency |
| 247640 | Leukemia, acute lymphoblastic |
| 248510 | Mannosidosis, beta- |
| 248600 | Maple syrup urine disease, type Ia |
| 248611 | Maple syrup urine disease, type Ib |
| 249000 | Meckel syndrome |
| 249270 | Thiamine-responsive megaloblastic anemia |
| 251000 | Methylmalonicaciduria, mutase deficiency type |
| 251600 | Microphthalmia, autosomal recessive |
| 252900 | Sanfilippo syndrome, type A |
| 253250 | Mulibrey nanism |
| 254210 | Myasthenia gravis, familial infantile |
| 255800 | Schwartz-Jampel syndrome |
| 256700 | Neuroblastoma |
| 257220 | Niemann-Pick disease, type C |
| 257220 | Niemann-Pick disease, type D, 257250 |
| 258501 | 3-methylglutaconicaciduria, type III |
| 259700 | Osteopetrosis, recessive |
| 259770 | Osteoporosis-pseudoglioma syndrome |
| 261510 | Pseudo-Zellweger syndrome |
| 261670 | Myopathy due to phosphoglycerate mutase deficiency |
| 263200 | Polycystic kidney disease, autosomal recessive |
| 266150 | Pyruvate carboxylase deficiency |
| 266300 | [Hair color, red] |
| 266600 | Inflammatory bowel disease-1 |
| 270100 | Situs inversus viscerum |
| 271900 | Canavan disease |
| 274270 | Thymine-uraciluria |
| 274270 | Fluorouracil toxicity, sensitivity to |
| 275350 | Transcobalamin II deficiency |
| 276900 | Usher syndrome, type 1A |
| 276902 | Usher syndrome, type 3 |
| 276903 | Usher syndrome, type 1B |
| 276903 | Deafness, autosomal dominant 11, neurosensory, 601317 |
| 276903 | Deafness, autosomal recessive 2, neurosensory, 600060 |
| 277730 | Wernicke-Korsakoff syndrome, susceptibility to |
| 600045 | Xeroderma pigmentosum, group E, subtype 2 |
| 600079 | Colon cancer |
| 600101 | Deafness, autosomal dominant 2 |
| 600140 | Rubenstein-Taybi syndrome, 180849 |
| 600143 | Epilepsy, progressive, with mental retardation |
| 600160 | Melanoma, 155601 |
| 600163 | Long QT syndrome-3 |
| 600179 | Leber congenital amaurosis, type I, 204000 |
| 600194 | Ichthyosis bullosa of Siemens, 146800 |
| 600211 | Cleidocranial dysplasia, 119600 |
| 600221 | Venous malformations, multiple cutaneous and mucosal, 600195 |
| 600231 | Palmoplantar keratoderma, Bothnia type |
| 600273 | Polycystic kidney disease, infantile severe, with tuberous sclerosis |
| 600276 | Cerebral arteriopathy with subcortical infarcts and leukoencephalopathy, |
| | 125310 |
| 600309 | Atrioventricular canal defect-1 |
| 600319 | Diabetes mellitus, insulin-dependent, 4 |
| 600512 | Epilepsy, partial |
| 600528 | CPT deficiency, hepatic, type I, 255120 |
| 600536 | Myopathy, congenital |
| 600593 | Craniosynostosis, Adelaide type |
| 600650 | Myopathy due to CPT II deficiency, 255110 |
| 600650 | CPT deficiency, hepatic, type II, 600649 |
| 600698 | Salivary adenoma |
| 600698 | Uterine leiomyoma |
| 600698 | Lipoma |
| 600698 | Lipomatosis, mutiple, 151900 |
| 600701 | Lipoma |
| 600722 | Ceroid lipofuscinosis, neuronal, variant juvenile type, with granular |
| | osmiophilic deposits |
| 600722 | Ceroid lipofuscinosis, neuronal-1, infantile, 256730 |
| 600759 | Alzheimer disease-4 |
| 600760 | Pseudohypoaldosteronism, type I, 264350 |
| 600760 | Liddle syndrome, 177200 |
| 600761 | Pseudohypoaldosteronism, type I, 264350 |
| 600761 | Liddle syndrome, 177200 |
| 600808 | Enuresis, nocturnal, 2 |
| 600839 | Bartter syndrome, 241200 |
| 600850 | Schizophrenia disorder-4 |
| 600881 | Cataract, congenital, zonular, with sutural opacities |
| 600882 | Charcot-Marie-Tooth neuropathy-2B |
| 600900 | Muscular dystrophy, limb-girdle, type 2E |
| 600956 | Persistent Mullerian duct syndrome, type II, 261550 |
| 600957 | Persistent Mullerian duct syndrome, type I, 261550 |
| 600971 | Deafness, autosomal recessive 6 |
| 600977 | Cone dystrophy, progressive |
| 600983 | Pseudohypoaldosteronism type I, autosomal dominant, 177735 |
| 600995 | Nephrotic syndrome, idiopathic, steroid-resistant |
| 600996 | Arrhythmogenic right ventricular dysplasia-2 |
| 601154 | Cardiomyopathy, dilated, 1E |
| 601199 | Neonatal hyperparathyroidism, 239200 |
| 601199 | Hypocalcemia, autosomal dominant, 601198 |
| 601199 | Hypocalciuric hypercalcemia, type I, 145980 |
| 601202 | Cataract, anterior polar-2 |
| 601208 | Insulin-dependent diabetes mellitus-11 |
| 601226 | Progressive external ophthalmoplegia, type 2 |
| 601238 | Cerebellar ataxia, Cayman type |
| 601284 | Hereditary hemorrhagic telangiectasia-2, 600376 |
| 601313 | Polycystic kidney disease, adult type I, 173900 |
| 601385 | Prostate cancer |
| 601414 | Retinitis pigmentosa-18 |
| 601458 | Inflammatory bowel disease-2 |
| 601471 | Moebius syndrome-2 |
| 601606 | Trichoepithelioma, multiple familial |
| 601623 | Angelman syndrome |
| 601649 | Blepharophimosis, epicanthus inversus, and ptosis, type 2 |
| 601650 | Paraganglioma, familial nonchromaffin, 2 |
| 601652 | Glaucoma 1A, primary open angle, juvenile-onset, 137750 |
| 601669 | Hirschsprung disease, one form |
| 601682 | Glaucoma 1C, primary open angle |
| 601690 | Platelet-activating factor acetylhydrolase deficiency |
| 601691 | Retinitis pigmentosa-19, 601718 |
| 601691 | Stargardt disease-1, 248200 |
| 601691 | Cone-rod dystrophy 3 |
| 601691 | Fundus flavimaculatus with macular dystrophy, 248200 |
| 601718 | Retinitis pigmentosa-19 |
| 601744 | Systemic lupus erythematosus, susceptibility to, 1 |
| 601769 | Osteoporosis, involutional |
| 601769 | Rickets, vitamin D-resistant, 277440 |
| 601777 | Cone dystrophy, progessive |
| 601785 | Carbohydrate-deficient glycoprotein syndrome, type I, 212065 |
| 601800 | [Hair color, brown] |
| 601843 | Hypothyroidism, congenital, 274400 |
| 601846 | Muscular dystrophy with rimmed vacuoles |
| 601884 | [High bone mass] |
| 601889 | Lymphoma, diffuse large cell |
| 601928 | Monilethrix, 158000 |
| 601954 | Muscular dystrophy, limb-girdle, type 2G |
| 601975 | Ectodermal dysplasia/skin fragility syndrome |
| 602025 | Obesity/hyperinsulinism, susceptibility to |
| 602066 | Convulsions, infantile and paroxysmal choreoathetosis |
| 602092 | Deafness, autosomal recessive 18 |
| 602094 | Lipodystrophy, familial partial |
| 602096 | Alzheimer disease-5 |
| 602099 | Amytrophic lateral sclerosis-5 |
| 602116 | Glioma |
| 602117 | Prader-Willi syndrome |
| 602134 | Tremor, familial essential, 2 |
| 602136 | Refsum disease, infantile, 266510 |
| 602136 | Zellweger syndrome-1, 214100 |
| 602136 | Adrenoleukodystrophy, neonatal, 202370 |
| 602153 | Monilethrix, 158000 |
| 602216 | Peutz-Jeghers syndrome, 175200 |
| 602363 | Ellis-van Creveld-like syndrome |
| 602403 | Alzheimer disease, susceptibility to |
| 602447 | Coronary artery disease, susceptibility to |
| 602477 | Febrile convulsions, familial, 2 |
| 602568 | Homocystinuria-megaloblastic anemia, cbl E type, 236270 |
| 602629 | Dystonia-6, torsion |

Mature Polypeptides

[0133] The present invention also encompasses mature forms of a polypeptide having the amino acid sequence of SEQ ID NO:Y and/or the amino acid sequence encoded by the cDNA in a deposited clone. Polynucleotides encoding the mature forms (such as, for example, the polynucleotide sequence in SEQ ID NO:X and/or the polynucleotide sequence contained in the cDNA of a deposited clone) are also encompassed by the invention. Moreover, fragments or variants of these polypeptides (such as, fragments as described herein, polypeptides at least 80%, 85%, 90%, 95%, 96%, 97%, 98%, 99%, or 100% identical to these polypeptides, or polypeptides encoded by a polynucleotide that hybridizes under stringent conditions to the complementary strand of the polynucleotide encoding these polypeptides) are also encompassed by the invention. In preferred embodiments, these fragments or variants retain one or more functional acitivities of the full-length or mature form of the polypeptide (e.g., biological activity (such as, for example, activity useful in detecting, preventing, diagnosing, prognosticating, treating, and/or ameliorating hematopoietic and hematologic diseases and disorders), antigenicity (ability to bind, or compete with a polypeptide of the invention for binding, to an anti-polypeptide of the invention antibody), immunogenicity (ability to generate antibody which binds to a specific polypeptide of the invention), ability to form multimers with polypeptides of the invention, and ability to bind to a receptor or ligand for a polypeptide of the invention). Antibodies that bind the polypeptides of the invention, and polynucleotides encoding these polypeptides are also encompassed by the invention.

[0134] According to the signal hypothesis, proteins secreted by mammalian cells have a signal or secretary leader sequence which is cleaved from the mature protein once export of the growing protein chain across the rough endoplasmic reticulum has been initiated. Most mammalian cells and even insect cells cleave secreted proteins with the same specificity. However, in some cases, cleavage of a secreted protein is not entirely uniform, which results in two or more mature species of the protein. Further, it has long been known that cleavage specificity of a secreted protein is ultimately determined by the primary structure of the complete protein, that is, it is inherent in the amino acid sequence of the polypeptide.

[0135] Methods for predicting whether a protein has a signal sequence, as well as the cleavage point for that sequence, are available. For instance, the method of McGeoch, Virus Res. 3:271-286 (1985), uses the information from a short N-terminal charged region and a subsequent uncharged region of the complete (uncleaved) protein. The method of von Heinje, Nucleic Acids Res. 14:4683-4690 (1986) uses the information from the residues surrounding the cleavage site, typically residues −13 to +2, where +1 indicates the amino terminus of the secreted protein. The accuracy of predicting the cleavage points of known mammalian secretory proteins for each of these methods is in the range of 75-80%. (von Heinje, supra.) However, the two methods do not always produce the same predicted cleavage point(s) for a given protein.

[0136] In the present case, the deduced amino acid sequence of the secreted polypeptide was analyzed by a computer program called SignalP (Henrik Nielsen et al., Protein Engineering 10:1-6 (1997)), which predicts the cellular location of a protein based on the amino acid sequence. As part of this computational prediction of localization, the methods of McGeoch and von Heinje are incorporated. The analysis of the amino acid sequences of the secreted proteins described herein by this program provided the results shown in Table 1A.

[0137] In specific embodiments, polypeptides of the invention comprise, or alternatively consist of, the predicted mature form of the polypeptide as delineated in columns 14 and 15 of Table 1A. Moreover, fragments or variants of these polypeptides (such as, fragments as described herein, polypeptides at least 80%, 85%, 90%, 95%, 96%, 97%, 98%, 99%, or 100% identical to these polypeptides, or polypeptides encoded by a polynucleotide that hybridizes under stringent conditions to the complementary strand of the polynucleotide encoding these polypeptides) are also encompassed by the invention. In preferred embodiments, these fragments or variants retain one or more functional acitivities of the full-length or mature form of the polypeptide (e.g., biological activity (such as, for example, activity useful in detecting, preventing, diagnosing, prognosticating, treating, and/or ameliorating hematopoietic and hematologic diseases and disorders), antigenicity (ability to bind, or compete with a polypeptide of the invention for binding, to an anti-polypeptide of the invention antibody), immunogenicity (ability to generate antibody which binds to a specific polypeptide of the invention), ability to form multimers with polypeptides of the invention, and ability to bind to a receptor or ligand for a polypeptide of the invention). Antibodies that bind the polypeptides of the invention, and polynucleotides encoding these polypeptides are also encompassed by the invention.

[0138] Polynucleotides encoding proteins comprising, or consisting of, the predicted mature form of polypeptides of the invention (e.g., polynucleotides having the sequence of SEQ ID NO: X (Table 1A, column 4), the sequence delineated in columns 7 and 8 of Table 1A, and a sequence encoding the mature polypeptide delineated in columns 14 and 15 of Table 1A (e.g., the sequence of SEQ ID NO:X encoding the mature polypeptide delineated in columns 14 and 15 of Table 1)) are also encompassed by the invention, as are fragments or variants of these polynucleotides (such as, fragments as described herein, polynucleotides at least 80%, 85%, 90%, 95%, 96%, 97%, 98%, 99%, or 100% identical to these polyncueotides, and nucleic acids which hybridizes under stringent conditions to the complementary strand of the polynucleotide).

[0139] As one of ordinary skill would appreciate, however, cleavage sites sometimes vary from organism to organism and cannot be predicted with absolute certainty. Accordingly, the present invention provides secreted polypeptides having a sequence shown in SEQ ID NO:Y which have an N-terminus beginning within 15 residues of the predicted cleavage point (i.e., having 1, 2, 3, 4, 5, 6, 7, 8, 9, 10, 11, 12, 13, 14, or 15 more or less contiguous residues of SEQ ID NO:Y at the N-terminus when compared to the predicted mature form of the polypeptide (e.g., the mature polypeptide delineated in columns 14 and 15 of Table 1). Similarly, it is also recognized that in some cases, cleavage of the signal sequence from a secreted protein is not entirely uniform, resulting in more than one secreted species. These polypeptides, and the polynucleotides encoding such polypeptides, are contemplated by the present invention.

[0140] Moreover, the signal sequence identified by the above analysis may not necessarily predict the naturally occurring signal sequence. For example, the naturally occurring signal sequence may be further upstream from the predicted signal sequence. However, it is likely that the predicted signal sequence will be capable of directing the secreted protein to the ER. Nonetheless, the present invention provides the mature protein produced by expression of the polynucleotide sequence of SEQ ID NO:X and/or the polynucleotide sequence contained in the cDNA of a deposited clone, in a mammalian cell (e.g., COS cells, as desribed below). These polypeptides, and the polynucleotides encoding such polypeptides, are contemplated by the present invention.

Polynucleotide and Polypeptide Variants

[0141] The present invention is also directed to variants of the polynucleotide sequence disclosed in SEQ ID NO:X or the complementary strand thereto, nucleotide sequences encoding the polypeptide of SEQ ID NO:Y, the nucleotide sequence of SEQ ID NO:X that encodes the polypeptide sequence as defined in columns 13 and 14 of Table 1A, nucleotide sequences encoding the polypeptide sequence as defined in columns 13 and 14 of Table 1A, the nucleotide sequence of SEQ ID NO:X encoding the polypeptide sequence as defined in Table 1B, nucleotide sequences encoding the polypeptide as defined in Table 1B, the nucleotide sequence as defined in columns 8 and 9 of Table 2, nucleotide sequences encoding the polypeptide encoded by the nucleotide sequence as defined in columns 8 and 9 of Table 2, the nucleotide sequence as defined in column 6 of Table 1C, nucleotide sequences encoding the polypeptide encoded by the nucleotide sequence as defined in column 6 of Table 1C, the cDNA sequence contained in ATCC Deposit No:Z, nucleotide sequences encoding the polypeptide encoded by the cDNA sequence contained in ATCC Deposit No:Z, and/or nucleotide sequences encoding a mature (secreted) polypeptide encoded by the cDNA sequence contained in ATCC Deposit No:Z.

[0142] The present invention also encompasses variants of the polypeptide sequence disclosed in SEQ ID NO:Y, the polypeptide as defined in columns 13 and 14 of Table 1A, the polypeptide sequence as defined in Table 1B, a polypeptide sequence encoded by the polynucleotide sequence in SEQ ID NO:X, a polypeptide sequence encoded by the nucleotide sequence as defined in columns 8 and 9 of Table 2, a polypeptide sequence encoded by the nucleotide sequence as defined in column 6 of Table 1C, a polypeptide sequence encoded by the complement of the polynucleotide sequence in SEQ ID NO:X, the polypeptide sequence encoded by the cDNA sequence contained in ATCC Deposit No:Z and/or a mature (secreted) polypeptide encoded by the cDNA sequence contained in ATCC Deposit No:Z.

[0143] “Variant” refers to a polynucleotide or polypeptide differing from the polynucleotide or polypeptide of the present invention, but retaining essential properties thereof. Generally, variants are overall closely similar, and, in many regions, identical to the polynucleotide or polypeptide of the present invention.

[0144] Thus, one aspect of the invention provides an isolated nucleic acid molecule comprising, or alternatively consisting of, a polynucleotide having a nucleotide sequence selected from the group consisting of: (a) a nucleotide sequence described in SEQ ID NO:X or contained in the cDNA sequence of ATCC Deposit No:Z; (b) a nucleotide sequence in SEQ ID NO:X or the cDNA in ATCC Deposit No:Z which encodes the complete amino acid sequence of SEQ ID NO:Y or the complete amino acid sequence encoded by the cDNA in ATCC Deposit No:Z; (c) a nucleotide sequence in SEQ ID NO:X or the cDNA in ATCC Deposit No:Z which encodes a mature polypeptide (i.e., a secreted polypeptide (e.g., as delineated in columns 14 and 15 of Table 1A)); (d) a nucleotide sequence in SEQ ID NO:X or the cDNA sequence of ATCC Deposit No:Z, which encodes a biologically active fragment of a polypeptide; (e) a nucleotide sequence in SEQ ID NO:X or the cDNA sequence of ATCC Deposit No:Z, which encodes an antigenic fragment of a polypeptide; (f) a nucleotide sequence encoding a polypeptide comprising the complete amino acid sequence of SEQ ID NO:Y or the complete amino acid sequence encoded by the cDNA in ATCC Deposit No:Z; (g) a nucleotide sequence encoding a mature polypeptide of the amino acid sequence of SEQ ID NO:Y (i.e., a secreted polypeptide (e.g., as delineated in columns 14 and 15 of Table 1A)) or a mature polypeptide of the amino acid sequence encoded by the cDNA in ATCC Deposit No:Z; (h) a nucleotide sequence encoding a biologically active fragment of a polypeptide having the complete amino acid sequence of SEQ ID NO:Y or the complete amino acid sequence encoded by the cDNA in ATCC Deposit No:Z; (i) a nucleotide sequence encoding an antigenic fragment of a polypeptide having the complete amino acid sequence of SEQ ID NO:Y or the complete amino acid sequence encoded by the cDNA in ATCC Deposit No:Z; and (j) a nucleotide sequence complementary to any of the nucleotide sequences in (a), (b), (c), (d), (e), (f), (g), (h), or (i) above.

[0145] The present invention is also directed to nucleic acid molecules which comprise, or alternatively consist of, a nucleotide sequence which is at least 80%, 85%, 90%, 95%, 96%, 97%, 98%, 99% or 100%, identical to, for example, any of the nucleotide sequences in (a), (b), (c), (d), (e), (f), (g), (h), (i), or (j) above, the nucleotide coding sequence in SEQ ID NO:X or the complementary strand thereto, the nucleotide coding sequence of the cDNA contained in ATCC Deposit No:Z or the complementary strand thereto, a nucleotide sequence encoding the polypeptide of SEQ ID NO:Y, a nucleotide sequence encoding a polypeptide sequence encoded by the nucleotide sequence in SEQ ID NO:X, a polypeptide sequence encoded by the complement of the polynucleotide sequence in SEQ ID NO:X, a nucleotide sequence encoding the polypeptide encoded by the cDNA contained in ATCC Deposit No:Z, the nucleotide coding sequence in SEQ ID NO:X as defined in columns 8 and 9 of Table 2 or the complementary strand thereto, a nucleotide sequence encoding the polypeptide encoded by the nucleotide sequence in SEQ ID NO:X as defined in columns 8 and 9 of Table 2 or the complementary strand thereto, the nucleotide coding sequence in SEQ ID NO:B as defined in column 6 of Table 1C or the complementary strand thereto, a nucleotide sequence encoding the polypeptide encoded by the nucleotide sequence in SEQ ID NO:B as defined in column 6 of Table 1C or the complementary strand thereto, the nucleotide sequence in SEQ ID NO:X encoding the polypeptide sequence as defined in Table 1B or the complementary strand thereto, nucleotide sequences encoding the polypeptide as defined in Table 1B or the complementary strand thereto, and/or polynucleotide fragments of any of these nucleic acid molecules (e.g., those fragments described herein). Polynucleotides which hybridize to the complement of these nucleic acid molecules under stringent hybridization conditions or alternatively, under lower stringency conditions, are also encompassed by the invention, as are polypeptides encoded by these polynucleotides and nucleic acids.

[0146] In a preferred embodiment, the invention encompasses nucleic acid molecules which comprise, or alternatively, consist of a polynucleotide which hybridizes under stringent hybridization conditions, or alternatively, under lower stringency conditions, to a polynucleotide in (a), (b), (c), (d), (e), (f), (g), (h), or (i), above, as are polypeptides encoded by these polynucleotides. In another preferred embodiment, polynucleotides which hybridize to the complement of these nucleic acid molecules under stringent hybridization conditions, or alternatively, under lower stringency conditions, are also encompassed by the invention, as are polypeptides encoded by these polynucleotides.

[0147] In another embodiment, the invention provides a purified protein comprising, or alternatively consisting of, a polypeptide having an arino acid sequence selected from the group consisting of: (a) the complete amino acid sequence of SEQ ID NO:Y or the complete amino acid sequence encoded by the cDNA in ATCC Deposit No:Z; (b) the amino acid sequence of a mature (secreted) form of a polypeptide having the amino acid sequence of SEQ ID NO:Y (e.g., as delineated in columns 14 and 15 of Table 1A) or a mature form of the amino acid sequence encoded by the cDNA in ATCC Deposit No:Z nature; (c) the amino acid sequence of a biologically active fragment of a polypeptide having the complete amino acid sequence of SEQ ID NO:Y or the complete amino acid sequence encoded by the cDNA in ATCC Deposit No:Z; and (d) the amino acid sequence of an antigenic fragment of a polypeptide having the complete amino acid sequence of SEQ ID NO:Y or the complete amino acid sequence encoded by the cDNA in ATCC Deposit No:Z.

[0148] The present invention is also directed to proteins which comprise, or alternatively consist of, an amino acid sequence which is at least 80%, 85%, 90%, 95%, 96%, 97%, 98%, 99% or 100%, identical to, for example, any of the amino acid sequences in (a), (b), (c), or (d), above, the amino acid sequence shown in SEQ ID NO:Y, the amino acid sequence encoded by the cDNA contained in ATCC Deposit No:Z, the amino acid sequence of the polypeptide encoded by the nucleotide sequence in SEQ ID NO:X as defined in columns 8 and 9 of Table 2, the amino acid sequence of the polypeptide encoded by the nucleotide sequence in SEQ ID NO:B as defined in column 6 of Table 1C, the amino acid sequence as defined in Table 1B, an amino acid sequence encoded by the nucleotide sequence in SEQ ID NO:X, and an amino acid sequence encoded by the complement of the polynucleotide sequence in SEQ ID NO:X. Fragments of these polypeptides are also provided (e.g., those fragments described herein). Further proteins encoded by polynucleotides which hybridize to the complement of the nucleic acid molecules encoding these amino acid sequences under stringent hybridization conditions or alternatively, under lower stringency conditions, are also encompassed by the invention, as are the polynucleotides encoding these proteins.

[0149] By a nucleic acid having a nucleotide sequence at least, for example, 95% “identical” to a reference nucleotide sequence of the present invention, it is intended that the nucleotide sequence of the nucleic acid is identical to the reference sequence except that the nucleotide sequence may include up to five point mutations per each 100 nucleotides of the reference nucleotide sequence encoding the polypeptide. In other words, to obtain a nucleic acid having a nucleotide sequence at least 95% identical to a reference nucleotide sequence, up to 5% of the nucleotides in the reference sequence may be deleted or substituted with another nucleotide, or a number of nucleotides up to 5% of the total nucleotides in the reference sequence may be inserted into the reference sequence. The query sequence may be an entire sequence referred to in Table 1B or 2 as the ORF (open reading frame), or any fragment specified as described herein.

[0150] As a practical matter, whether any particular nucleic acid molecule or polypeptide is at least 80%, 85%, 90%, 95%, 96%, 97%, 98% or 99% identical to a nucleotide sequence of the present invention can be determined conventionally using known computer programs. A preferred method for determining the best overall match between a query sequence (a sequence of the present invention) and a subject sequence, also referred to as a global sequence alignment, can be determined using the FASTDB computer program based on the algorithm of Brutlag et al. (Comp. App. Biosci. 6:237-245 (1990)). In a sequence alignment the query and subject sequences are both DNA sequences. An RNA sequence can be compared by converting U's to T's. The result of said global sequence alignment is expressed as percent identity. Preferred parameters used in a FASTDB alignment of DNA sequences to calculate percent identity are: Matrix=Unitary, k-tuple=4, Mismatch Penalty=1, Joining Penalty=30, Randomization Group Length=0, Cutoff Score=1, Gap Penalty=5, Gap Size Penalty 0.05, Window Size=500 or the length of the subject nucleotide sequence, whichever is shorter.

[0151] If the subject sequence is shorter than the query sequence because of 5′ or 3′ deletions, not because of internal deletions, a manual correction must be made to the results. This is because the FASTDB program does not account for 5′ and 3′ truncations of the subject sequence when calculating percent identity. For subject sequences truncated at the 5′ or 3′ ends, relative to the query sequence, the percent identity is corrected by calculating the number of bases of the query sequence that are 5′ and 3′ of the subject sequence, which are not matched/aligned, as a percent of the total bases of the query sequence. Whether a nucleotide is matched/aligned is determined by results of the FASTDB sequence alignment. This percentage is then subtracted from the percent identity, calculated by the above FASTDB program using the specified parameters, to arrive at a final percent identity score. This corrected score is what is used for the purposes of the present invention. Only bases outside the 5′ and 3′ bases of the subject sequence, as displayed by the FASTDB alignment, which are not matched/aligned with the query sequence, are calculated for the purposes of manually adjusting the percent identity score.

[0152] For example, a 90 base subject sequence is aligned to a 100 base query sequence to determine percent identity. The deletions occur at the 5′ end of the subject sequence and therefore, the FASTDB alignment does not show a matched/alignment of the first 10 bases at 5′ end. The 10 unpaired bases represent 10% of the sequence (number of bases at the 5′ and 3′ ends not matched/total number of bases in the query sequence) so 10% is subtracted from the percent identity score calculated by the FASTDB program. If the remaining 90 bases were perfectly matched the final percent identity would be 90%. In another example, a 90 base subject sequence is compared with a 100 base query sequence. This time the deletions are internal deletions so that there are no bases on the 5′ or 3′ of the subject sequence which are not matched/aligned with the query. In this case the percent identity calculated by FASTDB is not manually corrected. Once again, only bases 5′ and 3′ of the subject sequence which are not matched/aligned with the query sequence are manually corrected for. No other manual corrections are to be made for the purposes of the present invention.

[0153] By a polypeptide having an amino acid sequence at least, for example, 95% “identical” to a query amino acid sequence of the present invention, it is intended that the amino acid sequence of the subject polypeptide is identical to the query sequence except that the subject polypeptide sequence may include up to five amino acid alterations per each 100 amino acids of the query amino acid sequence. In other words, to obtain a polypeptide having an amino acid sequence at least 95% identical to a query amino acid sequence, up to 5% of the amino acid residues in the subject sequence may be inserted, deleted, (indels) or substituted with another amino acid. These alterations of the reference sequence may occur at the amino or carboxy terminal positions of the reference amino acid sequence or anywhere between those terminal positions, interspersed either individually among residues in the reference sequence or in one or more contiguous groups within the reference sequence.

[0154] As a practical matter, whether any particular polypeptide is at least 80%, 85%, 90%, 95%, 96%, 97%, 98% or 99% identical to, for instance, the amino acid sequence of a polypeptide referred to in Table 1A (e.g., the amino acid sequence delineated in columns 14 and 15) or a fragment thereof, Table 1B.1 (e.g., the amino acid sequence identified in column 6) or a fragment thereof, Table 2 (e.g., the amino acid sequence of the polypeptide encoded by the polynucleotide sequence defined in columns 8 and 9 of Table 2) or a fragment thereof, the amino acid sequence of the polypeptide encoded by the polynucleotide sequence in SEQ ID NO:B as defined in column 6 of Table 1C or a fragment thereof, the amino acid sequence of the polypeptide encoded by the nucleotide sequence in SEQ ID NO:X or a fragment thereof, or the amino acid sequence of the polypeptide encoded by cDNA contained in ATCC Deposit No:Z, or a fragment thereof, the amino acid sequence of a mature (secreted) polypeptide encoded by cDNA contained in ATCC Deposit No:Z, or a fragment thereof, can be determined conventionally using known computer programs. A preferred method for determining the best overall match between a query sequence (a sequence of the present invention) and a subject sequence, also referred to as a global sequence alignment, can be determined using the FASTDB computer program based on the algorithm of Brutlag et al. (Comp. App. Biosci. 6:237-245 (1990)). In a sequence alignment the query and subject sequences are either both nucleotide sequences or both amino acid sequences. The result of said global sequence alignment is expressed as percent identity. Preferred parameters used in a FASTDB amino acid alignment are: Matrix=PAM 0, k-tuple=2, Mismatch Penalty=1, Joining Penalty=20, Randomization Group Length=0, Cutoff Score=1, Window Size=sequence length, Gap Penalty=5, Gap Size Penalty=0.05, Window Size=500 or the length of the subject amino acid sequence, whichever is shorter.

[0155] If the subject sequence is shorter than the query sequence due to N- or C-terminal deletions, not because of internal deletions, a manual correction must be made to the results. This is because the FASTDB program does not account for N- and C-terminal truncations of the subject sequence when calculating global percent identity. For subject sequences truncated at the N- and C-termini, relative to the query sequence, the percent identity is corrected by calculating the number of residues of the query sequence that are N- and C-terminal of the subject sequence, which are not matched/aligned with a corresponding subject residue, as a percent of the total bases of the query sequence. Whether a residue is matched/aligned is determined by results of the FASTDB sequence alignment. This percentage is then subtracted from the percent identity, calculated by the above FASTDB program using the specified parameters, to arrive at a final percent identity score. This final percent identity score is what is used for the purposes of the present invention. Only residues to the N- and C-termini of the subject sequence, which are not matched/aligned with the query sequence, are considered for the purposes of manually adjusting the percent identity score. That is, only query residue positions outside the farthest N- and C-terminal residues of the subject sequence.

[0156] For example, a 90 amino acid residue subject sequence is aligned with a 100 residue query sequence to determine percent identity. The deletion occurs at the N-terminus of the subject sequence and therefore, the FASTDB alignment does not show a matching/alignment of the first 10 residues at the N-terminus. The 10 unpaired residues represent 10% of the sequence (number of residues at the N- and C-termini not matched/total number of residues in the query sequence) so 10% is subtracted from the percent identity score calculated by the FASTDB program If the remaining 90 residues were perfectly matched the final percent identity would be 90%. In another example, a 90 residue subject sequence is compared with a 100 residue query sequence. This time the deletions are internal deletions so there are no residues at the N- or C-termini of the subject sequence which are not matched/aligned with the query. In this case the percent identity calculated by FASTDB is not manually corrected. Once again, only residue positions outside the N- and C-terminal ends of the subject sequence, as displayed in the FASTDB alignment, which are not matched/aligned with the query sequnce are manually corrected for. No other manual corrections are to made for the purposes of the present invention.

[0157] The polynucleotide variants of the invention may contain alterations in the coding regions, non-coding regions, or both. Especially preferred are polynucleotide variants containing alterations which produce silent substitutions, additions, or deletions, but do not alter the properties or activities of the encoded polypeptide. Nucleotide variants produced by silent substitutions due to the degeneracy of the genetic code are preferred. Moreover, polypeptide variants in which less than 50, less than 40, less than 30, less than 20, less than 10, or 5-50, 5-25, 5-10, 1-5, or 1-2 amino acids are substituted, deleted, or added in any combination are also preferred. Polynucleotide variants can be produced for a variety of reasons, e.g., to optimize codon expression for a particular host (change codons in the human mRNA to those preferred by a bacterial host such as E. coli).

[0158] Naturally occurring variants are called “allelic variants,” and refer to one of several alternate forms of a gene occupying a given locus on a chromosome of an organism (Genes II, Lewin, B., ed., John Wiley & Sons, New York (1985)). These allelic variants can vary at either the polynucleotide and/or polypeptide level and are included in the present invention. Alternatively, non-naturally occurring variants may be produced by mutagenesis techniques or by direct synthesis.

[0159] Using known methods of protein engineering and recombinant DNA technology, variants may be generated to improve or alter the characteristics of the polypeptides of the present invention. For instance, one or more amino acids can be deleted from the N-terminus or C-terminus of the polypeptide of the present invention without substantial loss of biological function. As an example, Ron et al. (J. Biol. Chem. 268: 2984-2988 (1993)) reported variant KGF proteins having heparin binding activity even after deleting 3, 8, or 27 amino-terminal amino acid residues. Similarly, Interferon gamma exhibited up to ten times higher activity after deleting 8-10 amino acid residues from the carboxy terminus of this protein. (Dobeli et al., J. Biotechnology 7:199-216 (1988).)

[0160] Moreover, ample evidence demonstrates that variants often retain a biological activity similar to that of the naturally occurring protein. For example, Gayle and coworkers (J. Biol. Chem. 268:22105-22111 (1993)) conducted extensive mutational analysis of human cytokine IL-1a. They used random mutagenesis to generate over 3,500 individual IL-1a mutants that averaged 2.5 amino acid changes per variant over the entire length of the molecule. Multiple mutations were examined at every possible amino acid position. The investigators found that “[m]ost of the molecule could be altered with little effect on either [binding or biological activity].” In fact, only 23 unique amino acid sequences, out of more than 3,500 nucleotide sequences examined, produced a protein that significantly differed in activity from wild-type.

[0161] Furthermore, even if deleting one or more amino acids from the N-terminus or C-terminus of a polypeptide results in modification or loss of one or more biological functions, other biological activities may still be retained. For example, the ability of a deletion variant to induce and/or to bind antibodies which recognize the secreted form will likely be retained when less than the majority of the residues of the secreted form are removed from the N-terminus or C-terminus. Whether a particular polypeptide lacking N- or C-terminal residues of a protein retains such immunogenic activities can readily be determined by routine methods described herein and otherwise known in the art.

[0162] Thus, the invention further includes polypeptide variants which show a biological or functional activity of the polypeptides of the invention (such as, for example, activity useful in detecting, preventing, diagnosing, prognosticating, treating, and/or ameliorating hematopoietic and hematologic diseases and disorders). Such variants include deletions, insertions, inversions, repeats, and substitutions selected according to general rules known in the art so as have little effect on activity.

[0163] The present application is directed to nucleic acid molecules at least 80%, 85%, 90%, 95%, 96%, 97%, 98%, 99% or 100% identical to the nucleic acid sequences disclosed herein, (e.g., encoding a polypeptide having the amino acid sequence of an N and/or C terminal deletion), irrespective of whether they encode a polypeptide having functional activity. This is because even where a particular nucleic acid molecule does not encode a polypeptide having functional activity, one of skill in the art would still know how to use the nucleic acid molecule, for instance, as a hybridization probe or a polymerase chain reaction (PCR) primer. Uses of the nucleic acid molecules of the present invention that do not encode a polypeptide having functional activity include, inter alia, (1) isolating a gene or allelic or splice variants thereof in a cDNA library; (2) in situ hybridization (e.g., “FISH”) to metaphase chromosomal spreads to provide precise chromosomal location of the gene, as described in Verma et al., Human Chromosomes: A Manual of Basic Techniques, Pergamon Press, New York (1988); (3) Northern Blot analysis for detecting mRNA expression in specific tissues (e.g., normal or diseased tissues); and (4) in situ hybridization (e.g., histochemistry) for detecting mRNA expression in specific tissues (e.g., normal or diseased tissues).

[0164] Preferred, however, are nucleic acid molecules having sequences at least 80%, 85%, 90%, 95%, 96%, 97%, 98%, 99% or 100% identical to the nucleic acid sequences disclosed herein, which do, in fact, encode a polypeptide having functional activity. By a polypeptide having “functional activity” is meant, a polypeptide capable of displaying one or more known functional activities associated with a full-length (complete) protein and/or a mature (secreted) protein of the invention. Such functional activities include, but are not limited to, biological activity (such as, for example, activity useful in detecting, preventing, diagnosing, prognosticating, treating, and/or ameliorating hematopoietic and hematologic diseases and disorders), antigenicity (ability to bind, or compete with a polypeptide of the invention for binding, to an anti-polypeptide of the invention antibody), immunogenicity (ability to generate antibody which binds to a specific polypeptide of the invention), ability to form multimers with polypeptides of the invention, and ability to bind to a receptor or ligand for a polypeptide of the invention.

[0165] The functional activity of the polypeptides, and fragments, variants and derivatives of the invention, can be assayed by various methods.

[0166] For example, in one embodiment where one is assaying for the ability to bind or compete with a full-length polypeptide of the present invention for binding to an anti-polypetide antibody, various immunoassays known in the art can be used, including but not limited to, competitive and non-competitive assay systems using techniques such as radioimmunoassays, ELISA (enzyme linked immunosorbent assay), “sandwich” immunoassays, immunoradiometric assays, gel diffusion precipitation reactions, immunodiffusion assays, in situ immunoassays (using colloidal gold, enzyme or radioisotope labels, for example), western blots, precipitation reactions, agglutination assays (e.g., gel agglutination assays, hemagglutination assays), complement fixation assays, immunofluorescence assays, protein A assays, and immunoelectrophoresis assays, etc. In one embodiment, antibody binding is detected by detecting a label on the primary antibody. In another embodiment, the primary antibody is detected by detecting binding of a secondary antibody or reagent to the primary antibody. In a further embodiment, the secondary antibody is labeled. Many means are known in the art for detecting binding in an immunoassay and are within the scope of the present invention.

[0167] In another embodiment, where a ligand is identified, or the ability of a polypeptide fragment, variant or derivative of the invention to multimerize is being evaluated, binding can be assayed, e.g., by means well-known in the art, such as, for example, reducing and non-reducing gel chromatography, protein affinity chromatography, and affinity blotting. See generally, Phizicky et al., Microbiol. Rev. 59:94-123 (1995). In another embodiment, the ability of physiological correlates of a polypeptide of the present invention to bind to a substrate(s) of the polypeptide of the invention can be routinely assayed using techniques known in the art.

[0168] In addition, assays described herein (see Examples) and otherwise known in the art may routinely be applied to measure the ability of polypeptides of the present invention and fragments, variants and derivatives thereof to elicit polypeptide related biological activity (either in vitro or in vivo). Other methods will be known to the skilled artisan and are within the scope of the invention.

[0169] Of course, due to the degeneracy of the genetic code, one of ordinary skill in the art will immediately recognize that a large number of the nucleic acid molecules having a sequence at least 80%, 85%, 90%, 95%, 96%, 97%, 98%, 99%, or 100% identical to, for example, the nucleic acid sequence of the cDNA contained in ATCC Deposit No:Z, the nucleic acid sequence referred to in Table 1B (SEQ ID NO:X), the nucleic acid sequence disclosed in Table 1A (e.g., the nucleic acid sequence delineated in columns 7 and 8), the nucleic acid sequence disclosed in Table 2 (e.g., the nucleic acid sequence delineated in columns 8 and 9) or fragments thereof, will encode polypeptides “having functional activity.” In fact, since degenerate variants of any of these nucleotide sequences all encode the same polypeptide, in many instances, this will be clear to the skilled artisan even without performing the above described comparison assay. It will be further recognized in the art that, for such nucleic acid molecules that are not degenerate variants, a reasonable number will also encode a polypeptide having functional activity. This is because the skilled artisan is fully aware of amino acid substitutions that are either less likely or not likely to significantly effect protein function (e.g., replacing one aliphatic amino acid with a second aliphatic amino acid), as further described below.

[0170] For example, guidance concerning how to make phenotypically silent amino acid substitutions is provided in Bowie et al., “Deciphering the Message in Protein Sequences: Tolerance to Amino Acid Substitutions,” Science 247:1306-1310 (1990), wherein the authors indicate that there are two main strategies for studying the tolerance of an amino acid sequence to change.

[0171] The first strategy exploits the tolerance of amino acid substitutions by natural selection during the process of evolution. By comparing amino acid sequences in different species, conserved amino acids can be identified. These conserved amino acids are likely important for protein function. In contrast, the amino acid positions where substitutions have been tolerated by natural selection indicates that these positions are not critical for protein function. Thus, positions tolerating amino acid substitution could be modified while still maintaining biological activity of the protein.

[0172] The second strategy uses genetic engineering to introduce amino acid changes at specific positions of a cloned gene to identify regions critical for protein function. For example, site directed mutagenesis or alanine-scanning mutagenesis (introduction of single alanine mutations at every residue in the molecule) can be used. See Cunningham and Wells, Science 244:1081-1085 (1989). The resulting mutant molecules can then be tested for biological activity.

[0173] As the authors state, these two strategies have revealed that proteins are surprisingly tolerant of amino acid substitutions. The authors further indicate which amino acid changes are likely to be permissive at certain amino acid positions in the protein. For example, most buried (within the tertiary structure of the protein) amino acid residues require nonpolar side chains, whereas few features of surface side chains are generally conserved. Moreover, tolerated conservative amino acid substitutions involve replacement of the aliphatic or hydrophobic amino acids Ala, Val, Leu and Ile; replacement of the hydroxyl residues Ser and Thr; replacement of the acidic residues Asp and Glu; replacement of the amide residues Asn and Gln, replacement of the basic residues Lys, Arg, and His; replacement of the aromatic residues Phe, Tyr, and Trp, and replacement of the small-sized amino acids Ala, Ser, Thr, Met, and Gly.

[0174] Besides conservative amino acid substitution, variants of the present invention include (i) substitutions with one or more of the non-conserved amino acid residues, where the substituted amino acid residues may or may not be one encoded by the genetic code, or (ii) substitutions with one or more of the amino acid residues having a substituent group, or (iii) fusion of the mature polypeptide with another compound, such as a compound to increase the stability and/or solubility of the polypeptide (for example, polyethylene glycol), (iv) fusion of the polypeptide with additional amino acids, such as, for example, an IgG Pc fusion region peptide, serum albumin (preferably human serum albumin) or a fragment thereof, or leader or secretory sequence, or a sequence facilitating purification, or (v) fusion of the polypeptide with another compound, such as albumin (including but not limited to recombinant albumin (see, e.g., U.S. Pat. No. 5,876,969, issued Mar. 2, 1999, EP Patent 0 413 622, and U.S. Pat. No. 5,766,883, issued Jun. 16, 1998, herein incorporated by reference in their entirety)). Such variant polypeptides are deemed to be within the scope of those skilled in the art from the teachings herein.

[0175] For example, polypeptide variants containing amino acid substitutions of charged amino acids with other charged or neutral amino acids may produce proteins with improved characteristics, such as less aggregation. Aggregation of pharmaceutical formulations both reduces activity and increases clearance due to the aggregate's immunogenic activity. See Pinckard et al., Clin. Exp. Immunol. 2:331-340 (1967); Robbins et al., Diabetes 36: 838-845 (1987); Cleland et al., Crit. Rev. Therapeutic Drug Carrier Systems 10:307-377 (1993).

[0176] A further embodiment of the invention relates to polypeptides which comprise the amino acid sequence of a polypeptide having an amino acid sequence which contains at least one amino acid substitution, but not more than 50 amino acid substitutions, even more preferably, not more than 40 amino acid substitutions, still more preferably, not more than 30 amino acid substitutions, and still even more preferably, not more than 20 amino acid substitutions from a polypeptide sequence disclosed herein. Of course it is highly preferable for a polypeptide to have an amino acid sequence which, for example, comprises the amino acid sequence of a polypeptide of SEQ ID NO:Y, the amino acid sequence of the mature (e.g., secreted) polypeptide of SEQ ID NO:Y, an amino acid sequence encoded by SEQ ID NO:X, an amino acid sequence encoded by the portion of SEQ ID NO:X as defined in columnns 8 and 9 of Table 2, an amino acid sequence encoded by the complement of SEQ ID NO:X, an amino acid sequence encoded by cDNA contained in ATCC Deposit No:Z, and/or the amino acid sequence of a mature (secreted) polypeptide encoded by cDNA contained in ATCC Deposit No:Z, or a fragment thereof, which contains, in order of ever-increasing preference, at least one, but not more than 10, 9, 8, 7, 6, 5, 4, 3, 2 or 1 amino acid substitutions.

[0177] In specific embodiments, the polypeptides of the invention comprise, or alternatively, consist of, fragments or variants of a reference amino acid sequence selected from: (a) the amino acid sequence of SEQ ID NO:Y or fragments thereof (e.g., the mature form and/or other fragments described herein); (b) the amino acid sequence encoded by SEQ ID NO:X or fragments thereof; (c) the amino acid sequence encoded by the complement of SEQ ID NO:X or fragments thereof; (d) the amino acid sequence encoded by the portion of SEQ ID NO:X as defined in columns 8 and 9 of Table 2 or fragments thereof; and (e) the amino acid sequence encoded by cDNA contained in ATCC Deposit No:Z or fragments thereof; wherein the fragments or variants have 1-5, 5-25, 5-50, 10-50 or 50-150, amino acid residue additions, substitutions, and/or deletions when compared to the reference amino acid sequence. In preferred embodiments, the amino acid substitutions are conservative. Polynucleotides encoding these polypeptides are also encompassed by the invention.

Polynucleotide and Polypeptide Fragments

[0178] The present invention is also directed to polynucleotide fragments of the polynucleotides (nucleic acids) of the invention. In the present invention, a “polynucleotide fragment” refers to a polynucleotide having a nucleic acid sequence which, for example: is a portion of the cDNA contained in ATCC Deposit No:Z or the complementary strand thereto; is a portion of the polynucleotide sequence encoding the polypeptide encoded by the cDNA contained in ATCC Deposit No:Z or the complementary strand thereto; is a portion of the polynucleotide sequence encoding the mature (secreted) polypeptide encoded by the cDNA contained in ATCC Deposit No:Z or the complementary strand thereto; is a portion of a polynucleotide sequence encoding the mature amino acid sequence as defined in columns 14 and 15 of Table 1A or the complementary strand thereto; is a portion of a polynucleotide sequence encoding the amino acid sequence encoded by the region of SEQ ID NO:X as defined in columns 8 and 9 of Table 2 or the complementary strand thereto; is a portion of the polynucleotide sequence of SEQ ID NO:X as defined in columns 8 and 9 of Table 2 or the complementary strand thereto; is a portion of the polynucleotide sequence in SEQ ID NO:X or the complementary strand thereto; is a polynucleotide sequence encoding a portion of the polypeptide of SEQ ID NO:Y; is a polynucleotide sequence encoding a portion of a polypeptide encoded by SEQ ID NO:X; is a polynucleotide sequence encoding a portion of a polypeptide encoded by the complement of the polynucleotide sequence in SEQ ID NO:X; is a portion of a polynucleotide sequence encoding the amino acid sequence encoded by the region of SEQ ID NO:B as defined in column 6 of Table 1C or the complementary strand thereto; or is a portion of the polynucleotide sequence of SEQ ID NO:B as defined in column 6 of Table 1C or the complementary strand thereto.

[0179] The polynucleotide fragments of the invention are preferably at least about 15 nt, and more preferably at least about 20 nt, still more preferably at least about 30 nt, and even more preferably, at least about 40 nt, at least about 50 nt, at least about 75 nt, or at least about 150 nt in length. A fragment “at least 20 nt in length,” for example, is intended to include 20 or more contiguous bases from the cDNA sequence contained in ATCC Deposit No:Z, or the nucleotide sequence shown in SEQ ID NO:X or the complementary stand thereto. In this context “about” includes the particularly recited value or a value larger or smaller by several (5, 4, 3, 2, or 1) nucleotides, at either terminus or at both termini. These nucleotide fragments have uses that include, but are not limited to, as diagnostic probes and primers as discussed herein. Of course, larger fragments (e.g., at least 160, 170, 180, 190, 200, 250, 500, 600, 1000, or 2000 nucleotides in length) are also encompassed by the invention.

[0180] Moreover, representative examples of polynucleotide fragments of the invention comprise, or alternatively consist of, a sequence from about nucleotide number 1-50, 51-100, 101-150, 151-200, 201-250, 251-300, 301-350, 351-400, 401-450, 451-500, 501-550, 551-600, 601-650, 651-700, 701-750, 751-800, 801-850, 851-900, 901-950, 951-1000, 1001-1050, 1051-1100, 1101-1150, 1151-1200, 1201-1250, 1251-1300, 1301-1350, 1351-1400, 1401-1450, 1451-1500, 1501-1550, 1551-1600, 1601-1650, 1651-1700, 1701-1750, 1751-1800, 1801-1850, 1851-1900, 1901-1950, 1951-2000, 2001-2050, 2051-2100, 2101-2150, 2151-2200, 2201-2250, 2251-2300, 2301-2350, 2351-2400, 2401-2450, 2451-2500, 2501-2550, 2551-2600, 2601-2650, 2651-2700, 2701-2750, 2751-2800, 2801-2850, 2851-2900, 2901-2950, 2951-3000, 3001-3050, 3051-3100, 3101-3150, 3151-3200, 3201-3250, 3251-3300, 3301-3350, 3351-3400, 3401-3450, 3451-3500, 3501-3550, 3551-3600, 3601-3650, 3651-3700, 3701-3750, 3751-3800, 3801-3850, 3851-3900, 3901-3950, 3951-4000, 4001-4050, 4051-4100, 4101-4150, 4151-4200, 4201-4250, 4251-4300, 4301-4350, 4351-4400, 4401-4450, 4451-4500, 4501-4550, 4551-4600, 4601-4650, 4651-4700, 4701-4750, 4751-4800, 4801-4850, 4851-4900, 4901-4950, 4951-5000, 5001-5050, 5051-5100, 5101-5150, 5151-5200, 5201-5250, 5251-5300, 5301-5350, 5351-5400, 5401-5450, 5451-5500, 5501-5550, 5551-5600, 5601-5650, 5651-5700, 5701-5750, 5751-5800, 5801-5850, 5851-5900, 5901-5950, 5951-6000, 6001-6050, 6051-6100, 6101-6150, 6151-6200, 6201-6250, 6251-6300, 6301-6350, 6351-6400, 6401-6450, 6451-6500, 6501-6550, 6551-6600, 6601-6650, 6651-6700, 6701-6750, 6751-6800, 6801-6850, 6851-6900, 6901-6950, 6951-7000, 7001-7050, 7051-7100, 7101-7150, 7151-7200, 7201-7250, 7251-7300 or 7301 to the end of SEQ ID NO:X, or the complementary strand thereto. In this context “about” includes the particularly recited range or a range larger or smaller by several (5, 4, 3, 2, or 1) nucleotides, at either terminus or at both termini. Preferably, these fragments encode a polypeptide which has a functional activity (e.g., biological activity; such as, for example, activity useful in detecting, preventing, diagnosing, prognosticating, treating, and/or ameliorating hematopoietic and hematologic diseases and disorders). More preferably, these polynucleotides can be used as probes or primers as discussed herein. Polynucleotides which hybridize to one or more of these polynucleotides under stringent hybridization conditions or alternatively, under lower stringency conditions are also encompassed by the invention, as are polypeptides encoded by these polynucleotides.

[0181] Further representative examples of polynucleotide fragments of the invention comprise, or alternatively consist of, a sequence from about nucleotide number 1-50, 51-100, 101-150, 151-200, 201-250, 251-300, 301-350, 351-400, 401-450, 451-500, 501-550, 551-600, 601-650, 651-700, 701-750, 751-800, 801-850, 851-900, 901-950, 951-1000, 1001-1050, 1051-1100, 1101-1150, 1151-1200, 1201-1250, 1251-1300, 1301-1350, 1351-1400, 1401-1450, 1451-1500, 1501-1550, 1551-1600, 1601-1650, 1651-1700, 1701-1750, 1751-1800, 1801-1850, 1851-1900, 1901-1950, 1951-2000, 2001-2050, 2051-2100, 2101-2150, 2151-2200, 2201-2250, 2251-2300, 2301-2350, 2351-2400, 2401-2450, 2451-2500, 2501-2550, 2551-2600, 2601-2650, 2651-2700, 2701-2750, 2751-2800, 2801-2850, 2851-2900, 2901-2950, 2951-3000, 3001-3050, 3051-3100, 3101-3150, 3151-3200, 3201-3250, 3251-3300, 3301-3350, 3351-3400, 3401-3450, 3451-3500, 3501-3550, 3551-3600, 3601-3650, 3651-3700, 3701-3750, 3751-3800, 3801-3850, 3851-3900, 3901-3950, 3951-4000, 4001-4050, 4051-4100, 4101-4150, 4151-4200, 4201-4250, 4251-4300, 4301-4350, 4351-4400, 4401-4450, 4451-4500, 4501-4550, 4551-4600, 4601-4650, 4651-4700, 4701-4750, 4751-4800, 4801-4850, 4851-4900, 4901-4950, 4951-5000, 5001-5050, 5051-5100, 5101-5150, 5151-5200, 5201-5250, 5251-5300, 5301-5350, 5351-5400, 5401-5450, 5451-5500, 5501-5550, 5551-5600, 5601-5650, 5651-5700, 5701-5750, 5751-5800, 5801-5850, 5851-5900, 5901-5950, 5951-6000, 6001-6050, 6051-6100, 6101-6150, 6151-6200, 6201-6250, 6251-6300, 6301-6350, 6351-6400, 6401-6450, 6451-6500, 6501-6550, 6551-6600, 6601-6650, 6651-6700, 6701-6750, 6751-6800, 6801-6850, 6851-6900, 6901-6950, 6951-7000, 7001-7050, 7051-7100, 7101-7150, 7151-7200, 7201-7250, 7251-7300 or 7301 to the end of the cDNA sequence contained in ATCC Deposit No:Z, or the complementary strand thereto. In this context “about” includes the particularly recited range or a range larger or smaller by several (5, 4, 3, 2, or 1) nucleotides, at either terminus or at both termini. Preferably, these fragments encode a polypeptide which has a functional activity (e.g., biological activity). More preferably, these polynucleotides can be used as probes or primers as discussed herein. Polynucleotides which hybridize to one or more of these polynucleotides under stringent hybridization conditions or alternatively, under lower stringency conditions are also encompassed by the invention, as are polypeptides encoded by these polynucleotides.

[0182] Moreover, representative examples of polynucleotide fragments of the invention comprise, or alternatively consist of, a nucleic acid sequence comprising one, two, three, four, five, six, seven, eight, nine, ten, or more of the above described polynucleotide fragments of the invention in combination with a polynucleotide sequence delineated in Table 1C column 6. Additional, representative examples of polynucleotide fragments of the invention comprise, or alternatively consist of, a nucleic acid sequence comprising one, two, three, four, five, six, seven, eight, nine, ten, or more of the above described polynucleotide fragments of the invention in combination with a polynucleotide sequence that is the complementary strand of a sequence delineated in column 6 of Table 1C. In further embodiments, the above-described polynucleotide fragments of the invention comprise, or alternatively consist of, sequences delineated in Table 1C, column 6, and have a nucleic acid sequence which is different from that of the BAC fragment having the sequence disclosed in SEQ ID NO:B (see Table 1C, column 5). In additional embodiments, the above-described polynucleotide fragments of the invention comprise, or alternatively consist of, sequences delineated in Table 1C, column 6, and have a nucleic acid sequence which is different from that published for the BAC clone identified as BAC ID NO:A (see Table 1C, column 4). In additional embodiments, the above-described polynucleotides of the invention comprise, or alternatively consist of, sequences delineated Table 1C, column 6, and have a nucleic acid sequence which is different from that contained in the BAC clone identified as BAC ID NO:A (see Table 1C, column 4). Polypeptides encoded by these polynucleotides, other polynucleotides that encode these polypeptides, and antibodies that bind these polypeptides are also encompassed by the invention. Additionally, fragments and variants of the above-described polynucleotides and polypeptides are also encompassed by the invention.

[0183] In additional specific embodiments, polynucleotides of the invention comprise, or alternatively consist of, one, two, three, four, five, six, seven, eight, nine, ten, or more fragments of the sequences delineated in column 6 of Table 1C, and the polynucleotide sequence of SEQ ID NO:X (e.g., as defined in Table 1C, column 2) or fragments or variants thereof. Polypeptides encoded by these polynucleotides, other polynucleotides that encode these polypeptides, and antibodies that bind these polypeptides are also encompassed by the invention.

[0184] In additional specific embodiments, polynucleotides of the invention comprise, or alternatively consist of, one, two, three, four, five, six, seven, eight, nine, ten, or more fragments of the sequences delineated in column 6 of Table 1C which correspond to the same ATCC Deposit No:Z (see Table 1C, column 1), and the polynucleotide sequence of SEQ ID NO:X (e.g., as defined in Table 1A, 1B, or 1C) or fragments or variants thereof. Polypeptides encoded by these polynucleotides, other polynucleotides that encode these polypeptides, and antibodies that bind these polypeptides are also encompassed by the invention.

[0185] In further specific embodiments, polynucleotides of the invention comprise, or alternatively consist of, one, two, three, four, five, six, seven, eight, nine, ten, or more fragments of the sequences delineated in the same row of column 6 of Table 1C, and the polynucleotide sequence of SEQ ID NO:X (e.g., as defined in Table 1A, 1B, or 1C) or fragments or variants thereof. Polypeptides encoded by these polynucleotides, other polynucleotides that encode these polypeptides, and antibodies that bind these polypeptides are also encompassed by the invention.

[0186] In additional specific embodiments, polynucleotides of the invention comprise, or alternatively consist of a polynucleotide sequence in which the 3′ 10 polynucleotides of one of the sequences delineated in column 6 of Table 1C and the 5′ 10 polynucleotides of the sequence of SEQ ID NO:X are directly contiguous. Nucleic acids which hybridize to the complement of these 20 contiguous polynucleotides under stringent hybridization conditions or alternatively, under lower stringency conditions, are also encompassed by the invention. Polypeptides encoded by these polynucleotides and/or nucleic acids, other polynucleotides and/or nucleic acids that encode these polypeptides, and antibodies that bind these polypeptides are also encompassed by the invention. Additionally, fragments and variants of the above-described polynucleotides, nucleic acids, and polypeptides are also encompassed by the invention.

[0187] In additional specific embodiments, polynucleotides of the invention comprise, or alternatively consist of a polynucleotide sequence in which the 3′ 10 polynucleotides of one of the sequences delineated in column 6 of Table 1C and the 5′ 10 polynucleotides of a fragment or variant of the sequence of SEQ ID NO:X (e.g., as described herein) are directly contiguous Nucleic acids which hybridize to the complement of these 20 contiguous polynucleotides under stringent hybridization conditions or alternatively, under lower stringency conditions, are also encompassed by the invention. Polypeptides encoded by these polynucleotides and/or nucleic acids, other polynucleotides and/or nucleic acids encoding these polypeptides, and antibodies that bind these polypeptides are also encompassed by the invention. Additionally, fragments and variants of the above-described polynucleotides, nucleic acids, and polypeptides are also encompassed by the invention.

[0188] In further specific embodiments, polynucleotides of the invention comprise, or alternatively consist of a polynucleotide sequence in which the 3′ 10 polynucleotides of a fragment or variant of the sequence of SEQ ID NO:X and the 5′ 10 polynucleotides of the sequence of one of the sequences delineated in column 6 of Table 1C are directly contiguous. Nucleic acids which hybridize to the complement of these 20 contiguous polynucleotides under stringent hybridization conditions or alternatively, under lower stringency conditions, are also encompassed by the invention. Polypeptides encoded by these polynucleotides and/or nucleic acids, other polynucleotides and/or nucleic acids encoding these polypeptides, and antibodies that bind these polypeptides are also encompassed by the invention. Additionally, fragments and variants of the above-described polynucleotides, nucleic acids, and polypeptides are also encompassed by the invention.

[0189] In specific embodiments, polynucleotides of the invention comprise, or alternatively consist of a polynucleotide sequence in which the 3′ 10 polynucleotides of one of the sequences delineated in column 6 of Table 1C and the 5′ 10 polynucleotides of another sequence in column 6 are directly contiguous. In preferred embodiments, the 3′ 10 polynucleotides of one of the sequences delineated in column 6 of Table 1C is directly contiguous with the 5′ 10 polynucleotides of the next sequential exon delineated in Table 1C, column 6. Nucleic acids which hybridize to the complement of these 20 contiguous polynucleotides under stringent hybridization conditions or alternatively, under lower stringency conditions, are also encompassed by the invention. Polypeptides encoded by these polynucleotides and/or nucleic acids, other polynucleotides and/or nucleic acids encoding these polypeptides, and antibodies that bind these polypeptides are also encompassed by the invention. Additionally, fragments and variants of the above-described polynucleotides, nucleic acids, and polypeptides are also encompassed by the invention.

[0190] In the present invention, a “polypeptide fragment” refers to an amino acid sequence which is a portion of the amino acid sequence contained in SEQ ID NO:Y, is a portion of the mature form of SEQ ID NO:Y as defined in columns 14 and 15 of Table 1A, a portion of an amino acid sequence encoded by the portion of SEQ ID NO:X as defined in columnns 8 and 9 of Table 2, is a portion of an amino acid sequence encoded by the polynucleotide sequence of SEQ ID NO:X, is a portion of an amino acid sequence encoded by the complement of the polynucleotide sequence in SEQ ID NO:X, is a portion of the amino acid sequence of a mature (secreted) polypeptide encoded by the cDNA contained in ATCC Deposit No:Z, and/or is a portion of an amino acid sequence encoded by the cDNA contained in ATCC Deposit No:Z. Protein (polypeptide) fragments may be “free-standing,” or comprised within a larger polypeptide of which the fragment forms a part or region, most preferably as a single continuous region. Representative examples of polypeptide fragments of the invention, include, for example, fragments comprising, or alternatively consisting of, from about amino acid number 1-20, 21-40, 41-60, 61-80, 81-100, 101-120, 121-140, 141-160, 161-180, 181-200, 201-220, 221-240, 241-260, 261-280, 281-300, 301-320, 321-340, 341-360, 361-380, 381-400, 401-420, 421-440, 441-460, 461-480, 481-500, 501-520, 521-540, 541-560, 561-580, 581-600, 601-620, 621-640, 641-660, 661-680, 681-700, 701-720, 721-740, 741-760, 761-780, 781-800, 801-820, 821-840, 841-860, 861-880, 881-900, 901-920, 921-940, 941-960, 961-980, 981-1000, 1001-1020, 1021-1040, 1041-1060, 1061-1080, 1081-1100, 1101-1120, 1121-1140, 1141-1160, 1161-1180, 1181-1200, 1201-1220, 1221-1240, 1241-1260, 1261-1280, 1281-1300, 1301-1320, 1321-1340, 1341-1360, 1361-1380, 1381-1400, 1401-1420, 1421-1440, or 1441 to the end of the coding region of cDNA and SEQ ID NO: Y. In a preferred embodiment, polypeptide fragments of the invention include, for example, fragments comprising, or alternatively consisting of, from about amino acid number 1-20, 21-40, 41-60, 61-80, 81-100, 101-120, 121-140, 141-160, 161-180, 181-200, 201-220, 221-240, 241-260, 261-280, 281-300, 301-320, 321-340, 341-360, 361-380, 381-400, 401-420, 421-440, 441-460, 461-480, 481-500, 501-520, 521-540, 541-560, 561-580, 581-600, 601-620, 621-640, 641-660, 661-680, 681-700, 701-720, 721-740, 741-760, 761-780, 781-800, 801-820, 821-840, 841-860, 861-880, 881-900, 901-920, 921-940, 941-960, 961-980, 981-1000, 1001-1020, 1021-1040, 1041-1060, 1061-1080, 1081-1100, 1101-1120, 1121-1140, 1141-1160, 1161-1180, 1181-1200, 1201-1220, 1221-1240, 1241-1260, 1261-1280, 1281-1300, 1301-1320, 1321-1340, 1341-1360, 1361-1380, 1381-1400, 1401-1420, 1421-1440, or 1441 to the end of the coding region of SEQ ID NO:Y. Moreover, polypeptide fragments of the invention may be at least about 10, 15, 20, 25, 30, 35, 40, 45, 50, 55, 60, 65, 70, 75, 80, 85, 90, 100, 110, 120, 130, 140, or 150 amino acids in length. In this context “about” includes the particularly recited ranges or values, or ranges or values larger or smaller by several (5, 4, 3, 2, or 1) amino acids, at either extreme or at both extremes. Polynucleotides encoding these polypeptide fragments are also encompassed by the invention.

[0191] Even if deletion of one or more amino acids from the N-terminus of a protein results in modification of loss of one or more biological functions of the protein, other functional activities (e.g., biological activities; such as, for example, activity useful in detecting, preventing, diagnosing, prognosticating, treating, and/or ameliorating hematopoietic and hematologic diseases and disorders; ability to multimerize; ability to bind a ligand; antigenic ability useful for production of polypeptide specific antibodies) may still be retained. For example, the ability of shortened muteins to induce and/or bind to antibodies which recognize the complete or mature forms of the polypeptides generally will be retained when less than the majority of the residues of the complete or mature polypeptide are removed from the N-terminus. Whether a particular polypeptide lacking N-terminal residues of a complete polypeptide retains such immunologic activities can readily be determined by routine methods described herein and otherwise known in the art. It is not unlikely that a mutein with a large number of deleted N-terminal amino acid residues may retain some biological or immunogenic activities. In fact, peptides composed of as few as six amino acid residues may often evoke an immune response.

[0192] Accordingly, polypeptide fragments include the secreted protein as well as the mature form. Further preferred polypeptide fragments include the secreted protein or the mature form having a continuous series of deleted residues from the amino or the carboxy terminus, or both. For example, any number of amino acids, ranging from 1-60, can be deleted from the amino terminus of either the secreted polypeptide or the mature form. Similarly, any number of amino acids, ranging from 1-30, can be deleted from the carboxy terminus of the secreted protein or mature form. Furthermore, any combination of the above amino and carboxy terminus deletions are preferred. Similarly, polynucleotides encoding these polypeptide fragments are also preferred.

[0193] The present invention further provides polypeptides having one or more residues deleted from the amino terminus of the amino acid sequence of a polypeptide disclosed herein (e.g., a polypeptide of SEQ ID NO:Y, a polypeptide as defined in columns 14 and 15 of Table 1A, a polypeptide encoded by the polynucleotide sequence contained in SEQ ID NO:X or the complement thereof, a polypeptide encoded by the portion of SEQ ID NO:X as defined in columns 8 and 9 of Table 2, a polypeptide encoded by the portion of SEQ ID NO:B as defined in column 6 of Table 1C, a polypeptide encoded by the cDNA contained in ATCC Deposit No:Z, and/or a mature polypeptide encoded by the cDNA contained in ATCC Deposit No:Z). In particular, N-terminal deletions may be described by the general formula m-q, where q is a whole integer representing the total number of amino acid residues in a polypeptide of the invention (e.g., the polypeptide disclosed in SEQ ID NO:Y, the mature (secreted) portion of SEQ ID NO:Y as defined in columns 14 and 15 of Table 1A, or the polypeptide encoded by the portion of SEQ ID NO:X as defined in columns 8 and 9 of Table 2), and m is defined as any integer ranging from 2 to q-6. Polynucleotides encoding these polypeptides are also encompassed by the invention.

[0194] The present invention further provides polypeptides having one or more residues from the carboxy terminus of the amino acid sequence of a polypeptide disclosed herein (e.g., a polypeptide of SEQ ID NO:Y, the mature (secreted) portion of SEQ ID NO:Y as defined in columns 14 and 15 of Table 1A, a polypeptide encoded by the polynucleotide sequence contained in SEQ ID NO:X, a polypeptide encoded by the portion of SEQ ID NO:X as defined in columns 8 and 9 of Table 2, a polypeptide encoded by the portion of SEQ ID NO:B as defined in column 6 of Table 1C, a polypeptide encoded by the cDNA contained in ATCC Deposit No:Z, and/or a mature polypeptide encoded by the cDNA contained in ATCC Deposit No:Z). In particular, C-terminal deletions may be described by the general formula 1-n, where n is any whole integer ranging from 6 to q-1, and where n corresponds to the position of amino acid residue in a polypeptide of the invention. Polynucleotides encoding these polypeptides are also encompassed by the invention.

[0195] In addition, any of the above described N- or C-terminal deletions can be combined to produce a N- and C-terminal deleted polypeptide. The invention also provides polypeptides having one or more amino acids deleted from both the amino and the carboxyl termini, which may be described generally as having residues m-n of a polypeptide encoded by SEQ ID NO:X (e.g., including, but not limited to, the preferred polypeptide disclosed as SEQ ID NO:Y, the mature (secreted) portion of SEQ ID NO:Y as defined in columns 14 and 15 of Table 1A, and the polypeptide encoded by the portion of SEQ ID NO:X as defined in columns 8 and 9 of Table 2), the cDNA contained in ATCC Deposit No:Z, and/or the complement thereof, where n and m are integers as described above. Polynucleotides encoding these polypeptides are also encompassed by the invention.

[0196] Also as mentioned above, even if deletion of one or more amino acids from the C-terminus of a protein results in modification of loss of one or more biological functions of the protein, other functional activities (e.g., biological activities such as, for example, activity useful in detecting, preventing, diagnosing, prognosticating, treating, and/or ameliorating hematopoietic and hematologic diseases and disorders; ability to multimerize; ability to bind a ligand; antigenic ability useful for production of polypeptide specific antibodies) may still be retained. For example the ability of the shortened mutein to induce and/or bind to antibodies which recognize the complete or mature forms of the polypeptide generally will be retained when less than the majority of the residues of the complete or mature polypeptide are removed from the C-terminus. Whether a particular polypeptide lacking C-terminal residues of a complete polypeptide retains such immunologic activities can readily be determined by routine methods described herein and otherwise known in the art. It is not unlikely that a mutein with a large number of deleted C-terminal amino acid residues may retain some biological or immunogenic activities. In fact, peptides composed of as few as six amino acid residues may often evoke an immune response.

[0197] The present application is also directed to proteins containing polypeptides at least 80%, 85%, 90%, 95%, 96%, 97%, 98% or 99% identical to a polypeptide sequence set forth herein. In preferred embodiments, the application is directed to proteins containing polypeptides at least 80%, 85%, 90%, 95%, 96%, 97%, 98% or 99% identical to polypeptides having the amino acid sequence of the specific N- and C-terminal deletions. Polynucleotides encoding these polypeptides are also encompassed by the invention.

[0198] Any polypeptide sequence encoded by, for example, the polynucleotide sequences set forth as SEQ ID NO:X or the complement thereof, (presented, for example, in Tables 1A and 2), the cDNA contained in ATCC Deposit No:Z, or the polynucleotide sequence as defined in column 6 of Table 1C, may be analyzed to determine certain preferred regions of the polypeptide. For example, the amino acid sequence of a polypeptide encoded by a polynucleotide sequence of SEQ ID NO:X (e.g., the polypeptide of SEQ ID NO:Y and the polypeptide encoded by the portion of SEQ ID NO:X as defined in columnns 8 and 9 of Table 2) or the cDNA contained in ATCC Deposit No:Z may be analyzed using the default parameters of the DNASTAR computer algorithm (DNASTAR, Inc., 1228 S. Park St., Madison, Wis. 53715 USA; http://www.dnastar.com/).

[0199] Polypeptide regions that may be routinely obtained using the DNASTAR computer algorithm include, but are not limited to, Garnier-Robson alpha-regions, beta-regions, turn-regions, and coil-regions; Chou-Fasman alpha-regions, beta-regions, and turn-regions; Kyte-Doolittle hydrophilic regions and hydrophobic regions; Eisenberg alpha- and beta-amphipathic regions; Karplus-Schulz flexible regions; Emini surface-forming regions; and Jameson-Wolf regions of high antigenic index. Among highly preferred polynucleotides of the invention in this regard are those that encode polypeptides comprising regions that combine several structural features, such as several (e.g., 1, 2, 3 or 4) of the features set out above.

[0200] Additionally, Kyte-Doolittle hydrophilic regions and hydrophobic regions, Emini surface-forming regions, and Jameson-Wolf regions of high antigenic index (i.e., containing four or more contiguous amino acids having an antigenic index of greater than or equal to 1.5, as identified using the default parameters of the Jameson-Wolf program) can routinely be used to determine polypeptide regions that exhibit a high degree of potential for antigenicity. Regions of high antigenicity are determined from data by DNASTAR analysis by choosing values which represent regions of the polypeptide which are likely to be exposed on the surface of the polypeptide in an environment in which antigen recognition may occur in the process of initiation of an immune response.

[0201] Preferred polypeptide fragments of the invention are fragments comprising, or alternatively, consisting of, an amino acid sequence that displays a functional activity (e.g. biological activity such as, for example, activity useful in detecting, preventing, diagnosing, prognosticating, treating, and/or ameliorating hematopoietic and hematologic diseases and disorders; ability to multimerize; ability to bind a ligand; antigenic ability useful for production of polypeptide specific antibodies) of the polypeptide sequence of which the amino acid sequence is a fragment. By a polypeptide displaying a “functional activity” is meant a polypeptide capable of one or more known functional activities associated with a full-length protein, such as, for example, biological activity, antigenicity, immunogenicity, and/or multimerization, as described herein.

[0202] Other preferred polypeptide fragments are biologically active fragments. Biologically active fragments are those exhibiting activity similar, but not necessarily identical, to an activity of the polypeptide of the present invention. The biological activity of the fragments may include an improved desired activity, or a decreased undesirable activity.

[0203] In preferred embodiments, polypeptides of the invention comprise, or alternatively consist of, one, two, three, four, five or more of the antigenic fragments of the polypeptide of SEQ ID NO:Y, or portions thereof. Polynucleotides encoding these polypeptides are also encompassed by the invention.

Epitopes and Antibodies

[0204] The present invention encompasses polypeptides comprising, or alternatively consisting of, an epitope of: the polypeptide sequence shown in SEQ ID NO:Y; a polypeptide sequence encoded by SEQ ID NO:X or the complementary strand thereto; the polypeptide sequence encoded by the portion of SEQ ID NO:X as defined in columns 8 and 9 of Table 2; the polypeptide sequence encoded by the portion of SEQ ID NO:B as defined in column 6 of Table 1C or the complement thereto; the polypeptide sequence encoded by the cDNA contained in ATCC Deposit No:Z; or the polypeptide sequence encoded by a polynucleotide that hybridizes to the sequence of SEQ ID NO:X, the complement of the sequence of SEQ ID NO:X, the complement of a portion of SEQ ID NO:X as defined in columns 8 and 9 of Table 2, or the cDNA sequence contained in ATCC Deposit No:Z under stringent hybridization conditions or alternatively, under lower stringency hybridization as defined supra. The present invention further encompasses polynucleotide sequences encoding an epitope of a polypeptide sequence of the invention (such as, for example, the sequence disclosed in SEQ ID NO:X, or a fragment thereof), polynucleotide sequences of the complementary strand of a polynucleotide sequence encoding an epitope of the invention, and polynucleotide sequences which hybridize to the complementary strand under stringent hybridization conditions or alternatively, under lower stringency hybridization conditions defined supra.

[0205] The term “epitopes,” as used herein, refers to portions of a polypeptide having antigenic or immunogenic activity in an animal, preferably a mammal, and most preferably in a human. In a preferred embodiment, the present invention encompasses a polypeptide comprising an epitope, as well as the polynucleotide encoding this polypeptide. An “immunogenic epitope,” as used herein, is defined as a portion of a protein that elicits an antibody response in an animal, as determined by any method known in the art, for example, by the methods for generating antibodies described infra. (See, for example, Geysen et al., Proc. Natl. Acad. Sci. USA 81:3998-4002 (1983)). The term “antigenic epitope,” as used herein, is defined as a portion of a protein to which an antibody can immunospecifically bind its antigen as determined by any method well known in the art, for example, by the immunoassays described herein. Immunospecific binding excludes non-specific binding but does not necessarily exclude cross-reactivity with other antigens. Antigenic epitopes need not necessarily be immunogenic.

[0206] Fragments which function as epitopes may be produced by any conventional means. (See, e.g., Houghten, R. A., Proc. Natl. Acad. Sci. USA 82:5131-5135 (1985) further described in U.S. Pat. No. 4,631,211.)

[0207] In the present invention, antigenic epitopes preferably contain a sequence of at least 4, at least 5, at least 6, at least 7, more preferably at least 8, at least 9, at least 10, at least 11, at least 12, at least 13, at least 14, at least 15, at least 20, at least 25, at least 30, at least 40, at least 50, and, most preferably, between about 15 to about 30 amino acids. Preferred polypeptides comprising immunogenic or antigenic epitopes are at least 10, 15, 20, 25, 30, 35, 40, 45, 50, 55, 60, 65, 70, 75, 80, 85, 90, 95, or 100 amino acid residues in length. Additional non-exclusive preferred antigenic epitopes include the antigenic epitopes disclosed herein, as well as portions thereof. Antigenic epitopes are useful, for example, to raise antibodies, including monoclonal antibodies, that specifically bind the epitope. Preferred antigenic epitopes include the antigenic epitopes disclosed herein, as well as any combination of two, three, four, five or more of these antigenic epitopes. Antigenic epitopes can be used as the target molecules in immunoassays. (See, for instance, Wilson et al., Cell 37:767-778 (1984); Sutcliffe et al., Science 219:660-666 (1983)).

[0208] Non-limiting examples of epitopes of polypeptides that can be used to generate antibodies of the invention include a polypeptide comprising, or alternatively consisting of, at least one, two, three, four, five, six or more of the portion(s) of SEQ ID NO:Y specified in Table 1B. These polypeptide fragments have been determined to bear antigenic epitopes of the proteins of the invention by the analysis of the Jameson-Wolf antigenic index which is included in the DNAStar suite of computer programs. By “comprise” it is intended that a polypeptide contains at least one, two, three, four, five, six or more of the portion(s) of SEQ ID NO:Y shown in Table 1B, but it may contain additional flanking residues on either the amino or carboxyl termini of the recited portion. Such additional flanking sequences are preferably sequences naturally found adjacent to the portion; i.e., contiguous sequence shown in SEQ ID NO:Y. The flanking sequence may, however, be sequences from a heterolgous polypeptide, such as from another protein described herein or from a heterologous polypeptide not described herein. In particular embodiments, epitope portions of a polypeptide of the invention comprise one, two, three, or more of the portions of SEQ ID NO:Y shown in Table 1B.

[0209] Similarly, immunogenic epitopes can be used, for example, to induce antibodies according to methods well known in the art. See, for instance, Sutcliffe et al., supra; Wilson et al., supra; Chow et al., Proc. Natl. Acad. Sci. USA 82:910-914; and Bittle et al., J. Gen. Virol. 66:2347-2354 (1985). Preferred immunogenic epitopes include the immunogenic epitopes disclosed herein, as well as any combination of two, three, four, five or more of these-immunogenic epitopes. The polypeptides comprising one or more immunogenic epitopes may be presented for eliciting an antibody response together with a carrier protein, such as an albumin, to an animal system (such as rabbit or mouse), or, if the polypeptide is of sufficient length (at least about 25 amino acids), the polypeptide may be presented without a carrier. However, immunogenic epitopes comprising as few as 8 to 10 amino acids have been shown to be sufficient to raise antibodies capable of binding to, at the very least, linear epitopes in a denatured polypeptide (e.g., in Western blotting).

[0210] Epitope-bearing polypeptides of the present invention may be used to induce antibodies according to methods well known in the art including, but not limited to, in vivo immunization, in vitro immunization, and phage display methods. See, e.g., Sutcliffe et al., supra; Wilson et al., supra, and Bittle et al., J. Gen. Virol., 66:2347-2354 (1985). If in vivo immunization is used, animals may be immunized with free peptide; however, anti-peptide antibody titer may be boosted by coupling the peptide to a macromolecular carrier, such as keyhole limpet hemacyanin (KLH) or tetanus toxoid. For instance, peptides containing cysteine residues may be coupled to a carrier using a linker such as maleimidobenzoyl-N-hydroxysuccinimide ester (MBS), while other peptides may be coupled to carriers using a more general linking agent such as glutaraldehyde. Animals such as rabbits, rats and mice are immunized with either free or carrier-coupled peptides, for instance, by intraperitoneal and/or intradermal injection of emulsions containing about 100 μg of peptide or carrier protein and Freund's adjuvant or any other adjuvant known for stimulating an immune response. Several booster injections may be needed, for instance, at intervals of about two weeks, to provide a useful titer of anti-peptide antibody which can be detected, for example, by ELISA assay using free peptide adsorbed to a solid surface. The titer of anti-peptide antibodies in serum from an immunized animal may be increased by selection of anti-peptide antibodies, for instance, by adsorption to the peptide on a solid support and elution of the selected antibodies according to methods well known in the art.

[0211] As one of skill in the art will appreciate, and as discussed above, the polypeptides of the present invention (e.g., those comprising an immunogenic or antigenic epitope) can be fused to heterologous polypeptide sequences. For example, polypeptides of the present invention (including fragments or variants thereof), may be fused with the constant domain of immunoglobulins (IgA, IgE, IgG, IgM), or portions thereof (CH1, CH2, CH3, or any combination thereof and portions thereof, resulting in chimeric polypeptides. By way of another non-limiting example, polypeptides and/or antibodies of the present invention (including fragments or variants thereof) may be fused with albumin (including but not limited to recombinant human serum albumin or fragments or variants thereof (see, e.g., U.S. Pat. No. 5,876,969, issued Mar. 2, 1999, EP Patent 0 413 622, and U.S. Pat. No. 5,766,883, issued Jun. 16, 1998, herein incorporated by reference in their entirety)). In a preferred embodiment, polypeptides and/or antibodies of the present invention (including fragments or variants thereof) are fused with the mature form of human serum albumin (i.e., amino acids 1-585 of human serum albumin as shown in FIGS. 1 and 2 of EP Patent 0 322 094) which is herein incorporated by reference in its entirety. In another preferred embodiment, polypeptides and/or antibodies of the present invention (including fragments or variants thereof) are fused with polypeptide fragments comprising, or alternatively consisting of, amino acid residues 1-z of human serum albumin, where z is an integer from 369 to 419, as described in U.S. Pat. No. 5,766,883 herein incorporated by reference in its entirety. Polypeptides and/or antibodies of the present invention (including fragments or variants thereof) may be fused to either the N- or C-terminal end of the heterologous protein (e.g., immunoglobulin Fc polypeptide or human serum albumin polypeptide). Polynucleotides encoding fusion proteins of the invention are also encompassed by the invention.

[0212] Such fusion proteins as those described above may facilitate purification and may increase half-life in vivo. This has been shown for chimeric proteins consisting of the first two domains of the human CD4-polypeptide and various domains of the constant regions of the heavy or light chains of mammalian immunoglobulins. See, e.g., EP 394,827; Traunecker et al., Nature, 331:84-86 (1988). Enhanced delivery of an antigen across the epithelial barrier to the immune system has been demonstrated for antigens (e.g., insulin) conjugated to an FcRn binding partner such as IgG or Fc fragments (see, e.g., PCT Publications WO 96/22024 and WO 99/04813). IgG fusion proteins that have a disulfide-linked dimeric structure due to the IgG portion desulfide bonds have also been found to be more efficient in binding and neutralizing other molecules than monomeric polypeptides or fragments thereof alone. See, e.g., Fountoulakis et al., J. Biochem., 270:3958-3964 (1995). Nucleic acids encoding the above epitopes can also be recombined with a gene of interest as an epitope tag (e.g., the hemagglutinin (HA) tag or flag tag) to aid in detection and purification of the expressed polypeptide. For example, a system described by Janknecht et al. allows for the ready purification of non-denatured fusion proteins expressed in human cell lines (Janknecht et al., 1991, Proc. Natl. Acad. Sci. USA 88:8972-897). In this system, the gene of interest is subcloned into a vaccinia recombination plasmid such that the open reading frame of the gene is translationally fused to an amino-terminal tag consisting of six histidine residues. The tag serves as a matrix binding domain for the fusion protein. Extracts from cells infected with the recombinant vaccinia virus are loaded onto Ni2+ nitriloacetic acid-agarose column and histidine-tagged proteins can be selectively eluted with imidazole-containing buffers.

Fusion Proteins

[0213] Any polypeptide of the present invention can be used to generate fusion proteins. For example, the polypeptide of the present invention, when fused to a second protein, can be used as an antigenic tag. Antibodies raised against the polypeptide of the present invention can be used to indirectly detect the second protein by binding to the polypeptide. Moreover, because secreted proteins target cellular locations based on trafficking signals, polypeptides of the present invention which are shown to be secreted can be used as targeting molecules once fused to other proteins.

[0214] Examples of domains that can be fused to polypeptides of the present invention include not only heterologous signal sequences, but also other heterologous functional regions. The fusion does not necessarily need to be direct, but may occur through linker sequences.

[0215] In certain preferred embodiments, proteins of the invention are fusion proteins comprising an amino acid sequence that is an N and/or C-terminal deletion of a polypeptide of the invention. In preferred embodiments, the invention is directed to a fusion protein comprising an amino acid sequence that is at least 90%, 95%, 96%, 97%, 98% or 99% identical to a polypeptide sequence of the invention. Polynucleotides encoding these proteins are also encompassed by the invention.

[0216] Moreover, fusion proteins may also be engineered to improve characteristics of the polypeptide of the present invention. For instance, a region of additional amino acids, particularly charged amino acids, may be added to the N-terminus of the polypeptide to improve stability and persistence during purification from the host cell or subsequent handling and storage. Also, peptide moieties may be added to the polypeptide to facilitate purification. Such regions may be removed prior to final preparation of the polypeptide. The addition of peptide moieties to facilitate handling of polypeptides are familiar and routine techniques in the art.

[0217] As one of skill in the art will appreciate that, as discussed above, polypeptides of the present invention, and epitope-bearing fragments thereof, can be combined with heterologous polypeptide sequences. For example, the polypeptides of the present invention may be fused with heterologous polypeptide sequences, for example, the polypeptides of the present invention may be fused with the constant domain of immunoglobulins (IgA, IgE, IgG, IgM) or portions thereof (CH1, CH2, CH3, and any combination thereof, including both entire domains and portions thereof), or albumin (including, but not limited to, native or recombinant human albumin or fragments or variants thereof (see, e.g., U.S. Pat. No. 5,876,969, issued Mar. 2, 1999, EP Patent 0 413 622, and U.S. Pat. No. 5,766,883, issued Jun. 16, 1998, herein incorporated by reference in their entirety)), resulting in chimeric polypeptides. For example, EP-A-O 464 533 (Canadian counterpart 2045869) discloses fusion proteins comprising various portions of constant region of immunoglobulin molecules together with another human protein or part thereof. In many cases, the Fc part in a fusion protein is beneficial in therapy and diagnosis, and thus can result in, for example, improved pharmacokinetic properties (EP-A 0232 262). Alternatively, deleting the Fc part after the fusion protein has been expressed, detected, and purified, would be desired. For example, the Fc portion may hinder therapy and diagnosis if the fusion protein is used as an antigen for immunizations. In drug discovery, for example, human proteins, such as hIL-5, have been fused with Fc portions for the purpose of high-throughput screening assays to identify antagonists of hIL-5. See, D. Bennett et al., J. Molecular Recognition 8:52-58 (1995); K. Johanson et al., J. Biol. Chem. 270:9459-9471 (1995).

[0218] Moreover, the polypeptides of the present invention can be fused to marker sequences, such as a polypeptide which facilitates purification of the fused polypeptide. In preferred embodiments, the marker amino acid sequence is a hexa-histidine peptide, such as the tag provided in a pQE vector (QIAGEN, Inc., 9259 Eton Avenue, Chatsworth, Calif., 91311), among others, many of which are commercially available. As described in Gentz et al., Proc. Natl. Acad. Sci. USA 86:821-824 (1989), for instance, hexa-histidine provides for convenient purification of the fusion protein. Another peptide tag useful for purification, the “HA” tag, corresponds to an epitope derived from the influenza hemagglutinin protein (Wilson et al., Cell 37:767 (1984)).

[0219] Additional fusion proteins of the invention may be generated through the techniques of gene-shuffling, motif-shuffling, exon-shuffling, and/or codon-shuffling (collectively referred to as “DNA shuffling”). DNA shuffling may be employed to modulate the activities of polypeptides of the invention, such methods can be used to generate polypeptides with altered activity, as well as agonists and antagonists of the polypeptides. See, generally, U.S. Pat. Nos. 5,605,793; 5,811,238; 5,830,721; 5,834,252; and 5,837,458, and Patten et al., Curr. Opinion Biotechnol. 8:724-33 (1997); Harayama, Trends Biotechnol. 16(2):76-82 (1998); Hansson, et al., J. Mol. Biol. 287:265-76 (1999); and Lorenzo and Blasco, Biotechniques 24(2):308-13 (1998) (each of these patents and publications are hereby incorporated by reference in its entirety). In one embodiment, alteration of polynucleotides corresponding to SEQ ID NO:X and the polypeptides encoded by these polynucleotides may be achieved by DNA shuffling. DNA shuffling involves the assembly of two or more DNA segments by homologous or site-specific recombination to generate variation in the polynucleotide sequence. In another embodiment, polynucleotides of the invention, or the encoded polypeptides, may be altered by being subjected to random mutagenesis by error-prone PCR, random nucleotide insertion or other methods prior to recombination. In another embodiment, one or more components, motifs, sections, parts, domains, fragments, etc., of a polynucleotide encoding a polypeptide of the invention may be recombined with one or more components, motifs, sections, parts, domains, fragments, etc. of one or more heterologous molecules.

[0220] Thus, any of these above fusions can be engineered using the polynucleotides or the polypeptides of the present invention.

Recombinant and Synthetic Production of Polypeptides of the Invention

[0221] The present invention also relates to vectors containing the polynucleotide of the present invention, host cells, and the production of polypeptides by synthetic and recombinant techniques. The vector may be, for example, a phage, plasmid, viral, or retroviral vector. Retroviral vectors may be replication competent or replication defective. In the latter case, viral propagation generally will occur only in complementing host cells.

[0222] The polynucleotides of the invention may be joined to a vector containing a selectable marker for propagation in a host. Generally, a plasmid vector is introduced in a precipitate, such as a calcium phosphate precipitate, or in a complex with a charged lipid. If the vector is a virus, it may be packaged in vitro using an appropriate packaging cell line and then transduced into host cells.

[0223] The polynucleotide insert should be operatively linked to an appropriate promoter, such as the phage lambda PL promoter, the E. coli lac, trp, phoA and tac promoters, the SV40 early and late promoters and promoters of retroviral LTRs, to name a few. Other suitable promoters will be known to the skilled artisan. The expression constructs will further contain sites for transcription initiation, termination, and, in the transcribed region, a ribosome binding site for translation. The coding portion of the transcripts expressed by the constructs will preferably include a translation initiating codon at the beginning and a termination codon (UAA, UGA or UAG) appropriately positioned at the end of the polypeptide to be translated.

[0224] As indicated, the expression vectors will preferably include at least one selectable marker. Such markers include dihydrofolate reductase, G418, glutamine synthase, or neomycin resistance for eukaryotic cell culture, and tetracycline, kanamycin or ampicillin resistance genes for culturing in E. coli and other bacteria. Representative examples of appropriate hosts include, but are not limited to, bacterial cells, such as E. coli, Streptomyces and Salmonella typhimurium cells; fungal cells, such as yeast cells (e.g., Saccharomyces cerevisiae or Pichia pastoris (ATCC Accession No. 201178)); insect cells such as Drosophila S2 and Spodoptera Sf9 cells; animal cells such as CHO, COS, 293, and Bowes melanoma cells; and plant cells. Appropriate culture mediums and conditions for the above-described host cells are known in the art.

[0225] Among vectors preferred for use in bacteria include pQE70, pQE60 and pQE9, available from QIAGEN, Inc.; pBluescript vectors, Phagescript vectors, pNH8A, pNH16a, pNH18A, pNH46A, available from Stratagene Cloning Systems, Inc.; and ptrc99a, pKK223-3, pKK233-3, pDR540, pRIT5 available from Pharmacia Biotech, Inc. Among preferred eukaryotic vectors are pWLNEO, pSV2CAT, pOG44, pXT1 and pSG available from Stratagene; and pSVK3, pBPV, pMSG and pSVL available from Pharmacia. Preferred expression vectors for use in yeast systems include, but are not limited to pYES2, pYD1, pTEF1/Zeo, pYES2/GS, pPICZ, pGAPZ, pGAPZalph, pPIC9, pPIC3.5, pHIL-D2, pHIL-S1, pPIC3.5K, pPIC9K, and PAO815 (all available from Invitrogen, Carlbad, Calif.). Other suitable vectors will be readily apparent to the skilled artisan.

[0226] Vectors which use glutamine synthase (GS) or DHFR as the selectable markers can be amplified in the presence of the drugs methionine sulphoximine or methotrexate, respectively. An advantage of glutamine synthase based vectors are the availabilty of cell lines (e.g., the murine myeloma cell line, NSO) which are glutamine synthase negative. Glutamine synthase expression systems can also function in glutamine synthase expressing cells (e.g., Chinese Hamster Ovary (CHO) cells) by providing additional inhibitor to prevent the functioning of the endogenous gene. A glutamine synthase expression system and components thereof are detailed in PCT publications: WO87/04462; WO86/05807; WO89/01036; WO89/10404; and WO91/06657, which are hereby incorporated in their entireties by reference herein. Additionally, glutamine synthase expression vectors can be obtained from Lonza Biologics, Inc. (Portsmouth, N.H.). Expression and production of monoclonal antibodies using a GS expression system in murine myeloma cells is described in Bebbington et al., Bio/technology 10:169(1992) and in Biblia and Robinson Biotechnol. Prog. 11: 1 (1995) which are herein incorporated by reference.

[0227] The present invention also relates to host cells containing the above-described vector constructs described herein, and additionally encompasses host cells containing nucleotide sequences of the invention that are operably associated with one or more heterologous control regions (e.g., promoter and/or enhancer) using techniques known of in the art. The host cell can be a higher eukaryotic cell, such as a mammalian cell (e.g., a human derived cell), or a lower eukaryotic cell, such as a yeast cell, or the host cell can be a prokaryotic cell, such as a bacterial cell. A host strain may be chosen which modulates the expression of the inserted gene sequences, or modifies and processes the gene product in the specific fashion desired. Expression from certain promoters can be elevated in the presence of certain inducers; thus expression of the genetically engineered polypeptide may be controlled. Furthermore, different host cells have characteristics and specific mechanisms for the translational and post-translational processing and modification (e.g., phosphorylation, cleavage) of proteins. Appropriate cell lines can be chosen to ensure the desired modifications and processing of the foreign protein expressed.

[0228] Introduction of the nucleic acids and nucleic acid constructs of the invention into the host cell can be effected by calcium phosphate transfection, DEAE-dextran mediated transfection, cationic lipid-mediated transfection, electroporation, transduction, infection, or other methods. Such methods are described in many standard laboratory manuals, such as Davis et al., Basic Methods In Molecular Biology (1986). It is specifically contemplated that the polypeptides of the present invention may in fact be expressed by a host cell lacking a recombinant vector.

[0229] In addition to encompassing host cells containing the vector constructs discussed herein, the invention also encompasses primary, secondary, and immortalized host cells of vertebrate origin, particularly mammalian origin, that have been engineered to delete or replace endogenous genetic material (e.g., the coding sequence), and/or to include genetic material (e.g., heterologous polynucleotide sequences) that is operably associated with polynucleotides of the invention, and which activates, alters, and/or amplifies endogenous polynucleotides. For example, techniques known in the art may be used to operably associate heterologous control regions (e.g., promoter and/or enhancer) and endogenous polynucleotide sequences via homologous recombination (see, e.g., U.S. Pat. No. 5,641,670, issued Jun. 24, 1997; International Publication Number WO 96/29411; International Publication Number WO 94/12650; Koller et al., Proc. Natl. Acad. Sci. USA 86:8932-8935 (1989); and Zijlstra et al., Nature 342:435-438 (1989), the disclosures of each of which are incorporated by reference in their entireties).

[0230] Polypeptides of the invention can be recovered and purified from recombinant cell cultures by well-known methods including ammonium sulfate or ethanol precipitation, acid extraction, anion or cation exchange chromatography, phosphocellulose chromatography, hydrophobic interaction chromatography, affinity chromatography, hydroxylapatite chromatography and lectin chromatography. Most preferably, high performance liquid chromatography (“HPLC”) is employed for purification.

[0231] Polypeptides of the present invention can also be recovered from products purified from natural sources, including bodily fluids, tissues and cells, whether directly isolated or cultured; products of chemical synthetic procedures; and products produced by recombinant techniques from a prokaryotic or eukaryotic host, including, for example, bacterial, yeast, higher plant, insect, and mammalian cells. Depending upon the host employed in a recombinant production procedure, the polypeptides of the present invention may be glycosylated or may be non-glycosylated. In addition, polypeptides of the invention may also include an initial modified methionine residue, in some cases as a result of host-mediated processes. Thus, it is well known in the art that the N-terminal methionine encoded by the translation initiation codon generally is removed with high efficiency from any protein after translation in all eukaryotic cells. While the N-terminal methionine on most proteins also is efficiently removed in most prokaryotes, for some proteins, this prokaryotic removal process is inefficient, depending on the nature of the amino acid to which the N-terminal methionine is covalently linked.

[0232] In one embodiment, the yeast Pichia pastoris is used to express polypeptides of the invention in a eukaryotic system. Pichia pastoris is a methylotrophic yeast which can metabolize methanol as its sole carbon source. A main step in the methanol metabolization pathway is the oxidation of methanol to formaldehyde using O₂. This reaction is catalyzed by the enzyme alcohol oxidase. In order to metabolize methanol as its sole carbon source, Pichia pastoris must generate high levels of alcohol oxidase due, in part, to the relatively low affinity of alcohol oxidase for O₂. Consequently, in a growth medium depending on methanol as a main carbon source, the promoter region of one of the two alcohol oxidase genes (AOX1) is highly active. In the presence of methanol, alcohol oxidase produced from the AOX1 gene comprises up to approximately 30% of the total soluble protein in Pichia pastoris. See Ellis, S. B., et al., Mol. Cell. Biol. 5:1111-21 (1985); Koutz, P. J, et al., Yeast 5:167-77 (1989); Tschopp, J. F., et al., Nucl. Acids Res. 15:3859-76 (1987). Thus, a heterologous coding sequence, such as, for example, a polynucleotide of the present invention, under the transcriptional regulation of all or part of the AOX1 regulatory sequence is expressed at exceptionally high levels in Pichia yeast grown in the presence of methanol.

[0233] In one example, the plasmid vector pPIC9K is used to express DNA encoding a polypeptide of the invention, as set forth herein, in a Pichea yeast system essentially as described in “Pichia Protocols: Methods in Molecular Biology,” D. R. Higgins and J. Cregg, eds. The Humana Press, Totowa, N.J., 1998. This expression vector allows expression and secretion of a polypeptide of the invention by virtue of the strong AOX1 promoter linked to the Pichia pastoris alkaline phosphatase (PHO) secretory signal peptide (i.e., leader) located upstream of a multiple cloning site.

[0234] Many other yeast vectors could be used in place of pPIC9K, such as, pYES2, pYD1, pTEF1/Zeo, pYES2/GS, pPICZ, pGAPZ, pGAPZalpha, pPIC9, pPIC3.5, pHIL-D2, pHL-S1, pPIC3.5K, and PAO815, as one skilled in the art would readily appreciate, as long as the proposed expression construct provides appropriately located signals for transcription, translation, secretion (if desired), and the like, including an in-frame AUG as required.

[0235] In another embodiment, high-level expression of a heterologous coding sequence, such as, for example, a polynucleotide of the present invention, may be achieved by cloning the heterologous polynucleotide of the invention into an expression vector such as, for example, pGAPZ or pGAPZalpha, and growing the yeast culture in the absence of methanol.

[0236] In addition to encompassing host cells containing the vector constructs discussed herein, the invention also encompasses primary, secondary, and immortalized host cells of vertebrate origin, particularly mammalian origin, that have been engineered to delete or replace endogenous genetic material (e.g., coding sequence), and/or to include genetic material (e.g., heterologous polynucleotide sequences) that is operably associated with polynucleotides of the invention, and which activates, alters, and/or amplifies endogenous polynucleotides. For example, techniques known in the art may be used to operably associate heterologous control regions (e.g., promoter and/or enhancer) and endogenous polynucleotide sequences via homologous recombination (see, e.g., U.S. Pat. No. 5,641,670, issued Jun. 24, 1997; International Publication No. WO 96/29411, published Sep. 26, 1996; International Publication No. WO 94/12650, published Aug. 4, 1994; Koller et al., Proc. Natl. Acad. Sci. USA 86:8932-8935 (1989); and Zijlstra et al., Nature 342:435-438 (1989), the disclosures of each of which are incorporated by reference in their entireties).

[0237] In addition, polypeptides of the invention can be chemically synthesized using techniques known in the art (e.g., see Creighton, 1983, Proteins: Structures and Molecular Principles, W.H. Freeman & Co., N.Y., and Hunkapiller et al., Nature, 310:105-111 (1984)). For example, a polypeptide corresponding to a fragment of a polypeptide can be synthesized by use of a peptide synthesizer. Furthermore, if desired, nonclassical amino acids or chemical amino acid analogs can be introduced as a substitution or addition into the polypeptide sequence. Non-classical amino acids include, but are not limited to, to the D-isomers of the common amino acids, 2,4-diaminobutyric acid, a-amino isobutyric acid, 4-aminobutyric acid, Abu, 2-amino butyric acid, g-Abu, e-Ahx, 6-amino hexanoic acid, Aib, 2-amino isobutyric acid, 3-amino propionic acid, ornithine, norleucine, norvaline, hydroxyproline, sarcosine, citrulline, homocitrulline, cysteic acid, t-butylglycine, t-butylalanine, phenylglycine, cyclohexylalanine, b-alanine, fluoro-amino acids, designer amino acids such as b-methyl amino acids, Ca-methyl amino acids, Na-methyl amino acids, and amino acid analogs in general. Furthermore, the amino acid can be D (dextrorotary) or L (levorotary).

[0238] The invention encompasses polypeptides of the present invention which are differentially modified during or after translation, e.g., by glycosylation, acetylation, phosphorylation, amidation, derivatization by known protecting/blocking groups, proteolytic cleavage, linkage to an antibody molecule or other cellular ligand, etc. Any of numerous chemical modifications may be carried out by known techniques, including but not limited, to specific chemical cleavage by cyanogen bromide, trypsin, chymotrypsin, papain, V8 protease, NaBH4; acetylation, formylation, oxidation, reduction; metabolic synthesis in the presence of tunicamycin; etc.

[0239] Additional post-translational modifications encompassed by the invention include, for example, e.g., N-linked or O-linked carbohydrate chains, processing of N-terminal or C-terminal ends), attachment of chemical moieties to the amino acid backbone, chemical modifications of N-linked or O-linked carbohydrate chains, and addition or deletion of an N-terminal methionine residue as a result of procaryotic host cell expression. The polypeptides may also be modified with a detectable label, such as an enzymatic, fluorescent, isotopic or affinity label to allow for detection and isolation of the protein.

[0240] Examples of suitable enzymes include horseradish peroxidase, alkaline phosphatase, beta-galactosidase, or acetylcholinesterase; examples of suitable prosthetic group complexes include streptavidin/biotin and avidin/biotin; examples of suitable fluorescent materials include umbelliferone, fluorescein, fluorescein isothiocyanate, rhodamine, dichlorotriazinylamine fluorescein, dansyl chloride or phycoerythrin; an example of a luminescent material includes luminol; examples of bioluminescent materials include luciferase, luciferin, and aequorin; and examples of suitable radioactive material include iodine (¹²¹I, ²³¹I, ¹²⁵I, ¹³¹I, carbon (¹⁴C), sulfur (³⁵S), tritium (³H), indium (¹¹¹In, ¹¹²In, ^{113m}In, ^{115m}In), technetium (⁹⁹Tc, ^{99m}Tc), thallium (²⁰¹Ti), gallium (⁶⁸Ga, ⁶⁷Ga), palladium (¹⁰³Pd), molybdenum (⁹⁹Mo), xenon (¹³³Xe), fluorine (¹⁸F), ¹⁵³Sm, ¹⁷⁷Lu, ¹⁵⁹Gd, ¹⁴⁹Pm, ¹⁴⁰La, ¹⁷⁵Yb, ¹⁶⁶Ho, ⁹⁰Y, ⁴⁷Sc, ¹⁸⁶Re, ¹⁸⁸Re, ¹⁴²Pr, ¹⁰⁵Rh, and ⁹⁷Ru.

[0241] In specific embodiments, a polypeptide of the present invention or fragment or variant thereof is attached to macrocyclic chelators that associate with radiometal ions, including but not limited to, ¹⁷⁷Lu, ⁹⁰Y, ¹⁶⁶Ho, and ¹⁵³Sm, to polypeptides. In a preferred embodiment, the radiometal ion associated with the macrocyclic chelators is ¹¹¹In. In another preferred embodiment, the radiometal ion associated with the macrocyclic chelator is ⁹⁰Y. In specific embodiments, the macrocyclic chelator is 1,4,7,10-tetraazacyclododecane-N,N′,N″,N″-tetraacetic acid (DOTA). In other specific embodiments, DOTA is attached to an antibody of the invention or fragment thereof via a linker molecule. Examples of linker molecules useful for conjugating DOTA to a polypeptide are commonly known in the art—see, for example, DeNardo et al., Clin Cancer Res. 4(10):2483-90 (1998); Peterson et al., Bioconjug. Chem. 10(4):553-7 (1999); and Zimmerman et al, Nucl. Med. Biol. 26(8):943-50 (1999); which are hereby incorporated by reference in their entirety.

[0242] As mentioned, the proteins of the invention may be modified by either natural processes, such as posttranslational processing, or by chemical modification techniques which are well known in the art. It will be appreciated that the same type of modification may be present in the same or varying degrees at several sites in a given polypeptide. Polypeptides of the invention may be branched, for example, as a result of ubiquitination, and they may be cyclic, with or without branching. Cyclic, branched, and branched cyclic polypeptides may result from posttranslation natural processes or may be made by synthetic methods. Modifications include acetylation, acylation, ADP-ribosylation, amidation, covalent attachment of flavin, covalent attachment of a heme moiety, covalent attachment of a nucleotide or nucleotide derivative, covalent attachment of a lipid or lipid derivative, covalent attachment of phosphotidylinositol, cross-linking, cyclization, disulfide bond formation, demethylation, formation of covalent cross-links, formation of cysteine, formation of pyroglutamate, formylation, gamma-carboxylation, glycosylation, GPI anchor formation, hydroxylation, iodination, methylation, myristoylation, oxidation, pegylation, proteolytic processing, phosphorylation, prenylation, racemization, selenoylation, sulfation, transfer-RNA mediated addition of amino acids to proteins such as arginylation, and ubiquitination. (See, for instance, PROTEINS—STRUCTURE AND MOLECULAR PROPERTIES, 2nd Ed., T. E. Creighton, W.H. Freeman and Company, New York (1993); POSTTRANSLATIONAL COVALENT MODIFICATION OF PROTEINS, B. C. Johnson, Ed., Academic Press, New York, pgs. 1-12 (1983); Seifter et al., Meth. Enzymol. 182:626-46 (1990); Rattan et al., Ann. N.Y. Acad. Sci. 663:48-62 (1992)).

[0243] Also provided by the invention are chemically modified derivatives of the polypeptides of the invention which may provide additional advantages such as increased solubility, stability and circulating time of the polypeptide, or decreased immunogenicity (see U.S. Pat. No. 4,179,337). The chemical moieties for derivitization may be selected from water soluble polymers such as polyethylene glycol, ethylene glycol/propylene glycol copolymers, carboxymethylcellulose, dextran, polyvinyl alcohol and the like. The polypeptides may be modified at random positions within the molecule, or at predetermined positions within the molecule and may include one, two, three or more attached chemical moieties.

[0244] The polymer may be of any molecular weight, and may be branched or unbranched. For polyethylene glycol, the preferred molecular weight is between about 1 kDa and about 100 kDa (the term “about” indicating that in preparations of polyethylene glycol, some molecules will weigh more, some less, than the stated molecular weight) for ease in handling and manufacturing. Other sizes may be used, depending on the desired therapeutic profile (e.g., the duration of sustained release desired, the effects, if any on biological activity, the ease in handling, the degree or lack of antigenicity and other known effects of the polyethylene glycol to a therapeutic protein or analog). For example, the polyethylene glycol may have an average molecular weight of about 200, 500, 1000, 1500, 2000, 2500, 3000, 3500, 4000, 4500, 5000, 5500, 6000, 6500, 7000, 7500, 8000, 8500, 9000, 9500, 10,000, 10,500, 11,000, 11,500, 12,000, 12,500, 13,000, 13,500, 14,000, 14,500, 15,000, 15,500, 16,000, 16,500, 17,000, 17,500, 18,000, 18,500, 19,000, 19,500, 20,000, 25,000, 30,000, 35,000, 40,000, 45,000, 50,000, 55,000, 60,000, 65,000, 70,000, 75,000, 80,000, 85,000, 90,000, 95,000, or 100,000 kDa.

[0245] As noted above, the polyethylene glycol may have a branched structure. Branched polyethylene glycols are described, for example, in U.S. Pat. No. 5,643,575; Morpurgo et al., Appl. Biochem. Biotechnol. 56:59-72 (1996); Vorobjev et al., Nucleosides Nucleotides 18:2745-2750 (1999); and Caliceti et al., Bioconjug. Chem. 10:638-646 (1999), the disclosures of each of which are incorporated herein by reference.

[0246] The polyethylene glycol molecules (or other chemical moieties) should be attached to the protein with consideration of effects on functional or antigenic domains of the protein. There are a number of attachment methods available to those skilled in the art, such as, for example, the method disclosed in EP 0 401 384 (coupling PEG to G-CSF), herein incorporated by reference; see also Malik et al., Exp. Hematol. 20:1028-1035 (1992), reporting pegylation of GM-CSF using tresyl chloride. For example, polyethylene glycol may be covalently bound through amino acid residues via a reactive group, such as a free amino or carboxyl group. Reactive groups are those to which an activated polyethylene glycol molecule may be bound. The amino acid residues having a free amino group may include lysine residues and the N-terminal amino acid residues; those having a free carboxyl group may include aspartic acid residues glutamic acid residues and the C-terminal amino acid residue. Sulfhydryl groups may also be used as a reactive group for attaching the polyethylene glycol molecules. Preferred for therapeutic purposes is attachment at an amino group, such as attachment at the N-terminus or lysine group.

[0247] As suggested above, polyethylene glycol may be attached to proteins via linkage to any of a number of amino acid residues. For example, polyethylene glycol can be linked to proteins via covalent bonds to lysine, histidine, aspartic acid, glutamic acid, or cysteine residues. One or more reaction chemistries may be employed to attach polyethylene glycol to specific amino acid residues (e.g., lysine, histidine, aspartic acid, glutamic acid, or cysteine) of the protein or to more than one type of amino acid residue (e.g., lysine, histidine, aspartic acid, glutamic acid, cysteine and combinations thereof) of the protein.

[0248] One may specifically desire proteins chemically modified at the N-terminus. Using polyethylene glycol as an illustration of the present composition, one may select from a variety of polyethylene glycol molecules (by molecular weight, branching, etc.), the proportion of polyethylene glycol molecules to protein (polypeptide) molecules in the reaction mix, the type of pegylation reaction to be performed, and the method of obtaining the selected N-terminally pegylated protein. The method of obtaining the N-terminally pegylated preparation (i.e., separating this moiety from other monopegylated moieties if necessary) may be by purification of the N-terminally pegylated material from a population of pegylated protein molecules. Selective proteins chemically modified at the N-terminus modification may be accomplished by reductive alkylation which exploits differential reactivity of different types of primary amino groups (lysine versus the N-terminal) available for derivatization in a particular protein. Under the appropriate reaction conditions, substantially selective derivatization of the protein at the N-terminus with a carbonyl group containing polymer is achieved.

[0249] As indicated above, pegylation of the proteins of the invention may be accomplished by any number of means. For example, polyethylene glycol may be attached to the protein either directly or by an intervening linker. Linkerless systems for attaching polyethylene glycol to proteins are described in Delgado et al., Crit. Rev. Thera. Drug Carrier Sys. 9:249-304 (1992); Francis et al., Intern. J. of Hematol. 68:1-18 (1998); U.S. Pat. No. 4,002,531; U.S. Pat. No. 5,349,052; WO 95/06058; and WO 98/32466, the disclosures of each of which are incorporated herein by reference.

[0250] One system for attaching polyethylene glycol directly to amino acid residues of proteins without an intervening linker employs tresylated MPEG, which is produced by the modification of monmethoxy polyethylene glycol (MPEG) using tresylchloride (ClSO₂CH₂CF₃). Upon reaction of protein with tresylated MPEG, polyethylene glycol is directly attached to amine groups of the protein. Thus, the invention includes protein-polyethylene glycol conjugates produced by reacting proteins of the invention with a polyethylene glycol molecule having a 2,2,2-trifluoreothane sulphonyl group.

[0251] Polyethylene glycol can also be attached to proteins using a number of different intervening linkers. For example, U.S. Pat. No. 5,612,460, the entire disclosure of which is incorporated herein by reference, discloses urethane linkers for connecting polyethylene glycol to proteins. Protein-polyethylene glycol conjugates wherein the polyethylene glycol is attached to the protein by a linker can also be produced by reaction of proteins with compounds such as MPEG-succinimidylsuccinate, MPEG activated with 1,1′-carbonyldiimidazole, MPEG-2,4,5-trichloropenylcarbonate, MPEG-p-nitrophenolcarbonate, and various MPEG-succinate derivatives. A number of additional polyethylene glycol derivatives and reaction chemistries for attaching polyethylene glycol to proteins are described in International Publication No. WO 98/32466, the entire disclosure of which is incorporated herein by reference. Pegylated protein products produced using the reaction chemistries set out herein are included within the scope of the invention.

[0252] The number of polyethylene glycol moieties attached to each protein of the invention (i.e., the degree of substitution) may also vary. For example, the pegylated proteins of the invention may be linked, on average, to 1, 2, 3, 4, 5, 6, 7, 8, 9, 10, 12, 15, 17, 20, or more polyethylene glycol molecules. Similarly, the average degree of substitution within ranges such as 1-3, 3-5, 4-6, 6-8, 8-10, 9-11, 10-12, 11-13, 12-14, 13-15, 14-16, 15-17, 16-18, 17-19, or 18-20 polyethylene glycol moieties per protein molecule. Methods for determining the degree of substitution are discussed, for example, in Delgado et al., Crit. Rev. Thera. Drug Carrier Sys. 9:249-304 (1992).

[0253] The polypeptides of the invention can be recovered and purified from chemical synthesis and recombinant cell cultures by standard methods which include, but are not limited to, ammonium sulfate or ethanol precipitation, acid extraction, anion or cation exchange chromatography, phosphocellulose chromatography, hydrophobic interaction chromatography, affinity chromatography, hydroxylapatite chromatography and lectin chromatography. Most preferably, high performance liquid chromatography (“HPLC”) is employed for purification. Well known techniques for refolding protein may be employed to regenerate active conformation when the polypeptide is denatured during isolation and/or purification.

[0254] The polypeptides of the invention may be in monomers or multimers (i.e., dimers, trimers, tetramers and higher multimers). Accordingly, the present invention relates to monomers and multimers of the polypeptides of the invention, their preparation, and compositions (preferably, Therapeutics) containing them. In specific embodiments, the polypeptides of the invention are monomers, dimers, trimers or tetramers. In additional embodiments, the multimers of the invention are at least dimers, at least trimers, or at least tetramers.

[0255] Multimers encompassed by the invention may be homomers or heteromers. As used herein, the term homomer refers to a multimer containing only polypeptides corresponding to a protein of the invention (e.g., the amino acid sequence of SEQ ID NO:Y, an amino acid sequence encoded by SEQ ID NO:X or the complement of SEQ ID NO:X, the amino acid sequence encoded by the portion of SEQ ID NO:X as defined in columns 8 and 9 of Table 2, and/or an amino acid sequence encoded by cDNA contained in ATCC Deposit No:Z (including fragments, variants, splice variants, and fusion proteins, corresponding to these as described herein)). These homomers may contain polypeptides having identical or different amino acid sequences. In a specific embodiment, a homomer of the invention is a multimer containing only polypeptides having an identical amino acid sequence. In another specific embodiment, a homomer of the invention is a multimer containing polypeptides having different amino acid sequences. In specific embodiments, the multimer of the invention is a homodimer (e.g., containing two polypeptides having identical or different amino acid sequences) or a homotrimer (e.g., containing three polypeptides having identical and/or different amino acid sequences). In additional embodiments, the homomeric multimer of the invention is at least a homodimer, at least a homotrimer, or at least a homotetramer.

[0256] As used herein, the term heteromer refers to a multimer containing one or more heterologous polypeptides (i.e., polypeptides of different proteins) in addition to the polypeptides of the invention. In a specific embodiment, the multimer of the invention is a heterodimer, a heterotrimer, or a heterotetramer. In additional embodiments, the heteromeric multimer of the invention is at least a heterodimer, at least a heterotramer, or at least a heterotetramer.

[0257] Multimers of the invention may be the result of hydrophobic, hydrophilic, ionic and/or covalent associations and/or may be indirectly linked by, for example, liposome formation. Thus, in one embodiment, multimers of the invention, such as, for example, homodimers or homotrimers, are formed when polypeptides of the invention contact one another in solution. In another embodiment, heteromultimers of the invention, such as, for example, heterotrimers or heterotetramers, are formed when polypeptides of the invention contact antibodies to the polypeptides of the invention (including antibodies to the heterologous polypeptide sequence in a fusion protein of the invention) in solution. In other embodiments, multimers of the invention are formed by covalent associations with and/or between the polypeptides of the invention. Such covalent associations may involve one or more amino acid residues contained in the polypeptide sequence (e.g., that recited in SEQ ID NO:Y, encoded by the portion of SEQ ID NO:X as defined in columns 8 and 9 of Table 2, and/or encoded by the cDNA contained in ATCC Deposit No:Z). In one instance, the covalent associations are cross-linking between cysteine residues located within the polypeptide sequences which interact in the native (i.e., naturally occurring) polypeptide. In another instance, the covalent associations are the consequence of chemical or recombinant manipulation. Alternatively, such covalent associations may involve one or more amino acid residues contained in the heterologous polypeptide sequence in a fusion protein. In one example, covalent associations are between the heterologous sequence contained in a fusion protein of the invention (see, e.g., U.S. Pat. No. 5,478,925). In a specific example, the covalent associations are between the heterologous sequence contained in a Fc fusion protein of the invention (as described herein). In another specific example, covalent associations of fusion proteins of the invention are between heterologous polypeptide sequence from another protein that is capable of forming covalently associated multimers, such as for example, osteoprotegerin (see, e.g., International Publication NO: WO 98/49305, the contents of which are herein incorporated by reference in its entirety). In another embodiment, two or more polypeptides of the invention are joined through peptide linkers. Examples include those peptide linkers described in U.S. Pat. No. 5,073,627 (hereby incorporated by reference). Proteins comprising multiple polypeptides of the invention separated by peptide linkers may be produced using conventional recombinant DNA technology.

[0258] Another method for preparing multimer polypeptides of the invention involves use of polypeptides of the invention fused to a leucine zipper or isoleucine zipper polypeptide sequence. Leucine zipper and isoleucine zipper domains are polypeptides that promote multimerization of the proteins in which they are found. Leucine zippers were originally identified in several DNA-binding proteins (Landschulz et al., Science 240:1759, (1988)), and have since been found in a variety of different proteins. Among the known leucine zippers are naturally occurring peptides and derivatives thereof that dimerize or trimerize. Examples of leucine zipper domains suitable for producing soluble multimeric proteins of the invention are those described in PCT application WO 94/10308, hereby incorporated by reference. Recombinant fusion proteins comprising a polypeptide of the invention fused to a polypeptide sequence that dimerizes or trimerizes in solution are expressed in suitable host cells, and the resulting soluble multimeric fusion protein is recovered from the culture supernatant using techniques known in the art.

[0259] Trimeric polypeptides of the invention may offer the advantage of enhanced biological activity. Preferred leucine zipper moieties and isoleucine moieties are those that preferentially form trimers. One example is a leucine zipper derived from lung surfactant protein D (SPD), as described in Hoppe et al. (FEBS Letters 344:191, (1994)) and in U.S. patent application Ser. No. 08/446,922, hereby incorporated by reference. Other peptides derived from naturally occurring trimeric proteins may be employed in preparing trimeric polypeptides of the invention.

[0260] In another example, proteins of the invention are associated by interactions between Flag® polypeptide sequence contained in fusion proteins of the invention containing Flag® polypeptide sequence. In a further embodiment, proteins of the invention are associated by interactions between heterologous polypeptide sequence contained in Flag® fusion proteins of the invention and anti-Flag® antibody.

[0261] The multimers of the invention may be generated using chemical techniques known in the art. For example, polypeptides desired to be contained in the multimers of the invention may be chemically cross-linked using linker molecules and linker molecule length optimization techniques known in the art (see, e.g., U.S. Pat. No. 5,478,925, which is herein incorporated by reference in its entirety). Additionally, multimers of the invention may be generated using techniques known in the art to form one or more inter-molecule cross-links between the cysteine residues located within the sequence of the polypeptides desired to be contained in the multimer (see, e.g., U.S. Pat. No. 5,478,925, which is herein incorporated by reference in its entirety). Further, polypeptides of the invention may be routinely modified by the addition of cysteine or biotin to the C-terminus or N-terminus of the polypeptide and techniques known in the art may be applied to generate multimers containing one or more of these modified polypeptides (see, e.g., U.S. Pat. No. 5,478,925, which is herein incorporated by reference in its entirety). Additionally, techniques known in the art may be applied to generate liposomes containing the polypeptide components desired to be contained in the multimer of the invention (see, e.g., U.S. Pat. No. 5,478,925, which is herein incorporated by reference in its entirety).

[0262] Alternatively, multimers of the invention may be generated using genetic engineering techniques known in the art. In one embodiment, polypeptides contained in multimers of the invention are produced recombinantly using fusion protein technology described herein or otherwise known in the art (see, e.g., U.S. Pat. No. 5,478,925, which is herein incorporated by reference in its entirety). In a specific embodiment, polynucleotides coding for a homodimer of the invention are generated by ligating a polynucleotide sequence encoding a polypeptide of the invention to a sequence encoding a linker polypeptide and then further to a synthetic polynucleotide encoding the translated product of the polypeptide in the reverse orientation from the original C-terminus to the N-terminus (lacking the leader sequence) (see, e.g., U.S. Pat. No. 5,478,925, which is herein incorporated by reference in its entirety). In another embodiment, recombinant techniques described herein or otherwise known in the art are applied to generate recombinant polypeptides of the invention which contain a transmembrane domain (or hydrophobic or signal peptide) and which can be incorporated by membrane reconstitution techniques into liposomes (see, e.g., U.S. Pat. No. 5,478,925, which is herein incorporated by reference in its entirety).

Antibodies

[0263] Further polypeptides of the invention relate to antibodies and T-cell antigen receptors (TCR) which immunospecifically bind a polypeptide, polypeptide fragment, or variant of the invention (e.g., a polypeptide or fragment or variant of the amino acid sequence of SEQ ID NO:Y or a polypeptide encoded by the cDNA contained in ATCC Deposit No:Z, and/or an epitope, of the present invention) as determined by immunoassays well known in the art for assaying specific antibody-antigen binding. Antibodies of the invention include, but are not limited to, polyclonal, monoclonal, multispecific, human, humanized or chimeric antibodies, single chain antibodies, Fab fragments, F(ab′) fragments, fragments produced by a Fab expression library, anti-idiotypic (anti-Id) antibodies (including, e.g., anti-Id antibodies to antibodies of the invention), intracellularly-made antibodies (i.e., intrabodies), and epitope-binding fragments of any of the above. The term “antibody,” as used herein, refers to immunoglobulin molecules and immunologically active portions of immunoglobulin molecules, i.e., molecules that contain an antigen binding site that immunospecifically binds an antigen. The immunoglobulin molecules of the invention can be of any type (e.g., IgG, IgE, IgM, IgD, IgA and IgY), class (e.g., IgG1, IgG2, IgG3, IgG4, IgA1 and IgA2) or subclass of immunoglobulin molecule. In preferred embodiments, the immunoglobulin molecules of the invention are IgG1. In other preferred embodiments, the immunoglobulin molecules of the invention are IgG4.

[0264] Most preferably the antibodies are human antigen-binding antibody fragments of the present invention and include, but are not limited to, Fab, Fab′ and F(ab′)2, Fd, single-chain Fvs (scFv), single-chain antibodies, disulfide-linked Fvs (sdFv) and fragments comprising either a VL or VH domain. Antigen-binding antibody fragments, including single-chain antibodies, may comprise the variable region(s) alone or in combination with the entirety or a portion of the following: hinge region, CH1, CH2, and CH3 domains. Also included in the invention are antigen-binding fragments also comprising any combination of variable region(s) with a hinge region, CH1, CH2, and CH3 domains. The antibodies of the invention may be from any animal origin including birds and mammals. Preferably, the antibodies are human, murine (e.g., mouse and rat), donkey, ship rabbit, goat, guinea pig, camel, horse, or chicken. As used herein, “human” antibodies include antibodies having the amino acid sequence of a human immunoglobulin and include antibodies isolated from human immunoglobulin libraries or from animals transgenic for one or more human immunoglobulin and that do not express endogenous immunoglobulins, as described infra and, for example in, U.S. Pat. No. 5,939,598 by Kucherlapati et al.

[0265] The antibodies of the present invention may be monospecific, bispecific, trispecific or of greater multispecificity. Multispecific antibodies may be specific for different epitopes of a polypeptide of the present invention or may be specific for both a polypeptide of the present invention as well as for a heterologous epitope, such as a heterologous polypeptide or solid support material. See, e.g., PCT publications WO 93/17715; WO 92/08802; WO 91/00360; WO 92/05793; Tutt, et al., J. Immunol. 147:60-69 (1991); U.S. Pat. Nos. 4,474,893; 4,714,681; 4,925,648; 5,573,920; 5,601,819; Kostelny et al., J. Immunol. 148:1547-1553 (1992).

[0266] Antibodies of the present invention may be described or specified in terms of the epitope(s) or portion(s) of a polypeptide of the present invention which they recognize or specifically bind. The epitope(s) or polypeptide portion(s) may be specified as described herein, e.g., by N-terminal and C-terminal positions, or by size in contiguous amino acid residues, or listed in the Tables and Figures. Preferred epitopes of the invention include the predicted epitopes shown in Table 1B, as well as polynucleotides that encode these epitopes. Antibodies which specifically bind any epitope or polypeptide of the present invention may also be excluded. Therefore, the present invention includes antibodies that specifically bind polypeptides of the present invention, and allows for the exclusion of the same.

[0267] Antibodies of the present invention may also be described or specified in terms of their cross-reactivity. Antibodies that do not bind any other analog, ortholog, or homolog of a polypeptide of the present invention are included. Antibodies that bind polypeptides with at least 95%, at least 90%, at least 85%, at least 80%, at least 75%, at least 70%, at least 65%, at least 60%, at least 55%, and at least 50% identity (as calculated using methods known in the art and described herein) to a polypeptide of the present invention are also included in the present invention. In specific embodiments, antibodies of the present invention cross-react with murine, rat and/or rabbit homologs of human proteins and the corresponding epitopes thereof. Antibodies that do not bind polypeptides with less than 95%, less than 90%, less than 85%, less than 80%, less than 75%, less than 70%, less than 65%, less than 60%, less than 55%, and less than 50% identity (as calculated using methods known in the art and described herein) to a polypeptide of the present invention are also included in the present invention. In a specific embodiment, the above-described cross-reactivity is with respect to any single specific antigenic or immunogenic polypeptide, or combination(s) of 2, 3, 4, 5, or more of the specific antigenic and/or immunogenic polypeptides disclosed herein. Further included in the present invention are antibodies which bind polypeptides encoded by polynucleotides which hybridize to a polynucleotide of the present invention under stringent hybridization conditions (as described herein). Antibodies of the present invention may also be described or specified in terms of their binding affinity to a polypeptide of the invention. Preferred binding affinities include those with a dissociation constant or Kd less than 5×10⁻² M, 10⁻²M, 5×10⁻³ M, 10⁻³ M, 5×10⁻⁴ M, 10⁻⁴ M, 5×10⁻⁵ M, 10⁻⁵ M, 5×10⁻⁶ M, 10⁻⁶M, 5×10⁻⁷ M, 10⁷ M, 5×10⁻⁸M, 10⁻⁸ M, 5×10⁻⁹ M, 10⁻⁹ M, 5×10⁻¹⁰ M, 10⁻¹⁰ M, 5×10⁻¹¹M, 10⁻¹¹ M, 5×10⁻¹² M, 10⁻¹² M, 5×10⁻¹³ M, 10⁻¹³ M, 5×10⁻¹⁴ M, 10⁻¹⁴ M, 5×10⁻¹⁵ M, or 10⁻¹⁵ M.

[0268] The invention also provides antibodies that competitively inhibit binding of an antibody to an epitope of the invention as determined by any method known in the art for determining competitive binding, for example, the immunoassays described herein. In preferred embodiments, the antibody competitively inhibits binding to the epitope by at least 95%, at least 90%, at least 85%, at least 80%, at least 75%, at least 70%, at least 60%, or at least 50%.

[0269] Antibodies of the present invention may act as agonists or antagonists of the polypeptides of the present invention. For example, the present invention includes antibodies which disrupt the receptor/ligand interactions with the polypeptides of the invention either partially or fully. Preferably, antibodies of the present invention bind an antigenic epitope disclosed herein, or a portion thereof. The invention features both receptor-specific antibodies and ligand-specific antibodies. The invention also features receptor-specific antibodies which do not prevent ligand binding but prevent receptor activation. Receptor activation (i.e., signaling) may be determined by techniques described herein or otherwise known in the art. For example, receptor activation can be determined by detecting the phosphorylation (e.g., tyrosine or serine/threonine) of the receptor or its substrate by immunoprecipitation followed by western blot analysis (for example, as described supra). In specific embodiments, antibodies are provided that inhibit ligand activity or receptor activity by at least 95%, at least 90%, at least 85%, at least 80%, at least 75%, at least 70%, at least 60%, or at least 50% of the activity in absence of the antibody.

[0270] The invention also features receptor-specific antibodies which both prevent ligand binding and receptor activation as well as antibodies that recognize the receptor-ligand complex, and, preferably, do not specifically recognize the unbound receptor or the unbound ligand. Likewise, included in the invention are neutralizing antibodies which bind the ligand and prevent binding of the ligand to the receptor, as well as antibodies which bind the ligand, thereby preventing receptor activation, but do not prevent the ligand from binding the receptor. Further included in the invention are antibodies which activate the receptor. These antibodies may act as receptor agonists, i.e., potentiate or activate either all or a subset of the biological activities of the ligand-mediated receptor activation, for example, by inducing dimerization of the receptor. The antibodies may be specified as agonists, antagonists or inverse agonists for biological activities comprising the specific biological activities of the peptides of the invention disclosed herein. The above antibody agonists can be made using methods known in the art. See, e.g., PCT publication WO 96/40281; U.S. Pat. No. 5,811,097; Deng et al., Blood 92(6):1981-1988 (1998); Chen et al., Cancer Res. 58(16):3668-3678 (1998); Harrop et al., J. Immunol. 161(4):1786-1794 (1998); Zhu et al., Cancer Res. 58(15):3209-3214 (1998); Yoon et al., J. Immunol. 160(7):3170-3179 (1998); Prat et al., J. Cell. Sci. 111(Pt2):237-247 (1998); Pitard et al., J. Immunol. Methods 205(2):177-190 (1997); Liautard et al., Cytokine 9(4):233-241 (1997); Carlson et al., J. Biol. Chem. 272(17):11295-11301 (1997); Taryman et al., Neuron 14(4):755-762 (1995); Muller et al., Structure 6(9):1153-1167 (1998); Bartunek et al., Cytokine 8(1):14-20 (1996) (which are all incorporated by reference herein in their entireties).

[0271] Antibodies of the present invention may be used, for example, to purify, detect, and target the polypeptides of the present invention, including both in vitro and in vivo diagnostic and therapeutic methods. For example, the antibodies have utility in immunoassays for qualitatively and quantitatively measuring levels of the polypeptides of the present invention in biological samples. See, e.g., Harlow et al., Antibodies: A Laboratory Manual, (Cold Spring Harbor Laboratory Press, 2nd ed. 1988); incorporated by reference herein in its entirety.

[0272] As discussed in more detail below, the antibodies of the present invention may be used either alone or in combination with other compositions. The antibodies may further be recombinantly fused to a heterologous polypeptide at the N- or C-terminus or chemically conjugated (including covalent and non-covalent conjugations) to polypeptides or other compositions. For example, antibodies of the present invention may be recombinantly fused or conjugated to molecules useful as labels in detection assays and effector molecules such as heterologous polypeptides, drugs, radionuclides, or toxins. See, e.g., PCT publications WO 92/08495; WO 91/14438; WO 89/12624; U.S. Pat. No. 5,314,995; and EP 396,387; the disclosures of which are incorporated herein by reference in their entireties.

[0273] The antibodies of the invention include derivatives that are modified, i.e, by the covalent attachment of any type of molecule to the antibody such that covalent attachment does not prevent the antibody from generating an anti-idiotypic response. For example, but not by way of limitation, the antibody derivatives include antibodies that have been modified, e.g., by glycosylation, acetylation, pegylation, phosphylation, amidation, derivatization by known protecting/blocking groups, proteolytic cleavage, linkage to a cellular ligand or other protein, etc. Any of numerous chemical modifications may be carried out by known techniques, including, but not limited to specific chemical cleavage, acetylation, formylation, metabolic synthesis of tunicamycin, etc. Additionally, the derivative may contain one or more non-classical amino acids.

[0274] The antibodies of the present invention may be generated by any suitable method known in the art. Polyclonal antibodies to an antigen-of-interest can be produced by various procedures well known in the art. For example, a polypeptide of the invention can be administered to various host animals including, but not limited to, rabbits, mice, rats, etc. to induce the production of sera containing polyclonal antibodies specific for the antigen. Various adjuvants may be used to increase the immunological response, depending on the host species, and include but are not limited to, Freund's (complete and incomplete), mineral gels such as aluminum hydroxide, surface active substances such as lysolecithin, pluronic polyols, polyanions, peptides, oil emulsions, keyhole limpet hemocyanins, dinitrophenol, and potentially useful human adjuvants such as BCG (bacille Calmette-Guerin) and corynebacterium parvum. Such adjuvants are also well known in the art.

[0275] Monoclonal antibodies can be prepared using a wide variety of techniques known in the art including the use of hybridoma, recombinant, and phage display technologies, or a combination thereof. For example, monoclonal antibodies can be produced using hybridoma techniques including those known in the art and taught, for example, in Harlow et al., Antibodies: A Laboratory Manual, (Cold Spring Harbor Laboratory Press, 2nd ed. 1988); Hammerling, et al., in: Monoclonal Antibodies and T-Cell Hybridomas 563-681 (Elsevier, N.Y., 1981) (said references incorporated by reference in their entireties). The term “monoclonal antibody” as used herein is not limited to antibodies produced through hybridoma technology. The term “monoclonal antibody” refers to an antibody that is derived from a single clone, including any eukaryotic, prokaryotic, or phage clone, and not the method by which it is produced.

[0276] Methods for producing and screening for specific antibodies using hybridoma technology are routine and well known in the art and are discussed in detail in the Examples. In a non-limiting example, mice can be immunized with a polypeptide of the invention or a cell expressing such peptide. Once an immune response is detected, e.g., antibodies specific for the antigen are detected in the mouse serum, the mouse spleen is harvested and splenocytes isolated. The splenocytes are then fused by well known techniques to any suitable myeloma cells, for example cells from cell line SP20 available from the ATCC. Hybridomas are selected and cloned by limited dilution. The hybridoma clones are then assayed by methods known in the art for cells that secrete antibodies capable of binding a polypeptide of the invention. Ascites fluid, which generally contains high levels of antibodies, can be generated by immunizing mice with positive hybridoma clones.

[0277] Accordingly, the present invention provides methods of generating monoclonal antibodies as well as antibodies produced by the method comprising culturing a hybridoma cell secreting an antibody of the invention wherein, preferably, the hybridoma is generated by fusing splenocytes isolated from a mouse immunized with an antigen of the invention with myeloma cells and then screening the hybridomas resulting from the fusion for hybridoma clones that secrete an antibody able to bind a polypeptide of the invention.

[0278] Another well known method for producing both polyclonal and monoclonal human B cell lines is transformation using Epstein Barr Virus (EBV). Protocols for generating EBV-transformed B cell lines are commonly known in the art, such as, for example, the protocol outlined in Chapter 7.22 of Current Protocols in Immunology, Coligan et al., Eds., 1994, John Wiley & Sons, NY, which is hereby incorporated in its entirety by reference. The source of B cells for transformation is commonly human peripheral blood, but B cells for transformation may also be derived from other sources including, but not limited to, lymph nodes, tonsil, spleen, tumor tissue, and infected tissues. Tissues are generally made into single cell suspensions prior to EBV transformation. Additionally, steps may be taken to either physically remove or inactivate T cells (e.g., by treatment with cyclosporin A) in B cell-containing samples, because T cells from individuals seropositive for anti-EBV antibodies can suppress B cell immortalization by EBV.

[0279] In general, the sample containing human B cells is innoculated with EBV, and cultured for 3-4 weeks. A typical source of EBV is the culture supernatant of the B95-8 cell line (ATCC #VR-1492). Physical signs of EBV transformation can generally be seen towards the end of the 3-4 week culture period. By phase-contrast microscopy, transformed cells may appear large, clear, hairy and tend to aggregate in tight clusters of cells. Initially, EBV lines are generally polyclonal. However, over prolonged periods of cell cultures, EBV lines may become monoclonal or polyclonal as a result of the selective outgrowth of particular B cell clones. Alternatively, polyclonal EBV transformed lines may be subcloned (e.g., by limiting dilution culture) or fused with a suitable fusion partner and plated at limiting dilution to obtain monoclonal B cell lines. Suitable fusion partners for EBV transformed cell lines include mouse myeloma cell lines (e.g., SP2/0, X63-Ag8.653), heteromyeloma cell lines (human×mouse; e.g, SPAM-8, SBC-H20, and CB-F7), and human cell lines (e.g., GM 1500, SKO-007, RPMI 8226, and KR-4). Thus, the present invention also provides a method of generating polyclonal or monoclonal human antibodies against polypeptides of the invention or fragments thereof, comprising EBV-transformation of human B cells.

[0280] Antibody fragments which recognize specific epitopes may be generated by known techniques. For example, Fab and F(ab′)2 fragments of the invention may be produced by proteolytic cleavage of immunoglobulin molecules, using enzymes such as papain (to produce Fab fragments) or pepsin (to produce F(ab′)2 fragments). F(ab′)2 fragments contain the variable region, the light chain constant region and the CH1 domain of the heavy chain.

[0281] For example, the antibodies of the present invention can also be generated using various phage display methods known in the art. In phage display methods, functional antibody domains are displayed on the surface of phage particles which carry the polynucleotide sequences encoding them. In a particular embodiment, such phage can be utilized to display antigen binding domains expressed from a repertoire or combinatorial antibody library (e.g., human or murine). Phage expressing an antigen binding domain that binds the antigen of interest can be selected or identified with antigen, e.g., using labeled antigen or antigen bound or captured to a solid surface or bead. Phage used in these methods are typically filamentous phage including fd and M13 binding domains expressed from phage with Fab, Fv or disulfide stabilized Fv antibody domains recombinantly fused to either the phage gene III or gene VIII protein. Examples of phage display methods that can be used to make the antibodies of the present invention include those disclosed in Brinkan et al., J. Immunol. Methods 182:41-50 (1995); Ames et al., J. Immunol. Methods 184:177-186 (1995); Kettleborough et al., Eur. J. Immunol. 24:952-958 (1994); Persic et al., Gene 187 9-18 (1997); Burton et al., Advances in Immunology 57:191-280 (1994); PCT application No. PCT/GB91/01134; PCT” publications WO 90/02809; WO 91/10737; WO 92/01047; WO 92/18619; WO 93/11236; WO 95/15982; WO 95/20401; and U.S. Pat. Nos. 5,698,426; 5,223,409; 5,403,484; 5,580,717; 5,427,908; 5,750,753; 5,821,047; 5,571,698; 5,427,908; 5,516,637; 5,780,225; 5,658,727; 5,733,743 and 5,969,108; each of which is incorporated herein by reference in its entirety.

[0282] As described in the above references, after phage selection, the antibody coding regions from the phage can be isolated and used to generate whole antibodies, including human antibodies, or any other desired antigen binding fragment, and expressed in any desired host, including mammalian cells, insect cells, plant cells, yeast, and bacteria, e.g., as described in detail below. For example, techniques to recombinantly produce Fab, Fab′ and F(ab′)2 fragments can also be employed using methods known in the art such as those disclosed in PCT publication WO 92/22324; Mullinax et al., BioTechniques 12(6):864-869 (1992); and Sawai et al., AJRI 34:26-34 (1995); and Better et al., Science 240:1041-1043 (1988) (said references incorporated by reference in their entireties).

[0283] Examples of techniques which can be used to produce single-chain Fvs and antibodies include those described in U.S. Pat. Nos. 4,946,778 and 5,258,498; Huston et al., Methods in Enzymology 203:46-88 (1991); Shu et al., PNAS 90:7995-7999 (1993); and Skerra et al., Science 240:1038-1040 (1988). For some uses, including in vivo use of antibodies in humans and in vitro detection assays, it may be preferable to use chimeric, humanized, or human antibodies. A chimeric antibody is a molecule in which different portions of the antibody are derived from different animal species, such as antibodies having a variable region derived from a murine monoclonal antibody and a human immunoglobulin constant region. Methods for producing chimeric antibodies are known in the art. See e.g., Morrison, Science 229:1202 (1985); Oi et al., BioTechniques 4:214 (1986); Gillies et al., (1989) J. Immunol. Methods 125:191-202; U.S. Pat. Nos. 5,807,715; 4,816,567; and 4,816397, which are incorporated herein by reference in their entirety. Humanized antibodies are antibody molecules from non-human species antibody that binds the desired antigen having one or more complementarity determining regions (CDRs) from the non-human species and a framework regions from a human immunoglobulin molecule. Often, framework residues in the human framework regions will be substituted with the corresponding residue from the CDR donor antibody to alter, preferably improve, antigen binding. These framework substitutions are identified by methods well known in the art, e.g., by modeling of the interactions of the CDR and framework residues to identify framework residues important for antigen binding and sequence comparison to identify unusual framework residues at particular positions. (See, e.g., Queen et al., U.S. Pat. No. 5,585,089; Riechmann et al., Nature 332:323 (1988), which are incorporated herein by reference in their entireties.) Antibodies can be humanized using a variety of techniques known in the art including, for example, CDR-grafting (EP 239,400; PCT publication WO 91/09967; U.S. Pat. Nos. 5,225,539; 5,530,101; and 5,585,089), veneering or resurfacing (EP 592,106; EP 519,596; Padlan, Molecular Immunology 28(4/5):489-498 (1991); Studnicka et al., Protein Engineering 7(6):805-814 (1994); Roguska. et al., PNAS 91:969-973 (1994)), and chain shuffling (U.S. Pat. No. 5,565,332).

[0284] Completely human antibodies are particularly desirable for therapeutic treatment of human patients. Human antibodies can be made by a variety of methods known in the art including phage display methods described above using antibody libraries derived from human immunoglobulin sequences. See also, U.S. Pat. Nos. 4,444,887 and 4,716,111; and PCT publications WO 98/46645, WO 98/50433, WO 98/24893, WO 98/16654, WO 96/34096, WO 96/33735, and WO 91/10741; each of which is incorporated herein by reference in its entirety.

[0285] Human antibodies can also be produced using transgenic mice which are incapable of expressing functional endogenous immunoglobulins, but which can express human immunoglobulin genes. For example, the human heavy and light chain immunoglobulin gene complexes may be introduced randomly or by homologous recombination into mouse embryonic stem cells. Alternatively, the human variable region, constant region, and diversity region may be introduced into mouse embryonic stem cells in addition to the human heavy and light chain genes. The mouse heavy and light chain immunoglobulin genes may be rendered non-functional separately or simultaneously with the introduction of human immunoglobulin loci by homologous recombination. In particular, homozygous deletion of the JH region prevents endogenous antibody production. The modified embryonic stem cells are expanded and microinjected into blastocysts to produce chimeric mice. The chimeric mice are then bred to produce homozygous offspring which express human antibodies. The transgenic mice are immunized in the normal fashion with a selected antigen, e.g., all or a portion of a polypeptide of the invention. Monoclonal antibodies directed against the antigen can be obtained from the immunized, transgenic mice using conventional hybridoma technology. The human immunoglobulin transgenes harbored by the transgenic mice rearrange during B cell differentiation, and subsequently undergo class switching and somatic mutation. Thus, using such a technique, it is possible to produce therapeutically useful IgG, IgA, IgM and IgE antibodies. For an overview of this technology for producing human antibodies, see Lonberg and Huszar, Int. Rev. Immunol. 13:65-93 (1995). For a detailed discussion of this technology for producing human antibodies and human monoclonal antibodies and protocols for producing such antibodies, see, e.g., PCT publications WO 98/24893; WO 92/01047; WO 96/34096; WO 96/33735; European Patent No. 0 598 877; U.S. Pat. Nos. 5,413,923; 5,625,126; 5,633,425; 5,569,825; 5,661,016; 5,545,806; 5,814,318; 5,885,793; 5,916,771; 5,939,598; 6,075,181; and 6,114,598, which are incorporated by reference herein in their entirety. In addition, companies such as Abgenix, Inc. (Freemont, Calif.) and Genpharm (San Jose, Calif.) can be engaged to provide human antibodies directed against a selected antigen using technology similar to that described above.

[0286] Completely human antibodies which recognize a selected epitope can be generated using a technique referred to as “guided selection.” In this approach a selected non-human monoclonal antibody, e.g., a mouse antibody, is used to guide the selection of a completely human antibody recognizing the same epitope. (Jespers et al., Bio/technology 12:899-903 (1988)).

[0287] Further, antibodies to the polypeptides of the invention can, in turn, be utilized to generate anti-idiotype antibodies that “mimic” polypeptides of the invention using techniques well known to those skilled in the art. (See, e.g., Greenspan & Bona, FASEB J. 7(5):437-444; (1989) and Nissinoff, J. Immunol. 147(8):2429-2438 (1991)). For example, antibodies which bind to and competitively inhibit polypeptide multimerization and/or binding of a polypeptide of the invention to a ligand can be used to generate anti-idiotypes that “mimic” the polypeptide multimerization and/or binding domain and, as a consequence, bind to and neutralize polypeptide and/or its ligand. Such neutralizing anti-idiotypes or Fab fragments of such anti-idiotypes can be used in therapeutic regimens to neutralize polypeptide ligand(s)/receptor(s). For example, such anti-idiotypic antibodies can be used to bind a polypeptide of the invention and/or to bind its ligand(s)/receptor(s), and thereby block its biological activity. Alternatively, antibodies which bind to and enhance polypeptide multimerization and/or binding, and/or receptor/ligand multimerization, binding and/or signaling can be used to generate anti-idiotypes that function as agonists of a polypeptide of the invention and/or its ligand/receptor. Such agonistic anti-idiotypes or Fab fragments of such anti-idiotypes can be used in therapeutic regimens as agonists of the polypeptides of the invention or its ligand(s)/receptor(s). For example, such anti-idiotypic antibodies can be used to bind a polypeptide of the invention and/or to bind its ligand(s)/receptor(s), and thereby promote or enhance its biological activity.

[0288] Intrabodies of the invention can be produced using methods known in the art, such as those disclosed and reviewed in Chen et al., Hum. Gene Ther. 5:595-601 (1994); Marasco, W. A., Gene Ther. 4:11-15 (1997); Rondon and Marasco, Annu. Rev. Microbiol. 51:257-283 (1997); Proba et al., J. Mol. Biol. 275:245-253 (1998); Cohen et al., Oncogene 17:2445-2456 (1998); Ohage and Steipe, J. Mol. Biol. 291:1119-1128 (1999); Ohage et al., J. Mol. Biol. 291:1129-1134 (1999); Wirtz and Steipe, Protein Sci. 8:2245-2250 (1999); Zhu et al., J. Immunol. Methods 231:207-222 (1999); and references cited therein.

Polynucleotides Encoding Antibodies

[0289] The invention further provides polynucleotides comprising a nucleotide sequence encoding an antibody of the invention and fragments thereof. The invention also encompasses polynucleotides that hybridize under stringent or alternatively, under lower stringency hybridization conditions, e.g., as defined supra, to polynucleotides that encode an antibody, preferably, that specifically binds to a polypeptide of the invention, preferably, an antibody that binds to a polypeptide having the amino acid sequence of SEQ ID NO:Y, to a polypeptide encoded by a portion of SEQ ID NO:X as defined in columns 8 and 9 of Table 2, and/or to a polypeptide encoded by the cDNA contained in ATCC Deposit No:Z.

[0290] The polynucleotides may be obtained, and the nucleotide sequence of the polynucleotides determined, by any method known in the art For example, if the nucleotide sequence of the antibody is known, a polynucleotide encoding the antibody may be assembled from chemically synthesized oligonucleotides (e.g., as described in Kutmeier et al., BioTechniques 17:242 (1994)), which, briefly, involves the synthesis of overlapping oligonucleotides containing portions of the sequence encoding the antibody, annealing and ligating of those oligonucleotides, and then amplification of the ligated oligonucleotides by PCR.

[0291] Alternatively, a polynucleotide encoding an antibody may be generated from nucleic acid from a suitable source. If a clone containing a nucleic acid encoding a particular antibody is not available, but the sequence of the antibody molecule is known, a nucleic acid encoding the immunoglobulin may be chemically synthesized or obtained from a suitable source (e.g., an antibody cDNA library, or a cDNA library generated from, or nucleic acid, preferably poly A+ RNA, isolated from, any tissue or cells expressing the antibody, such as hybridoma cells selected to express an antibody of the invention) by PCR amplification using synthetic primers hybridizable to the 3′ and 5′ ends of the sequence or by cloning using an oligonucleotide probe specific for the particular gene sequence to identify, e.g., a cDNA clone from a cDNA library that encodes the antibody. Amplified nucleic acids generated by PCR may then be cloned into replicable cloning vectors using any method well known in the art.

[0292] Once the nucleotide sequence and corresponding amino acid sequence of the antibody is determined, the nucleotide sequence of the antibody may be manipulated using methods well known in the art for the manipulation of nucleotide sequences, e.g., recombinant DNA techniques, site directed mutagenesis, PCR, etc. (see, for example, the techniques described in Sambrook et al., 1990, Molecular Cloning, A Laboratory Manual, 2d Ed., Cold Spring Harbor Laboratory, Cold Spring Harbor, N.Y. and Ausubel et al., eds., 1998, Current Protocols in Molecular Biology, John Wiley & Sons, NY, which are both incorporated by reference herein in their entireties), to generate antibodies having a different amino acid sequence, for example to create amino acid substitutions, deletions, and/or insertions.

[0293] In a specific embodiment, the amino acid sequence of the heavy and/or light chain variable domains may be inspected to identify the sequences of the complementarity determining regions (CDRs) by methods that are well know in the art, e.g., by comparison to known amino acid sequences of other heavy and light chain variable regions to determine the regions of sequence hypervariability. Using routine recombinant DNA techniques, one or more of the CDRs may be inserted within framework regions, e.g., into human framework regions to humanize a non-human antibody, as described supra. The framework regions may be naturally occurring or consensus framework regions, and preferably human framework regions (see, e.g., Chothia et al., J. Mol. Biol. 278: 457-479 (1998) for a listing of human framework regions). Preferably, the polynucleotide generated by the combination of the framework regions and CDRs encodes an antibody that specifically binds a polypeptide of the invention. Preferably, as discussed supra, one or more amino acid substitutions may be made within the framework regions, and, preferably, the amino acid substitutions improve binding of the antibody to its antigen. Additionally, such methods may be used to make amino acid substitutions or deletions of one or more variable region cysteine residues participating in an intrachain disulfide bond to generate antibody molecules lacking one or more intrachain disulfide bonds. Other alterations to the polynucleotide are encompassed by the present invention and within the skill of the art.

[0294] In addition, techniques developed for the production of “chimeric antibodies” (Morrison et al., Proc. Natl. Acad. Sci. 81:851-855 (1984); Neuberger et al., Nature 312:604-608 (1984); Takeda et al., Nature 314:452-454 (1985)) by splicing genes from a mouse antibody molecule of appropriate antigen specificity together with genes from a human antibody molecule of appropriate biological activity can be used. As described supra, a chimeric antibody is a molecule in which different portions are derived from different animal species, such as those having a variable region derived from a murine mAb and a human immunoglobulin constant region, e.g., humanized antibodies.

[0295] Alternatively, techniques described for the production of single chain antibodies (U.S. Pat. No. 4,946,778; Bird, Science 242:423-42 (1988); Huston et al., Proc. Natl. Acad. Sci. USA 85:5879-5883 (1988); and Ward et al., Nature 334:544-54 (1989)) can be adapted to produce single chain antibodies. Single chain antibodies are formed by linking the heavy and light chain fragments of the Fv region via an amino acid bridge, resulting in a single chain polypeptide. Techniques for the assembly of functional Fv fragments in E. coli may also be used (Skerra et al., Science 242:1038-1041 (1988)).

Methods of Producing Antibodies

[0296] The antibodies of the invention can be produced by any method known in the art for the synthesis of antibodies, in particular, by chemical synthesis or preferably, by recombinant expression techniques. Methods of producing antibodies include, but are not limited to, hybridoma technology, EBV transformation, and other methods discussed herein as well as through the use recombinant DNA technology, as discussed below.

[0297] Recombinant expression of an antibody of the invention, or fragment, derivative or analog thereof, (e.g., a heavy or light chain of an antibody of the invention or a single chain antibody of the invention), requires construction of an expression vector containing a polynucleotide that encodes the antibody. Once a polynucleotide encoding an antibody molecule or a heavy or light chain of an antibody, or portion thereof (preferably containing the heavy or light chain variable domain), of the invention has been obtained, the vector for the production of the antibody molecule may be produced by recombinant DNA technology using techniques well known in the art. Thus, methods for preparing a protein by expressing a polynucleotide containing an antibody encoding nucleotide sequence are described herein. Methods which are well known to those skilled in the art can be used to construct expression vectors containing antibody coding sequences and appropriate transcriptional and translational control signals. These methods include, for example, in vitro recombinant DNA techniques, synthetic techniques, and in vivo genetic recombination. The invention, thus, provides replicable vectors comprising a nucleotide sequence encoding an antibody molecule of the invention, or a heavy or light chain thereof, or a heavy or light chain variable domain, operably linked to a promoter. Such vectors may include the nucleotide sequence encoding the constant region of the antibody molecule (see, e.g., PCT Publication WO 86/05807; PCT Publication WO 89/01036; and U.S. Pat. No. 5,122,464) and the variable domain of the antibody may be cloned into such a vector for expression of the entire heavy or light chain.

[0298] The expression vector is transferred to a host cell by conventional techniques and the transfected cells are then cultured by conventional techniques to produce an antibody of the invention. Thus, the invention includes host cells containing a polynucleotide encoding an antibody of the invention, or a heavy or light chain thereof, or a single chain antibody of the invention, operably linked to a heterologous promoter. In preferred embodiments for the expression of double-chained antibodies, vectors encoding both the heavy and light chains may be co-expressed in the host cell for expression of the entire immunoglobulin molecule, as detailed below.

[0299] A variety of host-expression vector systems may be utilized to express the antibody molecules of the invention. Such host-expression systeins represent vehicles by which the coding sequences of interest may be produced and subsequently purified, but also represent cells which may, when transformed or transfected with the appropriate nucleotide coding sequences, express an antibody molecule of the invention in situ. These include but are not limited to microorganisms such as bacteria (e.g., E. coli, B. subtilis) transformed with recombinant bacteriophage DNA, plasmid DNA or cosmid DNA expression vectors containing antibody coding sequences; yeast (e.g., Saccharomyces, Pichia) transformed with recombinant yeast expression vectors containing antibody coding sequences; insect cell systems infected with recombinant virus expression vectors (e.g., baculovirus) containing antibody coding sequences; plant cell systems infected with recombinant virus expression vectors (e.g., cauliflower mosaic virus, CaMV; tobacco mosaic virus, TMV) or transformed with recombinant plasmid expression vectors (e.g., Ti plasmid) containing antibody coding sequences; or mammalian cell systems (e.g., COS, CHO, BHK, 293, 3T3 cells) harboring recombinant expression constructs containing promoters derived from the genome of mammalian cells (e.g., metallothionein promoter) or from rnammalian viruses (e.g., the adenovirus late promoter; the vaccinia virus 7.5K promoter). Preferably, bacterial cells such as Escherichia coli, and more preferably, eukaryotic cells, especially for the expression of whole recombinant antibody molecule, are used for the expression of a recombinant antibody molecule. For example, mammalian cells such as Chinese hamster ovary cells (CHO), in conjunction with a vector such as the major intermediate early gene promoter element from human cytomegalovirus is an effective expression system for antibodies (Foecking et al., Gene 45:101 (1986); Cockett et al., Bio/Technology 8:2 (1990)).

[0300] In bacterial systems, a number of expression vectors may be advantageously selected depending upon the use intended for the antibody molecule being expressed. For example, when a large quantity of such a protein is to be produced, for the generation of pharmaceutical compositions of an antibody molecule, vectors which direct the expression of high levels of fusion protein products that are readily purified may be desirable. Such vectors include, but are not limited, to the E. coli expression vector pUR278 (Ruther et al., EMBO J. 2:1791 (1983)), in which the antibody coding sequence may be ligated individually into the vector in frame with the lac Z coding region so that a fusion protein is produced; pIN vectors (Inouye & Inouye, Nucleic Acids Res. 13:3101-3109 (1985); Van Heeke & Schuster, J. Biol. Chem. 24:5503-5509 (1989)); and the like. pGEX vectors may also be used to express foreign polypeptides as fusion proteins with glutathione S-transferase (GST). In general, such fusion proteins are soluble and can easily be purified from lysed cells by adsorption and binding to matrix glutathione-agarose beads followed by elution in the presence of free glutathione. The pGEX vectors are designed to include thrombin or factor Xa protease cleavage sites so that the cloned target gene product can be released from the GST moiety.

[0301] In an insect system, Autographa californica nuclear polyhedrosis virus (AcNPV) is used as a vector to express foreign genes. The virus grows in Spodoptera frugiperda cells. The antibody coding sequence may be cloned individually into non-essential regions (for example the polyhedrin gene) of the virus and placed under control of an AcNPV promoter (for example the polyhedrin promoter).

[0302] In mammalian host cells, a number of viral-based expression systems may be utilized. In cases where an adenovirus is used as an expression vector, the antibody coding sequence of interest may be ligated to an adenovirus transcription/translation control complex, e.g., the late promoter and tripartite leader sequence. This chimeric gene may then be inserted in the adenovirus genome by in vitro or in vivo recombination. Insertion in a non-essential region of the viral genome (e.g., region E1 or E3) will result in a recombinant virus that is viable and capable of expressing the antibody molecule in infected hosts. (e.g., see Logan & Shenk, Proc. Natl. Acad. Sci. USA 81:355-359 (1984)). Specific initiation signals may also be required for efficient translation of inserted antibody coding sequences. These signals include the ATG initiation codon and adjacent sequences. Furthermore, the initiation codon must be in phase with the reading frame of the desired coding sequence to ensure translation of the entire insert. These exogenous translational control signals and initiation codons can be of a variety of origins, both natural and synthetic. The efficiency of expression may be enhanced by the inclusion of appropriate transcription enhancer elements, transcription terminators, etc. (see Bittner et al., Methods in Enzymol. 153:51-544 (1987)).

[0303] In addition, a host cell strain may be chosen which modulates the expression of the inserted sequences, or modifies and processes the gene product in the specific fashion desired. Such modifications (e.g., glycosylation) and processing (e.g., cleavage) of protein products may be important for the function of the protein. Different host cells have characteristic and specific mechanisms for the post-translational processing and modification of proteins and gene products. Appropriate cell lines or host systems can be chosen to ensure the correct modification and processing of the foreign protein expressed. To this end, eukaryotic host cells which possess the cellular machinery for proper processing of the primary transcript, glycosylation, and phosphorylation of the gene product may be used. Such mammalian host cells include but are not limited to CHO, VERY, BHK, Hela, COS, MDCK, 293, 3T3, WI38, and in particular, breast cancer cell lines such as, for example, BT483, Hs578T, HTB2, BT20 and T47D, and normal mammary gland cell line such as, for example, CRL7030 and Hs578Bst.

[0304] For long-term, high-yield production of recombinant proteins, stable expression is preferred. For example, cell lines which stably express the antibody molecule may be engineered. Rather than using expression vectors which contain viral origins of replication, host cells can be transformed with DNA controlled by appropriate expression control elements (e.g., promoter, enhancer, sequences, transcription terminators, polyadenylation sites, etc.), and a selectable marker. Following the introduction of the foreign DNA, engineered cells may be allowed to grow for 1-2 days in an enriched media, and then are switched to a selective media. The selectable marker in the recombinant plasmid confers resistance to the selection and allows cells to stably integrate the plasmid into their chromosomes and grow to form foci which in turn can be cloned and expanded into cell lines. This method may advantageously be used to engineer cell lines which express the antibody molecule. Such engineered cell lines may be particularly useful in screening and evaluation of compounds that interact directly or indirectly with the antibody molecule.

[0305] A number of selection systems may be used, including but not limited to the herpes simplex virus thymidine kinase (Wigler et al., Cell 11:223 (1977)), hypoxanthine-guanine phosphoribosyltransferase (Szybalska & Szybalski, Proc. Natl. Acad. Sci. USA 48:202 (1992)), and adenine phosphoribosyltransferase (Lowy et al., Cell 22:817 (1980)) genes can be employed in tk-, hgprt- or aprt-cells, respectively. Also, antimetabolite resistance can be used as the basis of selection for the following genes: dhfr, which confers resistance to methotrexate (Wigler et al., Natl. Acad. Sci. USA 77:357 (1980); O'Hare et al., Proc. Natl. Acad. Sci. USA 78:1527 (1981)); gpt, which confers resistance to mycophenolic acid (Mulligan & Berg, Proc. Natl. Acad. Sci. USA 78:2072 (1981)); neo, which confers resistance to the aminoglycoside G-418 Clinical Pharmacy 12:488-505; Wu and Wu, Biotherapy 3:87-95 (1991); Tolstoshev, Ann. Rev. Pharmacol. Toxicol. 32:573-596 (1993); Mulligan, Science 260:926-932 (1993); and Morgan and Anderson, Ann. Rev. Biochem. 62:191-217 (1993); May, 1993, TIB TECH 11(5):155-215 (1993)); and hygro, which confers resistance to hygromycin (Santerre et al., Gene 30:147 (1984)). Methods commonly known in the art of recombinant DNA technology may be routinely applied to select the desired recombinant clone, and such methods are described, for example, in Ausubel et al. (eds.), Current Protocols in Molecular Biology, John Wiley & Sons, NY (1993); Kriegler, Gene Transfer and Expression, A Laboratory Manual, Stockton Press, NY (1990); and in Chapters 12 and 13, Dracopoli et al. (eds), Current Protocols in Human Genetics, John Wiley & Sons, NY (1994); Colberre-Garapin et al., J. Mol. Biol. 150:1 (1981), which are incorporated by reference herein in their entireties.

[0306] The expression levels of an antibody molecule can be increased by vector amplification (for a review, see Bebbington and Hentschel, The use of vectors based on gene amplification for the expression of cloned genes in mammalian cells in DNA cloning, Vol. 3. (Academic Press, New York, 1987)). When a marker in the vector system expressing antibody is amplifiable, increase in the level of inhibitor present in culture of host cell will increase the number of copies of the marker gene. Since the amplified region is associated with the antibody gene, production of the antibody will also increase (Crouse et al., Mol. Cell. Biol. 3:257 (1983)).

[0307] Vectors which use glutamine synthase (GS) or DHFR as the selectable markers can be amplified in the presence of the drugs methionine sulphoximine or methotrexate, respectively. An advantage of glutamine synthase based vectors are the availabilty of cell lines (e.g., the murine myeloma cell line, NSO) which are glutamine synthase negative. Glutamine synthase expression systems can also function in glutamine synthase expressing cells (e.g. Chinese Hamster Ovary (CHO) cells) by providing additional inhibitor to prevent the functioning of the endogenous gene. A glutamine synthase expression system and components thereof are detailed in PCT publications: WO87/04462; WO86/05807; WO89/01036; WO89/10404; and WO91/06657 which are incorporated in their entireties by reference herein. Additionally, glutamine synthase expression vectors that may be used according to the present invention are commercially available from suplliers, including, for example Lonza Biologics, Inc. (Portsmouth, N.H.). Expression and production of monoclonal antibodies using a GS expression system in murine myeloma cells is described in Bebbington et al., Bio/technology 10:169(1992) and in Biblia and Robinson Biotechnol. Prog. 11:1 (1995) which are incorporated in their entirities by reference herein.

[0308] The host cell may be co-transfected with two expression vectors of the invention, the first vector encoding a heavy chain derived polypeptide and the second vector encoding a light chain derived polypeptide. The two vectors may contain identical selectable markers which enable equal expression of heavy and light chain polypeptides. Alternatively, a single vector may be used which encodes, and is capable of expressing, both heavy and light chain polypeptides. In such situations, the light chain should be placed before the heavy chain to avoid an excess of toxic free heavy chain (Proudfoot, Nature 322:52 (1986); Kohler, Proc. Natl. Acad. Sci. USA 77:2197 (1980)). The coding sequences for the heavy and light chains may comprise cDNA or genomic DNA.

[0309] Once an antibody molecule of the invention has been produced by an animal, chemically synthesized, or recombinantly expressed, it may be purified by any method known in the art for purification of an immunoglobulin molecule, for example, by chromatography (e.g., ion exchange, affinity, particularly by affinity for the specific antigen after Protein A, and sizing column chromatography), centrifugation, differential solubility, or by any other standard technique for the purification of proteins. In addition, the antibodies of the present invention or fragments thereof can be fused to heterologous polypeptide sequences described herein or otherwise known in the art, to facilitate purification.

[0310] The present invention encompasses antibodies recombinantly fused or chemically conjugated (including both covalently and non-covalently conjugations) to a polypeptide (or portion thereof, preferably at least 10, 20, 30, 40, 50, 60, 70, 80, 90 or 100 amino acids of the polypeptide) of the present invention to generate fusion proteins. The fusion does not necessarily need to be direct, but may occur through linker sequences. The antibodies may be specific for antigens other than polypeptides (or portion thereof, preferably at least 10, 20, 30, 40, 50, 60, 70, 80, 90 or 100 amino acids of the polypeptide) of the present invention. For example, antibodies may be used to target the polypeptides of the present invention to particular cell types, either in vitro or in vivo, by fusing or conjugating the polypeptides of the present invention to antibodies specific for particular cell surface receptors. Antibodies fused or conjugated to the polypeptides of the present invention may also be used in in vitro immunoassays and purification methods using methods known in the art. See e.g., Harbor et al., supra, and PCT publication WO 93/21232; EP 439,095; Naramura et al., Immunol. Lett. 39:91-99 (1994); U.S. Pat. No. 5,474,981; Gillies et al., PNAS 89:1428-1432 (1992); Fell et al., J. Immunol. 146:2446-2452 (1991), which are incorporated by reference in their entireties.

[0311] The present invention further includes compositions comprising the polypeptides of the present invention fused or conjugated to antibody domains other than the variable regions. For example, the polypeptides of the present invention may be fused or conjugated to an antibody Fc region, or portion thereof. The antibody portion fused to a polypeptide of the present invention may comprise the constant region, hinge region, CH1 domain, CH2 domain, and CH3 domain or any combination of whole domains or portions thereof. The polypeptides may also be fused or conjugated to the above antibody portions to form multimers. For example, Fc portions fused to the polypeptides of the present invention can form dimers through disulfide bonding between the Fc portions. Higher multimeric forms can be made by fusing the polypeptides to portions of IgA and IgM. Methods for fusing or conjugating the polypeptides of the present invention to antibody portions are known in the art. See, e.g., U.S. Pat. Nos. 5,336,603; 5,622,929; 5,359,046; 5,349,053; 5,447,851; 5,112,946; EP 307,434; EP 367,166; PCT publications WO 96/04388; WO 91/06570; Ashkenazi et al., Proc. Natl. Acad. Sci. USA 88:10535-10539 (1991); Zheng et al., J. Immunol. 154:5590-5600 (1995); and Vil et al., Proc. Natl. Acad. Sci. USA 89:11337-11341 (1992) (said references incorporated by reference in their entireties).

[0312] As discussed, supra, the polypeptides corresponding to a polypeptide, polypeptide fragment, or a variant of SEQ ID NO:Y may be fused or conjugated to the above antibody portions to increase the in vivo half life of the polypeptides or for use in immunoassays using methods known in the art. Further, the polypeptides corresponding to SEQ ID NO:Y may be fused or conjugated to the above antibody portions to facilitate purification. One reported example describes chimeric proteins consisting of the first two domains of the human CD4-polypeptide and various domains of the constant regions of the heavy or light chains of mammalian immunoglobulins. See EP 394,827; and Traunecker et al., Nature 331:84-86 (1988). The polypeptides of the present invention fused or conjugated to an antibody having disulfide-linked dimeric structures (due to the IgG) may also be more efficient in binding and neutralizing other molecules, than the monomeric secreted protein or protein fragment alone. See, for example, Fountoulakis et al., J. Biochem. 270:3958-3964 (1995). In many cases, the Fc part in a fusion protein is beneficial in therapy and diagnosis, and thus can result in, for example, improved pharmacokinetic properties. See, for example, EP A 232,262. Alternatively, deleting the Fc part after the fusion protein has been expressed, detected, and purified, would be desired. For example, the Fc portion may hinder therapy and diagnosis if the fusion protein is used as an antigen for immunizations. In drug discovery, for example, human proteins, such as hIL-5, have been fused with Pc portions for the purpose of high-throughput screening assays to identify antagonists of hIL-5. (See, Bennett et al., J. Molecular Recognition 8:52-58 (1995); Johanson et al., J. Biol. Chem. 270:9459-9471 (1995)).

[0313] Moreover, the antibodies or fragments thereof of the present invention can be fused to marker sequences, such as a peptide to facilitate purification. In preferred embodiments, the marker amino acid sequence is a hexa-histidine peptide, such as the tag provided in a pQE vector (QIAGEN, Inc., 9259 Eton Avenue, Chatsworth, Calif., 91311), among others, many of which are commercially available. As described in Gentz et al., Proc. Natl. Acad. Sci. USA 86:821-824 (1989), for instance, hexa-histidine provides for convenient purification of the fusion protein. Other peptide tags useful for purification include, but are not limited to, the “HA” tag, which corresponds to an epitope derived from the influenza hemagglutinin protein (Wilson et al., Cell 37:767 (1984)) and the “flag” tag.

[0314] The present invention further encompasses antibodies or fragments thereof conjugated to a diagnostic or therapeutic agent. The antibodies can be used diagnostically to, for example, monitor the development or progression of a tumor as part of a clinical testing procedure to, e.g., determine the efficacy of a given treatment regimen. Detection can be facilitated by coupling the antibody to a detectable substance. Examples of detectable substances include various enzymes, prosthetic groups, fluorescent materials, luminescent materials, bioluminescent materials, radioactive materials, positron emitting metals using various positron emission tomographies, and nonradioactive paramagnetic metal ions. The detectable substance may be coupled or conjugated either directly to the antibody (or fragment thereof) or indirectly, through an intermediate (such as, for example, a linker known in the art) using techniques known in the art. See, for example, U.S. Pat. No. 4,741,900 for metal ions which can be conjugated to antibodies for use as diagnostics according to the present invention. Examples of suitable enzymes include horseradish peroxidase, alkaline phosphatase, beta-galactosidase, or acetylcholinesterase; examples of suitable prosthetic group complexes include streptavidin/biotin and avidin/biotin; examples of suitable fluorescent materials include umbelliferone, fluorescein, fluorescein isothiocyanate, rhodamine, dichlorotriazinylamine fluorescein, dansyl chloride or phycoerythrin; an example of a luminescent material includes luminol; examples of bioluminescent materials include luciferase, luciferin, and aequorin; and examples of suitable radioactive material include 125I, 131I, 111In or 99Tc.

[0315] Further, an antibody or fragment thereof may be conjugated to a therapeutic moiety such as a cytotoxin, e.g., a cytostatic or cytocidal agent, a therapeutic agent or a radioactive metal ion, e.g., alpha-emitters such as, for example, 213Bi. A cytotoxin or cytotoxic agent includes any agent that is detrimental to cells. Examples include paclitaxol, cytochalasin B, gramicidin D, ethidium bromide, emetine, mitomycin, etoposide, tenoposide, vincristine, vinblastine, colchicin, doxorubicin, daunorubicin, dihydroxy anthracin dione, mitoxantrone, mithramycin, actinomycin D, 1-dehydrotestosterone, glucocorticoids, procaine, tetracaine, lidocaine, propranolol, and puromycin and analogs or homologs thereof. Therapeutic agents include, but are not limited to, antimetabolites (e.g., methotrexate, 6-mercaptopurine, 6-thioguanine, cytarabine, 5-fluorouracil decarbazine), alkylating agents (e.g., mechlorethamine, thioepa chlorambucil, melphalan, carmustine (BSNU) and lomustine (CCNU), cyclothosphamide, busulfan, dibromomannitol, streptozotocin, mitomycin C, and cis-dichlorodiamine platinum (II) (DDP) cisplatin), anthracyclines (e.g., daunorubicin (formerly daunomycin) and doxorubicin), antibiotics (e.g., dactinomycin (formerly actinomycin), bleomycin, mithramycin, and anthramycin (AMC)), and anti-mitotic agents (e.g., vincristine and vinblastine).

[0316] The conjugates of the invention can be used for modifying a given biological response, the therapeutic agent or drug moiety is not to be construed as limited to classical chemical therapeutic agents. For example, the drug moiety may be a protein or polypeptide possessing a desired biological activity. Such proteins may include, for example, a toxin such as abrin, ricin A, pseudomonas exotoxin, or diphtheria toxin; a protein such as tumor necrosis factor, a-interferon, 13-interferon, nerve growth factor, platelet derived growth factor, tissue plasminogen activator, an apoptotic agent, e.g., TNF-alpha, TNF-beta, AIM I (See, International Publication No. WO 97/33899), AIM II (See, International Publication No. WO 97/34911), Fas Ligand (Takahashi et al., Int. Immunol., 6:1567-1574 (1994)), VEGI (See, International Publication No. WO 99/23105), a thrombotic agent or an anti-angiogenic agent, e.g., angiostatin or endostatin; or, biological response modifiers such as, for example, lymphokines, interleukin-1 (“IL-1”), interleukin-2 (“IL-2”), interleukin-6 (“IL-6”), granulocyte macrophage colony stimulating factor (“GM-CSF”), granulocyte colony stimulating factor (“G-CSF”), or other growth factors.

[0317] Antibodies may also be attached to solid supports, which are particularly useful for immunoassays or purification of the target antigen. Such solid supports include, but are not limited to, glass, cellulose, polyacrylamide, nylon, polystyrene, polyvinyl chloride or polypropylene.

[0318] Techniques for conjugating such therapeutic moiety to antibodies are well known. See, for example, Amon et al., “Monoclonal Antibodies For Immunotargeting Of Drugs In Cancer Therapy”, in Monoclonal Antibodies And Cancer Therapy, Reisfeld et al. (eds.), pp. 243-56 (Alan R. Liss, Inc. 1985); Hellstrom et al., “Antibodies For Drug Delivery”, in Controlled Drug Delivery (2nd Ed.), Robinson et al. (eds.), pp. 623-53 (Marcel Dekker, Inc. 1987); Thorpe, “Antibody Carriers Of Cytotoxic Agents In Cancer Therapy: A Review”, in Monoclonal Antibodies '84: Biological And Clinical Applications, Pinchera et al. (eds.), pp. 475-506 (1985); “Analysis, Results, And Future Prospective Of The Therapeutic Use Of Radiolabeled Antibody In Cancer Therapy”, in Monoclonal Antibodies For Cancer Detection And Therapy, Baldwin et al. (eds.), pp. 303-16 (Academic Press 1985), and Thorpe et al., “The Preparation And Cytotoxic Properties Of Antibody-Toxin Conjugates”, Immunol. Rev. 62:119-58 (1982).

[0319] Alternatively, an antibody can be conjugated to a second antibody to form an antibody heteroconjugate as described by Segal in U.S. Pat. No. 4,676,980, which is incorporated herein by reference in its entirety.

[0320] An antibody, with or without a therapeutic moiety conjugated to it, administered alone or in combination with cytotoxic factor(s) and/or cytokine(s) can be used as a therapeutic.

Immunophenotyping

[0321] The antibodies of the invention may be utilized for immunophenotyping of cell lines and biological samples. Translation products of the gene of the present invention may be useful as cell-specific markers, or more specifically as cellular markers that are differentially expressed at various stages of differentiation and/or maturation of particular cell types. Monoclonal antibodies directed against a specific epitope, or combination of epitopes, will allow for the screening of cellular populations expressing the marker. Various techniques can be utilized using monoclonal antibodies to screen for cellular populations expressing the marker(s), and include magnetic separation using antibody-coated magnetic beads, “panning” with antibody attached to a solid matrix (i.e., plate), and flow cytometry (See, e.g., U.S. Pat. No. 5,985,660; and Morrison et al., Cell, 96:737-49 (1999)).

[0322] These techniques allow for the screening of particular populations of cells, such as might be found with hematological malignancies (i.e. minimal residual disease (MRD) in acute leukemic patients) and “non-self” cells in transplantations to prevent Graft-versus-Host Disease (GVHD). Alternatively, these techniques allow for the screening of hematopoietic stem and progenitor cells capable of undergoing proliferation and/or differentiation, as might be found in human umbilical cord blood.

Assays for Antibody Binding

[0323] The antibodies of the invention may be assayed for immunospecific binding by any method known in the art. The immunoassays which can be used include but are not limited to competitive and non-competitive assay systems using techniques such as western blots, radioimmunoassays, ELISA (enzyme linked immunosorbent assay), “sandwich” immunoassays, immunoprecipitation assays, precipitin reactions, gel diffusion precipitin reactions, immunodiffusion assays, agglutination assays, complement-fixation assays, immunoradiometric assays, fluorescent immunoassays, and protein A immunoassays, to name but a few. Such assays are routine and well known in the art (see, e.g., Ausubel et al, eds, 1994, Current Protocols in Molecular Biology, Vol. 1, John Wiley & Sons, Inc., New York, which is incorporated by reference herein in its entirety). Exemplary immunoassays are described briefly below (but are not intended by way of limitation).

[0324] Immunoprecipitation protocols generally comprise lysing a population of cells in a lysis buffer such as RIPA buffer (1% NP-40 or Triton X-100, 1% sodium deoxycholate, 0.1% SDS, 0.15 M NaCl, 0.01 M sodium phosphate at pH 7.2, 1% Trasylol) supplemented with protein phosphatase and/or protease inhibitors (e.g., EDTA, PMSF, aprotinin, sodium vanadate), adding the antibody of interest to the cell lysate, incubating for a period of time (e.g., 1-4 hours) at 4° C., adding protein A and/or protein G sepharose beads to the cell lysate, incubating for about an hour or more at 4° C., washing the beads in lysis buffer and resuspending the beads in SDS/sample buffer. The ability of the antibody of interest to immunoprecipitate a particular antigen can be assessed by, e.g., western blot analysis. One of skill in the art would be knowledgeable as to the parameters that can be modified to increase the binding of the antibody to an antigen and decrease the background (e.g., pre-clearing the cell lysate with sepharose beads). For further discussion regarding immunoprecipitation protocols see, e.g., Ausubel et al., eds., (1994), Current Protocols in Molecular Biology, Vol. 1, John Wiley & Sons, Inc., New York, section 10.16.1.

[0325] Western blot analysis generally comprises preparing protein samples, electrophoresis of the protein samples in a polyacrylamide gel (e.g., 8%-20% SDS-PAGE depending on the molecular weight of the antigen), transferring the protein sample from the polyacrylamide gel to a membrane such as nitrocellulose, PVDF or nylon, blocking the membrane in blocking solution (e.g., PBS with 3% BSA or non-fat milk), washing the membrane in washing buffer (e.g., PBS-Tween 20), blocking the membrane with primary antibody (the antibody of interest) diluted in blocking buffer, washing the membrane in washing buffer, blocking the membrane with a secondary antibody (which recognizes the primary antibody, e.g., an anti-human antibody) conjugated to an enzymatic substrate (e.g., horseradish peroxidase or alkaline phosphatase) or radioactive molecule (e.g., 32P or 125I) diluted in blocking buffer, washing the membrane in wash buffer, and detecting the presence of the antigen. One of skill in the art would be knowledgeable as to the parameters that can be modified to increase the signal detected and to reduce the background noise. For further discussion regarding western blot protocols see, e.g., Ausubel et al, eds, (1994), Current Protocols in Molecular Biology, Vol. 1, John Wiley & Sons, Inc., New York, section 10.8.1.

[0326] ELISAs comprise preparing antigen, coating the well of a 96 well microtiter plate with the antigen, adding the antibody of interest conjugated to a detectable compound such as an enzymatic substrate (e.g., horseradish peroxidase or alkaline phosphatase) to the well and incubating for a period of time, and detecting the presence of the antigen. In ELISAs the antibody of interest does not have to be conjugated to a detectable compound; instead, a second antibody (which recognizes the antibody of interest) conjugated to a detectable compound may be added to the well. Further, instead of coating the well with the antigen, the antibody may be coated to the well. In this case, a second antibody conjugated to a detectable compound may be added following the addition of the antigen of interest to the coated well. One of skill in the art would be knowledgeable as to the parameters that can be modified to increase the signal detected as well as other variations of ELISAs known in the art. For further discussion regarding ELISAs see, e.g., Ausubel et al, eds, (1994), Current Protocols in Molecular Biology, Vol. 1, John Wiley & Sons, Inc., New York, section 11.2.1.

[0327] The binding affinity of an antibody to an antigen and the off-rate of an antibody-antigen interaction can be determined by competitive binding assays. One example of a competitive binding assay is a radioimmunoassay comprising the incubation of labeled antigen (e.g., 3H or 125I) with the antibody of interest in the presence of increasing amounts of unlabeled antigen, and the detection of the antibody bound to the labeled antigen. The affinity of the antibody of interest for a particular antigen and the binding off-rates can be determined from the data by scatchard plot analysis. Competition with a second antibody can also be determined using radioimmunoassays. In this case, the antigen is incubated with antibody of interest conjugated to a labeled compound (e.g., 3H or 125I) in the presence of increasing amounts of an unlabeled second antibody.

[0328] Antibodies of the invention may be characterized using immunocytochemisty methods on cells (e.g., mammalian cells, such as CHO cells) transfected with a vector enabling the expression of an antigen or with vector alone using techniques commonly known in the art. Antibodies that bind antigen transfected cells, but not vector-only transfected cells, are antigen specific.

Therapeutic Uses

[0329] Table 1D also provides information regarding biological activities and preferred therapeutic uses (i.e. see, “Preferred Indications” column) for polynucleotides and polypeptides of the invention (including antibodies, agonists, and/or antagonists thereof). Table 1D also provides information regarding assays which may be used to test polynucleotides and polypeptides of the invention (including antibodies, agonists, and/or antagonists thereof) for the corresponding biological activities. The first column (“Gene No.”) provides the gene number in the application for each clone identifier. The second column (“cDNA ATCC Deposit No:Z”) provides the unique clone identifier for each clone as previously described and indicated in Table 1A, Table 1B, and Table 1C. The third column (“AA SEQ ID NO:Y”) indicates the Sequence Listing SEQ ID Number for polypeptide sequences encoded by the corresponding cDNA clones (also as indicated in Table 1A, Table 1B, and Table 2). The fourth column (“Biological Activity”) indicates a biological activity corresponding to the indicated polypeptides (or polynucleotides encoding said polypeptides). The fifth column (“Exemplary Activity Assay”) further describes the corresponding biological activity and also provides information pertaining to the various types of assays which may be performed to test, demonstrate, or quantify the corresponding biological activity.

[0330] The present invention is further directed to antibody-based therapies which involve administering antibodies of the invention to an animal, preferably a mammal, and most preferably a human, patient for treating one or more of the disclosed diseases, disorders, or conditions. Therapeutic compounds of the invention include, but are not limited to, antibodies of the invention (including fragments, analogs and derivatives thereof as described herein) and nucleic acids encoding antibodies of the invention (including fragments, analogs and derivatives thereof and anti-idiotypic antibodies as described herein). The antibodies of the invention can be used to detect, prevent, diagnose, prognosticate, treat, and/or ameliorate diseases, disorders or conditions associated with aberrant expression and/or activity of a polypeptide of the invention, including, but not limited to, hematopoietic and hematologic diseases and disorders. The treatment and/or prevention of hematopoietic and hematologic diseases and disorders associated with aberrant expression and/or activity of a polypeptide of the invention includes, but is not limited to, alleviating symptoms associated with hematopoietic and hematologic diseases and disorders. Antibodies of the invention may be provided in pharmaceutically acceptable compositions as known in the art or as described herein.

[0331] In a specific and preferred embodiment, the present invention is directed to antibody-based therapies which involve administering antibodies of the invention to an animal, preferably a mammal, and most preferably a human, patient for treating hematopoietic and hematologic diseases and disorders. Therapeutic compounds of the invention include, but are not limited to, antibodies of the invention (e.g., antibodies directed to the full length protein expressed on the cell surface of a mammalian cell; antibodies directed to an epitope of a polypeptide of the invention (such as, for example, a predicted linear epitope shown in Table 1B; or a conformational epitope, including fragments, analogs and derivatives thereof as described herein) and nucleic acids encoding antibodies of the invention (including fragments, analogs and derivatives thereof and anti-idiotypic antibodies as described herein). The antibodies of the invention can be used to detect, diagnose, prevent, treat, prognosticate, and/or ameliorate hematopoietic and hematologic diseases, disorders or conditions associated with aberrant expression and/or activity of a polypeptide of the invention. The treatment and/or prevention of hematopoietic and hematologic diseases, disorders or conditions associated with aberrant expression and/or activity of a polypeptide of the invention includes, but is not limited to, alleviating symptoms associated with those diseases, disorders or conditions. Antibodies of the invention may be provided in pharmaceutically acceptable compositions as known in the art or as described herein.

[0332] A summary of the ways in which the antibodies of the present invention may be used therapeutically includes binding polynucleotides or polypeptides of the present invention locally or systemically in the body or by direct cytotoxicity of the antibody, e.g. as mediated by complement (CDC) or by effector cells (ADCC). Some of these approaches are described in more detail below. Armed with the teachings provided herein, one of ordinary skill in the art will know how to use the antibodies of the present invention for diagnostic, monitoring or therapeutic purposes without undue experimentation.

[0333] The antibodies of this invention may be advantageously utilized in combination with other monoclonal or chimeric antibodies, or with lymphokines or hematopoietic growth factors (such as, e.g., IL-2, IL-3 and IL-7), for example, which serve to increase the number or activity of effector cells which interact with the antibodies.

[0334] The antibodies of the invention may be administered alone or in combination with other types of treatments (e.g., radiation therapy, chemotherapy, hormonal therapy, immunotherapy and anti-tumor agents). Generally, administration of products of a species origin or species reactivity (in the case of antibodies) that is the same species as that of the patient is preferred. Thus, in a preferred embodiment, human antibodies, fragments derivatives, analogs, or nucleic acids, are administered to a human patient for therapy or prophylaxis.

[0335] It is preferred to use high affinity and/or potent in vivo inhibiting and/or neutralizing antibodies against polypeptides or polynucleotides of the present invention, fragments or regions thereof, for both immunoassays directed to and therapy of hematopoietic and hematologic diseases or disorders related to polynucleotides or polypeptides, including fragments thereof, of the present invention. Such antibodies, fragments, or regions, will preferably have an affinity for polynucleotides or polypeptides of the invention, including fragments thereof. Preferred binding affinities include those with a dissociation constant or Kd less than 5×10⁻² M, 1×10⁻² M, 5×10⁻³ M, 10⁻³ M, 5×10⁻⁴ M, 10⁻⁴ M, 5×10⁻⁵ M, 10⁻⁵ M, 5×10⁻⁶ M, 10⁻⁶M, 5×10⁻⁷ M, 10⁻⁷ M, 5×10⁻⁸ M, 10⁻⁸ M, 5×10⁻⁹ M, 10⁻⁹ M, 5×10⁻¹⁰ M, 10⁻¹⁰ M, 5×10⁻¹¹ M, 10⁻¹¹ M, 5×10⁻¹² M, 10⁻¹² M, 5×10⁻¹³ M, 10⁻¹³ M, 5×10⁻¹⁴ M, 10⁻¹⁴ M, 5×10⁻¹⁵ M, and 10⁻⁵ M.

Gene Therapy

[0336] In a specific embodiment, nucleic acids comprising sequences encoding antibodies or functional derivatives thereof, are administered to treat, inhibit or prevent a hematopoietic and hematologic disease or disorder associated with aberrant expression and/or activity of a polypeptide of the invention, by way of gene therapy. Gene therapy refers to therapy performed by the administration to a subject of an expressed or expressible nucleic acid. In this embodiment of the invention, the nucleic acids produce their encoded protein that mediates a therapeutic effect.

[0337] Any of the methods for gene therapy available in the art can be used according to the present invention. Exemplary methods are described below.

[0338] For general reviews of the methods of gene therapy, see Goldspiel et al., Clinical Pharmacy 12:488-505 (1993); Wu and Wu, Biotherapy 3:87-95 (1991); Tolstoshev, Ann. Rev. Pharmacol. Toxicol. 32:573-596 (1993); Mulligan, Science 260:926-932 (1993); and Morgan and Anderson, Ann. Rev. Biochem. 62:191-217 (1993); May, TIBTECH 11(5):155-215 (1993). Methods commonly known in the art of recombinant DNA technology which can be used are described in Ausubel et al. (eds.), Current Protocols in Molecular Biology, John Wiley & Sons, NY (1993); and Kriegler, Gene Transfer and Expression, A Laboratory Manual, Stockton Press, NY (1990).

[0339] In a preferred embodiment, the compound comprises nucleic acid sequences encoding an antibody, said nucleic acid sequences being part of expression vectors that express the antibody or fragments or chimeric proteins or heavy or light chains thereof in a suitable host. In particular, such nucleic acid sequences have promoters operably linked to the antibody coding region, said promoter being inducible or constitutive, and, optionally, tissue-specific. In another particular embodiment, nucleic acid molecules are used in which the antibody coding sequences and any other desired sequences are flanked by regions that promote homologous recombination at a desired site in the genome, thus providing for intrachromosomal expression of the antibody encoding nucleic acids (Koller and Smithies, Proc. Natl. Acad. Sci. USA 86:8932-8935 (1989); Zijlstra et al., Nature 342:435-438 (1989). In specific embodiments, the expressed antibody molecule is a single chain antibody; alternatively, the nucleic acid sequences include sequences encoding both the heavy and light chains, or fragments thereof, of the antibody.

[0340] Delivery of the nucleic acids into a patient may be either direct, in which case the patient is directly exposed to the nucleic acid or nucleic acid-carrying vectors, or indirect, in which case, cells are first transformed with the nucleic acids in vitro, then transplanted into the patient. These two approaches are known, respectively, as in vivo or ex vivo gene therapy.

[0341] In a specific embodiment, the nucleic acid sequences are directly administered in vivo, where it is expressed to produce the encoded product. This can be accomplished by any of numerous methods known in the art, e.g., by constructing them as part of an appropriate nucleic acid expression vector and administering it so that they become intracellular, e.g., by infection using defective or attenuated retrovirals or other viral vectors (see U.S. Pat. No. 4,980,286), or by direct injection of naked DNA, or by use of microparticle bombardment (e.g., a gene gun; Biolistic, Dupont), or coating with lipids or cell-surface receptors or transfecting agents, encapsulation in liposomes, microparticles, or microcapsules, or by administering them in linkage to a peptide which is known to enter the nucleus, by administering it in linkage to a ligand subject to receptor-mediated endocytosis (see, e.g., Wu and Wu, J. Biol. Chem. 262:4429-4432 (1987)) (which can be used to target cell types specifically expressing the receptors), etc. In another embodiment, nucleic acid-ligand complexes can be formed in which the ligand comprises a fusogenic viral peptide to disrupt endosomes, allowing the nucleic acid to avoid lysosomal degradation. In yet another embodiment, the nucleic acid can be targeted in vivo for cell specific uptake and expression, by targeting a specific receptor (see, e.g., PCT Publications WO 92/06180; WO 92/22635; WO92/20316; WO93/14188, WO 93/20221). Alternatively, the nucleic acid can be introduced intracellularly and incorporated within host cell DNA for expression, by homologous recombination (Koller and Smithies, Proc. Natl. Acad. Sci. USA 86:8932-8935 (1989); Zijlstra et al., Nature 342:435-438 (1989)).

[0342] In a specific embodiment, viral vectors that contain nucleic acid sequences encoding an antibody of the invention are used. For example, a retroviral vector can be used (see Miller et al., Meth. Enzymol. 217:581-599 (1993)). These retroviral vectors contain the components necessary for the correct packaging of the viral genome and integration into the host cell DNA. The nucleic acid sequences encoding the antibody to be used in gene therapy are cloned into one or more vectors, which facilitates delivery of tihe gene into a patient. More detail about retroviral vectors can be found in Boesen et al., Biotherapy 6:291-302 (1994), which describes the use of a retroviral vector to deliver the mdr1 gene to hematopoietic stem cells in order to make the stem cells more resistant to chemotherapy. Other references illustrating the use of retroviral vectors in gene therapy are: Clowes et al., J. Clin. Invest. 93:644-651 (1994); Kiem et al., Blood 83:1467-1473 (1994); Salmons and Gunzberg, Human Gene Therapy 4:129-141 (1993); and Grossman and Wilson, Curr. Opin. in Genetics and Devel. 3:110-114 (1993).

[0343] Adenoviruses are other viral vectors that can be used in gene therapy. Adenoviruses are especially attractive vehicles for delivering genes to respiratory epithelia. Adenoviruses naturally infect respiratory epithelia where they cause a mild disease. Other targets for adenovirus-based delivery systems are liver, the central nervous system, endothelial cells, and muscle. Adenoviruses have the advantage of being capable of infecting non-dividing cells. Kozarsky and Wilson, Current Opinion in Genetics and Development 3:499-503 (1993) present a review of adenovirus-based gene therapy. Bout et al., Human Gene Therapy 5:3-10 (1994) demonstrated the use of adenovirus vectors to transfer genes to the respiratory epithelia of rhesus monkeys. Other instances of the use of adenoviruses in gene therapy can be found in Rosenfeld et al., Science 252:431-434 (1991); Rosenfeld et al., Cell 68:143-155 (1992); Mastrangeli et al., J. Clin. Invest 91:225-234 (1993); PCT Publication WO94/12649; and Wang, et al., Gene Therapy 2:775-783 (1995). In a preferred embodiment, adenovirus vectors are used.

[0344] Adeno-associated virus (AAV) has also been proposed for use in gene therapy (Walsh et al., Proc. Soc. Exp. Biol. Med. 204:289-300 (1993); U.S. Pat. No. 5,436,146).

[0345] Another approach to gene therapy involves transferring a gene to cells in tissue culture by such methods as electroporation, lipofection, calcium phosphate mediated transfection, or viral infection. Usually, the method of transfer includes the transfer of a selectable marker to the cells. The cells are then placed under selection to isolate those cells that have taken up and are expressing the transferred gene. Those cells are then delivered to a patient.

[0346] In this embodiment, the nucleic acid is introduced into a cell prior to administration in vivo of the resulting recombinant cell. Such introduction can be carried out by any method known in the art, including but not limited to transfection, electroporation, microinjection, infection with a viral or bacteriophage vector containing the nucleic acid sequences, cell fusion, chromosome-mediated gene transfer, microcell-mediated gene transfer, spheroplast fusion, etc. Numerous techniques are known in the art for the introduction of foreign genes into cells (see, e.g., Loeffler and Behr, Meth. Enzymol. 217:599-618 (1993); Cohen et al., Meth. Enzymol. 217:618-644 (1993); Cline, Pharmac. Ther. 29:69-92m (1985) and may be used in accordance with the present invention, provided that the necessary developmental and physiological functions of the recipient cells are not disrupted. The technique should provide for the stable transfer of the nucleic acid to the cell, so that the nucleic acid is expressible by the cell and preferably heritable and expressible by its cell progeny.

[0347] The resulting recombinant cells can be delivered to a patient by various methods known in the art. Recombinant blood cells (e.g., hematopoietic stem or progenitor cells) are preferably administered intravenously. The amount of cells envisioned for use depends on the desired effect, patient state, etc., and can be determined by one skilled in the art.

[0348] Cells into which a nucleic acid can be introduced for purposes of gene therapy encompass any desired, available cell type, and include but are not limited to epithelial cells, endothelial cells, keratinocytes, fibroblasts, muscle cells, hepatocytes; blood cells such as T lymphocytes, B lymphocytes, monocytes, macrophages, neutrophils, eosinophils, megakaryocytes, granulocytes; various stem or progenitor cells, in particular hematopoietic stem or progenitor cells, e.g., as obtained from bone marrow, umbilical cord blood, peripheral blood, fetal liver, etc.

[0349] In a preferred embodiment, the cell used for gene therapy is autologous to the patient.

[0350] In an embodiment in which recombinant cells are used in gene therapy, nucleic acid sequences encoding an antibody are introduced into the cells such that they are expressible by the cells or their progeny, and the recombinant cells are then administered in vivo for therapeutic effect. In a specific embodiment, stem or progenitor cells are used. Any stem and/or progenitor cells which can be isolated and maintained in vitro can potentially be used in accordance with this embodiment of the present invention (see e.g. PCT Publication WO 94/08598; Stemple and Anderson, Cell 71:973-985 (1992); Rheinwald, Meth. Cell Bio. 21A:229 (1980); and Pittelkow and Scott, Mayo Clinic Proc. 61:771 (1986)).

[0351] In a specific embodiment, the nucleic acid to be introduced for purposes of gene therapy comprises an inducible promoter operably linked to the coding region, such that expression of the nucleic acid is controllable by the presence or absence of an appropriate inducer of transcription.

Demonstration of Therapeutic or Prophylactic Activity

[0352] The compounds or pharmaceutical compositions of the invention are preferably tested in vitro, and then in vivo for the desired therapeutic or prophylactic activity, prior to use in humans. For example, in vitro assays to demonstrate the therapeutic or prophylactic utility of a compound or pharmaceutical composition include, the effect of a compound on a cell line or a patient tissue sample. The effect of the compound or composition on the cell line and/or tissue sample can be determined utilizing techniques known to those of skill in the art including, but not limited to, rosette formation assays and cell lysis assays. In accordance with the invention, in vitro assays which can be used to determine whether administration of a specific compound is indicated, include in vitro cell culture assays in which a patient tissue sample is grown in culture, and exposed to or otherwise administered a compound, and the effect of such compound upon the tissue sample is observed.

Therapeutic/Prophylactic Administration and Composition

[0353] The invention provides methods of treatment, inhibition and prophylaxis by administration to a subject of an effective amount of a compound or pharmaceutical composition of the invention, preferably a polypeptide or antibody of the invention. In a preferred embodiment, the compound is substantially purified (e.g., substantially free from substances that limit its effect or produce undesired side-effects). The subject is preferably an animal, including but not limited to animals such as cows, pigs, horses, chickens, cats, dogs, etc., and is preferably a mammal, and most preferably human.

[0354] Formulations and methods of administration that can be employed when the compound comprises a nucleic acid or an immunoglobulin are described above; additional appropriate formulations and routes of administration can be selected from among those described herein below.

[0355] Various delivery systems are known and can be used to administer a compound of the invention, e.g., encapsulation in liposomes, microparticles, microcapsules, recombinant cells capable of expressing the compound, receptor-mediated endocytosis (see, e.g., Wu and Wu, J. Biol. Chem. 262:4429-4432 (1987)), construction of a nucleic acid as part of a retroviral or other vector, etc. Methods of introduction include but are not limited to intradermal, intramuscular, intraperitoneal, intravenous, subcutaneous, intranasal, epidural, and oral routes. The compounds or compositions may be administered by any convenient route, for example by infusion or bolus injection, by absorption through epithelial or mucocutaneous linings (e.g., oral mucosa, rectal and intestinal mucosa, etc.) and may be administered together with other biologically active agents. Administration can be systemic or local. In addition, it may be desirable to introduce the pharmaceutical compounds or compositions of the invention into the central nervous system by any suitable route, including intraventricular and intrathecal injection; intraventricular injection may be facilitated by an intraventricular catheter, for example, attached to a reservoir, such as an Ommaya reservoir. Pulmonary administration can also be employed, e.g., by use of an inhaler or nebulizer, and formulation with an aerosolizing agent.

[0356] In a specific embodiment, it may be desirable to administer the pharmaceutical compounds or compositions of the invention locally to the area in need of treatment; this may be achieved by, for example, and not by way of limitation, local infusion during surgery, topical application, e.g., in conjunction with a wound dressing after surgery, by injection, by means of a catheter, by means of a suppository, or by means of an implant, said implant being of a porous, non-porous, or gelatinous material, including membranes, such as sialastic membranes, or fibers. Preferably, when administering a protein, including an antibody, of the invention, care must be taken to use materials to which the protein does not absorb.

[0357] In another embodiment, the compound or composition can be delivered in a vesicle, in particular a liposome (see Langer, Science 249:1527-1533 (1990); Treat et al., in Liposomes in the Therapy of Infectious Disease and Cancer, Lopez-Berestein and Fidler (eds.), Liss, New York, pp. 353-365 (1989); Lopez-Berestein, ibid., pp. 317-327; see generally ibid.)

[0358] In yet another embodiment, the compound or composition can be delivered in a controlled release system. In one embodiment, a pump may be used (see Langer, supra; Sefton, CRC Crit Ref. Biomed. Eng. 14:201 (1987); Buchwald et al., Surgery 88:507 (1980); Saudek et al., N. Engl. J. Med. 321:574 (1989)). In another embodiment, polymeric materials can be used (see Medical Applications of Controlled Release, Langer and Wise (eds.), CRC Pres., Boca Raton, Fla. (1974); Controlled Drug Bioavailability, Drug Product Design and Performance, Smolen and Ball (eds.), Wiley, New York (1984); Ranger and Peppas, J., Macromol. Sci. Rev. Macromol. Chem. 23:61 (1983); see also Levy et al., Science 228:190 (1985); During et al., Ann. Neurol. 25:351 (1989); Howard et al., J. Neurosurg. 71:105 (1989)). In yet another embodiment, a controlled release system can be placed in proximity of the therapeutic target, e.g., the brain, thus requiring only a fraction of the systemic dose (see, e.g., Goodson, in Medical Applications of Controlled Release, supra, vol. 2, pp. 115-138 (1984)).

[0359] Other controlled release systems are discussed in the review by Langer (Science 249:1527-1533 (1990)).

[0360] In a specific embodiment where the compound of the invention is a nucleic acid encoding a protein, the nucleic acid can be administered in vivo to promote expression of its encoded protein, by constructing it as part of an appropriate nucleic acid expression vector and administering it so that it becomes intracellular, e.g., by use of a retroviral vector (see U.S. Pat. No. 4,980,286), or by direct injection, or by use of microparticle bombardment (e.g., a gene gun; Biolistic, Dupont), or coating with lipids or cell-surface receptors or transfecting agents, or by administering it in linkage to a homeobox-like peptide which is known to enter the nucleus (see e.g., Joliot et al., Proc. Natl. Acad. Sci. USA 88:1864-1868 (1991)), etc. Alternatively, a nucleic acid can be introduced intracellularly and incorporated within host cell DNA for expression, by homologous recombination.

[0361] The present invention also provides pharmaceutical compositions. Such compositions comprise a therapeutically effective amount of a compound, and a pharmaceutically acceptable carrier. In a specific embodiment, the term “pharmaceutically acceptable” means approved by a regulatory agency of the Federal or a state government or listed in the U.S. Pharmacopeia or other generally recognized pharmacopeia for use in animals, and mor particularly in humans. The term “carrier” refers to a diluent, adjuvant, excipient, or vehicle with which the therapeutic is administered. Such pharmaceutical carriers can be sterile liquids, such as water and oils, including those of petroleum, animal, vegetable or synthetic origin, such as peanut oil, soybean oil, mineral oil, sesame oil and the like. Water is a preferred carrier when the pharmaceutical composition is administered intravenously. Saline solutions and aqueous dextrose and glycerol solutions can also be employed as liquid carriers, particularly for injectable solutions. Suitable pharmaceutical excipients include starch, glucose, lactose, sucrose, gelatin, malt, rice, flour, chalk, silica gel, sodium stearate, glycerol monostearate, talc, sodium chloride, dried skim milk, glycerol, propylene, glycol, water, ethanol and the like. The composition, if desired, can also contain minor amounts of wetting or emulsifying agents, or pH buffering agents. These compositions can take the form of solutions, suspensions, emulsion, tablets, pills, capsules, powders, sustained-release formulations and the like. The composition can be formulated as a suppository, with traditional binders and carriers such as triglycerides. Oral formulation can include standard carriers such as pharmaceutical grades of mannitol, lactose, starch, magnesium stearate, sodium saccharine, cellulose, magnesium carbonate, etc. Examples of suitable pharmaceutical carriers are described in “Remington's Pharmaceutical Sciences” by E. W. Martin. Such compositions will contain a therapeutically effective amount of the compound, preferably in purified form, together with a suitable amount of carrier so as to provide the form for proper administration to the patient. The formulation should suit the mode of administration.

[0362] In a preferred embodiment, the composition is formulated in accordance with routine procedures as a pharmaceutical composition adapted for intravenous administration to human beings. Typically, compositions for intravenous administration are solutions in sterile isotonic aqueous buffer. Where necessary, the composition may also include a solubilizing agent and a local anesthetic such as lignocaine to ease pain at the site of the injection. Generally, the ingredients are supplied either separately or mixed together in unit dosage form, for example, as a dry lyophilized powder or water free concentrate in a hermetically sealed container such as an ampoule or sachette indicating the quantity of active agent. Where the composition is to be administered by infusion, it can be dispensed with an infusion bottle containing sterile pharmaceutical grade water or saline. Where the composition is administered by injection, an ampoule of sterile water for injection or saline can be provided so that the ingredients may be mixed prior to administration.

[0363] The compounds of the invention can be formulated as neutral or salt forms. Pharmaceutically acceptable salts include those formed with anions such as those derived from hydrochloric, phosphoric, acetic, oxalic, tartaric acids, etc., and those formed with cations such as those derived from sodium, potassium, ammonium, calcium, ferric hydroxides, isopropylamine, triethylamine, 2-ethylamino ethanol, histidine, procaine, etc.

[0364] The amount of the compound of the invention which will be effective in the treatment, inhibition and prevention of a disease or disorder associated with aberrant expression and/or activity of a polypeptide of the invention can be determined by standard clinical techniques. In addition, in vitro assays may optionally be employed to help identify optimal dosage ranges. The precise dose to be employed in the formulation will also depend on the route of administration, and the seriousness of the disease or disorder, and should be decided according to the judgment of the practitioner and each patient's circumstances. Effective doses may be extrapolated from dose-response curves derived from in vitro or animal model test systems.

[0365] For antibodies, the dosage administered to a patient is typically 0.1 mg/kg to 100 mg/kg of the patient's body weight. Preferably, the dosage administered to a patient is between 0.1 mg/kg and 20 mg/kg of the patient's body weight, more preferably 1 mg/kg to 10 mg/kg of the patient's body weight. Generally, human antibodies have a longer half-life within the human body than antibodies from other species due to the immune response to the foreign polypeptides. Thus, lower dosages of human antibodies and less frequent administration is often possible. Further, the dosage and frequency of administration of antibodies of the invention may be reduced by enhancing uptake and tissue penetration (e.g., into the brain) of the antibodies by modifications such as, for example, lipidation.

[0366] The invention also provides a pharmaceutical pack or kit comprising one or more containers filled with one or more of the ingredients of the pharmaceutical compositions of the invention. Optionally associated with such container(s) can be a notice in the form prescribed by a governmental agency regulating the manufacture, use or sale of pharmaceuticals or biological products, which notice reflects approval by the agency of manufacture, use or sale for human administration.

Diagnosis and Imaging

[0367] Labeled antibodies, and derivatives and analogs thereof, which specifically bind to a polypeptide of interest can be used for diagnostic purposes to detect, diagnose, prognosticate, or monitor hematopoietic and hematologic diseases, disorders, and/or conditions associated with the aberrant expression and/or activity of a polypeptide of the invention. The invention provides for the detection of aberrant expression of a polypeptide of interest, comprising (a) assaying the expression of the polypeptide of interest in cells or body fluid of an individual using one or more antibodies specific to the polypeptide interest and (b) comparing the level of gene expression with a standard gene expression level, whereby an increase or decrease in the assayed polypeptide gene expression level compared to the standard expression level is indicative of aberrant expression.

[0368] The invention provides a diagnostic assay for diagnosing a hematopoietic and hematologic disease or disorder, comprising (a) assaying the expression of the polypeptide of interest in cells or body fluid of an individual using one or more antibodies specific to the polypeptide interest and (b) comparing the level of gene expression with a standard gene expression level, whereby an increase or decrease in the assayed polypeptide gene expression level compared to the standard expression level is indicative of a particular hematopoietic and hematologic disease or disorder. With respect to hematopoietic cancers, the presence of a relatively high amount of transcript in biopsied tissue from an individual may indicate a predisposition for the development of the disease, or may provide a means for detecting the disease prior to the appearance of actual clinical symptoms. A more definitive diagnosis of this type may allow health professionals to employ preventative measures or aggressive treatment earlier thereby preventing the development or further progression of the hematopoietic cancer.

[0369] Antibodies of the invention can be used to assay protein levels in a biological sample using classical immunohistological methods known to those of skill in the art (e.g., see Jalkanen et al., J. Cell. Biol. 101:976-985 (1985); Jalkanen et al., J. Cell. Biol. 105:3087-3096 (1987)). Other antibody-based methods useful for detecting protein gene expression include immunoassays, such as the enzyme linked immunosorbent assay (ELISA) and the radioimmunoassay (RIA). Suitable antibody assay labels are known in the art and include enzyme labels, such as, glucose oxidase; radioisotopes, such as iodine (125I, 121I), carbon (14C), sulfur (35S), tritium (3H), indium (112In), and technetium (99Tc); luminescent labels, such as luminol; and fluorescent labels, such as fluorescein and rhodamine, and biotin.

[0370] One facet of the invention is the detection and diagnosis of a disease or disorder associated with aberrant expression of a polypeptide of interest in an animal, preferably a mammal and most preferably a human. In one embodiment, diagnosis comprises: a) administering (for example, parenterally, subcutaneously, or intraperitoneally) to a subject an effective amount of a labeled molecule which specifically binds to the polypeptide of interest; b) waiting for a time interval following the administering for permitting the labeled molecule to preferentially concentrate at sites in the subject where the polypeptide is expressed (and for unbound labeled molecule to be cleared to background level); c) determining background level; and d) detecting the labeled molecule in the subject, such that detection of labeled molecule above the background level indicates that the subject has a particular disease or disorder associated with aberrant expression of the polypeptide of interest. Background level can be determined by various methods including, comparing the amount of labeled molecule detected to a standard value previously determined for a particular system.

[0371] It will be understood in the art that the size of the subject and the imaging system used will determine the quantity of imaging moiety needed to produce diagnostic images. In the case of a radioisotope moiety, for a human subject, the quantity of radioactivity injected will normally range from about 5 to 20 milicuries of 99mTc. The labeled antibody or antibody fragment will then preferentially accumulate at the location of cells which contain the specific protein. In vivo tumor imaging is described in S. W. Burchiel et al., “Immunopharmacokinetics of Radiolabeled Antibodies and Their Fragments.” (Chapter 13 in Tumor Imaging: The Radiochemical Detection of Cancer, S. W. Burchiel and B. A. Rhodes, eds., Masson Publishing Inc. (1982)).

[0372] Depending on several variables, including the type of label used and the mode of administration, the time interval following the administration for permitting the labeled molecule to preferentially concentrate at sites in the subject and for unbound labeled molecule to be cleared to background level is 6 to 48 hours or 6 to 24 hours or 6 to 12 hours. In another embodiment the time interval following administration is 5 to 20 days or 5 to 10 days.

[0373] In an embodiment, monitoring of the disease or disorder is carried out by repeating the method for diagnosing the disease or disease, for example, one month after initial diagnosis, six months after initial diagnosis, one year after initial diagnosis, etc.

[0374] Presence of the labeled molecule can be detected in the patient using methods known in the art for in vivo scanning. These methods depend upon the type of label used. Skilled artisans will be able to determine the appropriate method for detecting a particular label. Methods and devices that may be used in the diagnostic methods of the invention include, but are not limited to, computed tomography (CT), whole body scan such as position emission tomography (PET), magnetic resonance imaging (MRI), and sonography.

[0375] In a specific embodiment, the molecule is labeled with a radioisotope and is detected in the patient using a radiation responsive surgical instrument (Thurston et al., U.S. Pat. No. 5,441,050). In another embodiment, the molecule is labeled with a fluorescent compound and is detected in the patient using a fluorescence responsive scanning instrument. In another embodiment, the molecule is labeled with a positron emitting metal and is detected in the patent using positron emission-tomography. In yet another embodiment, the molecule is labeled with a paramagnetic label and is detected in a patient using magnetic resonance imaging (MRI).

Kits

[0376] The present invention provides kits that can be used in the above methods. In one embodiment, a kit comprises an antibody of the invention, preferably a purified antibody, in one or more containers. In a specific embodiment, the kits of the present invention contain a substantially isolated polypeptide comprising an epitope which is specifically immunoreactive with an antibody included in the kit. Preferably, the kits of the present invention further comprise a control antibody which does not react with the polypeptide of interest. In another specific embodiment, the kits of the present invention contain a means for detecting the binding of an antibody to a polypeptide of interest (e.g., the antibody may be conjugated to a detectable substrate such as a fluorescent compound, an enzymatic substrate, a radioactive compound or a luminescent compound, or a second antibody which recognizes the first antibody may be conjugated to a detectable substrate).

[0377] In another specific embodiment of the present invention, the kit is a diagnostic kit for use in screening serum containing antibodies specific against proliferative and/or cancerous polynucleotides and polypeptides. Such a kit may include a control antibody that does not react with the polypeptide of interest. Such a kit may include a substantially isolated polypeptide antigen comprising an epitope which is specifically immunoreactive with at least one anti-polypeptide antigen antibody. Further, such a kit includes means for detecting the binding of said antibody to the antigen (e.g., the antibody may be conjugated to a fluorescent compound such as fluorescein or rhodamine which can be detected by flow cytometry). In specific embodiments, the kit may include a recombinantly produced or chemically synthesized polypeptide antigen. The polypeptide antigen of the kit may also be attached to a solid support.

[0378] In a more specific embodiment the detecting means of the above-described kit includes a solid support to which said polypeptide antigen is attached. Such a kit may also include a non-attached reporter-labeled anti-human antibody. In this embodiment, binding of the antibody to the polypeptide antigen can be detected by binding of the said reporter-labeled antibody.

[0379] In an additional embodiment, the invention includes a diagnostic kit for use in screening serum containing antigens of the polypeptide of the invention. The diagnostic kit includes a substantially isolated antibody specifically immunoreactive with polypeptide or polynucleotide antigens, and means for detecting the binding of the polynucleotide or polypeptide antigen to the antibody. In one embodiment, the antibody is attached to a solid support. In a specific embodiment, the antibody may be a monoclonal antibody. The detecting means of the kit may include a second, labeled monoclonal antibody. Alternatively, or in addition, the detecting means may include a labeled, competing antigen.

[0380] In one diagnostic configuration, test serum is reacted with a solid phase reagent having a surface-bound antigen obtained by the methods of the present invention. After binding with specific antigen antibody to the reagent and removing unbound serum components by washing, the reagent is reacted with reporter-labeled anti-human antibody to bind reporter to the reagent in proportion to the amount of bound anti-antigen antibody on the solid support. The reagent is again washed to remove unbound labeled antibody, and the amount of reporter associated with the reagent is determined. Typically, the reporter is an enzyme which is detected by incubating the solid phase in the presence of a suitable fluorometric, luminescent or colorimetric substrate (Sigma, St. Louis, Mo.).

[0381] The solid surface reagent in the above assay is prepared by known techniques for attaching protein material to solid support material, such as polymeric beads, dip sticks, 96-well plate or filter material. These attachment methods generally include non-specific adsorption of the protein to the support or covalent attachment of the protein, typically through a free amine group, to a chemically reactive group on the solid support, such as an activated carboxyl, hydroxyl, or aldehyde group. Alternatively, streptavidin coated plates can be used in conjunction with biotinylated antigen(s).

[0382] Thus, the invention provides an assay system or kit for carrying out this diagnostic method. The kit generally includes a support with surface-bound recombinant antigens, and a reporter-labeled anti-human antibody for detecting surface-bound anti-antigen antibody.

Uses of the Polynucleotides

[0383] Each of the polynucleotides identified herein can be used in numerous ways as reagents. The following description should be considered exemplary and utilizes known techniques.

[0384] The polynucleotides of the present invention are useful for chromosome identification. There exists an ongoing need to identify new chromosome markers, since few chromosome marking reagents, based on actual sequence data (repeat polymorphisms), are presently available. Each sequence is specifically targeted to and can hybridize with a particular location on an individual human chromosome, thus each polynucleotide of the present invention can routinely be used as a chromosome marker using techniques known in the art. Table 1B. 1, column 8 provides the chromosome location of some of the polynucleotides of the invention.

[0385] Briefly, sequences can be mapped to chromosomes by preparing PCR primers (preferably at least 15 bp (e.g., 15-25 bp) from the sequences shown in SEQ ID NO:X. Primers can optionally be selected using computer analysis so that primers do not span more than one predicted exon in the genomic DNA. These primers are then used for PCR screening of somatic cell hybrids containing individual human chromosomes. Only those hybrids containing the human gene corresponding to SEQ ID NO:X will yield an amplified fragment.

[0386] Similarly, somatic hybrids provide a rapid method of PCR mapping the polynucleotides to particular chromosomes. Three or more clones can be assigned per day using a single thermal cycler. Moreover, sublocalization of the polynucleotides can be achieved with panels of specific chromosome fragments. Other gene mapping strategies that can be used include in situ hybridization, prescreening with labeled flow-sorted chromosomes, preselection by hybridization to construct chromosome specific-cDNA libraries, and computer mapping techniques (See, e.g., Shuler, Trends Biotechnol 16:456-459 (1998) which is hereby incorporated by reference in its entirety).

[0387] Precise chromosomal location of the polynucleotides can also be achieved using fluorescence in situ hybridization (FISH) of a metaphase chromosomal spread. This technique uses polynucleotides as short as 500 or 600 bases; however, polynucleotides 2,000 bp are preferred. For a review of this technique, see Verma et al., “Human Chromosomes: a Manual of Basic Techniques,” Pergamon Press, New York (1988).

[0388] For chromosome mapping, the polynucleotides can be used individually (to mark a: single chromosome or a single site on that chromosome) or in panels (for marking multiple sites and/or multiple chromosomes).

[0389] Thus, the present invention also provides a method for chromosomal localization which involves (a) preparing PCR primers from the polynucleotide sequences in Table 1B and/or Table 2 and SEQ ID NO:X and (b) screening somatic cell hybrids containing individual chromosomes.

[0390] The polynucleotides of the present invention would likewise be useful for radiation hybrid mapping, HAPPY mapping, and long range restriction mapping. For a review of these techniques and others known in the art, see, e.g. Dear, “Genome Mapping: A Practical Approach,” IRL Press at Oxford University Press, London (1997); Aydin, J. Mol. Med. 77:691-694 (1999); Hacia et al., Mol. Psychiatry 3:483-492 (1998); Herrick et al., Chromosome Res. 7:409-423 (1999); Hamilton et al., Methods Cell Biol. 62:265-280 (2000); and/or Ott, J. Hered. 90:68-70 (1999) each of which is hereby incorporated by reference in its entirety.

[0391] Once a polynucleotide has been mapped to a precise chromosomal location, the physical position of the polynucleotide can be used in linkage analysis. Linkage analysis establishes coinheritance between a chromosomal location and presentation of a particular disease. (Disease mapping data are found, for example, in V. McKusick, Mendelian Inheritance in Man (available on line through Johns Hopkins University Welch Medical Library)). Column 9 of Table 1B.1 provides an OMIM reference identification number of diseases associated with the cytologic band disclosed in column 8 of Table 1B.1, as determined using techniques described herein and by reference to Table 5. Assuming 1 megabase mapping resolution and one gene per 20 kb, a cDNA precisely localized to a chromosomal region associated with the disease could be one of 50-500 potential causative genes.

[0392] Thus, once coinheritance is established, differences in a polynucleotide of the invention and the corresponding gene between affected and unaffected individuals can be examined. First, visible structural alterations in the chromosomes, such as deletions or translocations, are examined in chromosome spreads or by PCR. If no structural alterations exist, the presence of point mutations are ascertained. Mutations observed in some or all affected individuals, but not in normal individuals, indicates that the mutation may cause the disease. However, complete sequencing of the polypeptide and the corresponding gene from several normal individuals is required to distinguish the mutation from a polymorphism. If a new polymorphism is identified, this polymorphic polypeptide can be used for further linkage analysis.

[0393] Furthermore, increased or decreased expression of the gene in affected individuals as compared to unaffected individuals can be assessed using the polynucleotides of the invention. Any of these alterations (altered expression, chromosomal rearrangement, or mutation) can be used as a diagnostic or prognostic marker. Diagnostic and prognostic methods, kits and reagents encompassed by the present invention are briefly described below and more thoroughly elsewhere herein (see e.g., the sections labeled “Antibodies”, “Diagnostic Assays”, and “Methods for Detecting Diseases”).

[0394] Thus, the invention also provides a diagnostic method useful during diagnosis of a disorder, involving measuring the expression level of polynucleotides of the present invention in cells or body fluid from an individual and comparing the measured gene expression level with a standard level of polynucleotide expression level, whereby an increase or decrease in the gene expression level compared to the standard is indicative of a disorder. Additional non-limiting examples of diagnostic methods encompassed by the present invention are more thoroughly described elsewhere herein (see, e.g., Example 12).

[0395] In still another embodiment, the invention includes a kit for analyzing samples for the presence of proliferative and/or cancerous polynucleotides derived from a test subject. In a general embodiment, the kit includes at least one polynucleotide probe containing a nucleotide sequence that will specifically hybridize with a polynucleotide of the invention and a suitable container. In a specific embodiment, the kit includes two polynucleotide probes defining an internal region of the polynucleotide of the invention, where each probe has one strand containing a 31′mer-end internal to the region. In a further embodiment, the probes may be useful as primers for polymerase chain reaction amplification.

[0396] Where a diagnosis of a related disorder, including, for example, diagnosis of a tumor, has already been made according to conventional methods, the present invention is useful as a prognostic indicator, whereby patients exhibiting enhanced or depressed polynucleotide of the invention expression will experience a worse clinical outcome relative to patients expressing the gene at a level nearer the standard level.

[0397] By “measuring the expression level of polynucleotides of the invention” is intended qualitatively or quantitatively measuring or estimating the level of the polypeptide of the invention or the level of the mRNA encoding the polypeptide of the invention in a first biological sample either directly (e.g., by determining or estimating absolute protein level or mRNA level) or relatively (e.g., by comparing to the polypeptide level or mRNA level in a second biological sample). Preferably, the polypeptide level or mRNA level in the first biological sample is measured or estimated and compared to a standard polypeptide level or mRNA level, the standard being taken from a second biological sample obtained from an individual not having the related disorder or being determined by averaging levels from a population of individuals not having a related disorder. As will be appreciated in the art, once a standard polypeptide level or mRNA level is known, it can be used repeatedly as a standard for comparison.

[0398] By “biological sample” is intended any biological sample obtained from an individual, body fluid, cell line, tissue culture, or other source which contains polypeptide of the present invention or the corresponding mRNA. As indicated, biological samples include body fluids (such as semen, lymph, vaginal pool, sera, plasma, urine, synovial fluid and spinal fluid) which contain the polypeptide of the present invention, and tissue sources found to express the polypeptide of the present invention. Methods for obtaining tissue biopsies and body fluids from mammals are well known in the art. Where the biological sample is to include mRNA, a tissue biopsy is the preferred source.

[0399] The method(s) provided above may preferably be applied in a diagnostic method and/or kits in which polynucleotides and/or polypeptides of the invention are attached to a solid support. In one exemplary method, the support may be a “gene chip” or a “biological chip” as described in U.S. Pat. Nos. 5,837,832, 5,874,219, and 5,856,174. Further, such a gene chip with polynucleotides of the invention attached may be used to identify polymorphisms between the isolated polynucleotide sequences of the invention, with polynucleotides isolated from a test subject. The knowledge of such polymorphisms (i.e. their location, as well as, their existence) would be beneficial in identifying disease loci for many disorders, such as for example, in neural disorders, immune system disorders, muscular disorders, reproductive disorders, gastrointestinal disorders, pulmonary disorders, digestive disorders, metabolic disorders, cardiovascular disorders, renal disorders, proliferative disorders, and/or cancerous diseases and conditions. Such a method is described in U.S. Pat. Nos. 5,858,659 and 5,856,104. The U.S. Patents referenced supra are hereby incorporated by reference in their entirety herein.

[0400] The present invention encompasses polynucleotides of the present invention that are chemically synthesized, or reproduced as peptide nucleic acids (PNA), or according to other methods known in the art. The use of PNAs would serve as the preferred form if the polynucleotides of the invention are incorporated onto a solid support, or gene chip. For the purposes of the present invention, a peptide nucleic acid (PNA) is a polyamide type of DNA analog and the monomeric units for adenine, guanine, thymine and cytosine are available commercially (Perceptive Biosystems). Certain components of DNA, such as phosphorus, phosphorus oxides, or deoxyribose derivatives, are not present in PNAs. As disclosed by Nielsen et al., Science 254, 1497 (1991); and Egholm et al., Nature 365, 666 (1993), PNAs bind specifically and tightly to complementary DNA strands and are not degraded by nucleases. In fact, PNA binds more strongly to DNA than DNA itself does. This is probably because there is no electrostatic repulsion between the two strands, and also the polyamide backbone is more flexible. Because of this, PNA/DNA duplexes bind under a wider range of stringency conditions than DNA/DNA duplexes, making it easier to perform multiplex hybridization. Smaller probes can be used than with DNA due to the strong binding. In addition, it is more likely that single base mismatches can be determined with PNA/DNA hybridization because a single mismatch in a PNA/DNA 15-mer lowers the melting point (T.sub.m) by 8°-20° C., vs. 4°-16° C. for the DNA/DNA 15-mer duplex. Also, the absence of charge groups in PNA means that hybridization can be done at low ionic strengths and reduce possible interference by salt during the analysis.

[0401] The compounds of the present invention have uses which include, but are not limited to, detecting cancer in mammals. In particular the invention is useful during diagnosis of pathological cell proliferative neoplasias which include, but are not limited to: acute myelogenous leukemias including acute monocytic leukemia, acute myeloblastic leukemia, acute promyelocytic leukemia, acute myelomonocytic leukemia, acute erythroleukemia, acute megakaryocytic leukemia, and acute undifferentiated leukemia, etc.; and chronic myelogenous leukemias including chronic myelomonocytic leukemia, chronic granulocytic leukemia, etc. Preferred mammals include monkeys, apes, cats, dogs, cows, pigs, horses, rabbits and humans. Particularly preferred are humans.

[0402] Pathological cell proliferative disorders are often associated with inappropriate activation of proto-oncogeres. (Gelma n, E. P. et al., “The Etiology of Acute Leukemia: Molecular Genetics and Viral Oncology,” in Neoplastic Diseases of the Blood, Vol 1., Wiernik, P. H. et al. eds., 161-182 (1985)). Neoplasias are now believed to result from the qualitative alteration of a normal cellular gene product, or from the quantitative modification of gene expression by insertion into the chromosome of a viral sequence, by chromosomal translocation of a gene to a more actively transcribed region, or by some other mechanism. (Gelmann et al., supra) It is likely that mutated or altered expression of specific genes is involved in the pathogenesis of some leukemias, among other tissues and cell types. (Gelmann et al., supra) Indeed, the human counterparts of the oncogenes involved in some animal neoplasias have been amplified or translocated in some cases of human leukemia and carcinoma. (Gelmann et al., supra)

[0403] For example, c-myc expression is highly amplified in the non-lymphocytic leukemia cell line HL-60. When HL-60 cells are chemically induced to stop proliferation, the level of c-myc is found to be downregulated. (International Publication Number WO 91/15580). However, it has been shown that exposure of HL-60 cells to a DNA construct that is complementary to the 5′ end of c-myc or c-myb blocks translation of the corresponding mRNAs which down-regulates expression of the c-myc or c-myb proteins and causes arrest of cell proliferation and differentiation of the treated cells. (International Publication Number WO 91/15580; Wickstrom et al., Proc. Natl. Acad. Sci. 85:1028 (1988); Anfossi et al., Proc. Natl. Acad. Sci. 86:3379 (1989)). However, the skilled artisan would appreciate the present invention's usefulness is not be limited to treatment, prevention, and/or prognosis of proliferative disorders of cells and tissues of hematopoietic origin, in light of the numerous cells and cell types of varying origins which are known to exhibit proliferative phenotypes.

[0404] In addition to the foregoing, a polynucleotide of the present invention can be used to control gene expression through triple helix formation or through antisense DNA or RNA. Antisense techniques are discussed, for example, in Okano, J. Neurochem. 56: 560 (1991); “Oligodeoxynucleotides as Antisense Inhibitors of Gene Expression, CRC Press, Boca Raton, Fla. (1988). Triple helix formation is discussed in, for instance Lee et al., Nucleic Acids Research 6: 3073 (1979); Cooney et al., Science 241: 456 (1988); and Dervan et al., Science 251: 1360 (1991). Both methods rely on binding of the polynucleotide to a complementary DNA or RNA For these techniques, preferred polynucleotides are usually oligonucleotides 20 to 40 bases in length and complementary to either the region of the gene involved in transcription (triple helix—see Lee et al., Nucl. Acids Res. 6:3073 (1979); Cooney et al., Science 241:456 (1988); and Dervan et al., Science 251:1360 (1991)) or to the mRNA itself (antisense—Okano, J. Neurochem. 56:560 (1991); Oligodeoxy-nucleotides as Antisense Inhibitors of Gene Expression, CRC Press, Boca Raton, Fla. (1988)). Triple helix formation optimally results in a shut-off of RNA transcription from DNA, while antisense RNA hybridization blocks translation of an mRNA molecule into polypeptide. The oligonucleotide described above can also be delivered to cells such that the antisense RNA or DNA may be expressed in vivo to inhibit production of polypeptide of the present invention antigens. Both techniques are effective in model systems, and the information disclosed herein can be used to design antisense or triple helix polynucleotides in an effort to treat disease, and in particular, for the treatment of proliferative diseases and/or conditions. Non-limiting antisense and triple helix methods encompassed by the present invention are more thoroughly described elsewhere herein (see, e.g., the section labeled “Antisense and Ribozyme (Antagonists)”).

[0405] Polynucleotides of the present invention are also useful in gene therapy. One goal of gene therapy is to insert a normal gene into an organism having a defective gene, in an effort to correct the genetic defect. The polynucleotides disclosed in the present invention offer a means of targeting such genetic defects in a highly accurate manner. Another goal is to insert a new gene that was not present in the host genome, thereby producing a new trait in the host cell. Additional non-limiting examples of gene therapy methods encompassed by the present invention are more thoroughly described elsewhere herein (see, e.g., the sections labeled “Gene Therapy Methods”, and Examples 16, 17 and 18).

[0406] The polynucleotides are also useful for identifying individuals from minute biological samples. The United States military, for example, is considering the use of restriction fragment length polymorphism (RFLP) for identification of its personnel. In this technique, an individual's genomic DNA is digested with one or more restriction enzymes, and probed on a Southern blot to yield unique bands for identifying personnel. This method does not suffer from the current limitations of “Dog Tags” which can be lost, switched, or stolen, making positive identification difficult. The polynucleotides of the present invention can be used as additional DNA markers for RFLP.

[0407] The polynucleotides of the present invention can also be used as an alternative to RFLP, by determining the actual base-by-base DNA sequence of selected portions of an individual's genome. These sequences can be used to prepare PCR primers for amplifying and isolating such selected DNA, which can then be sequenced. Using this technique, individuals can be identified because each individual will have a unique set of DNA sequences. Once a unique ID database is established for an individual, positive identification of that individual, living or dead, can be made from extremely small tissue samples.

[0408] Forensic biology also benefits from using DNA-based identification techniques as disclosed herein. DNA sequences taken from very small biological samples such as tissues, e.g., hair or skin, or body fluids, e.g., blood, saliva, semen, synovial fluid, amniotic fluid, breast milk, lymph, pulmonary sputum or surfactant, urine, fecal matter, etc., can be amplified using PCR. In one prior art technique, gene sequences amplified from polymorphic loci, such as DQa class II HLA gene, are used in forensic biology to identify individuals. (Erlich, H., PCR Technology, Freeman and Co. (1992)). Once these specific polymorphic loci are amplified, they are digested with one or more restriction enzymes, yielding an identifying set of bands on a Southern blot probed with DNA corresponding to the DQa class II HLA gene. Similarly, polynucleotides of the present invention can be used as polymorphic markers for forensic purposes.

[0409] There is also a need for reagents capable of identifying the source of a particular tissue. Such need arises, for example, in forensics when presented with tissue of unknown origin. Appropriate reagents can comprise, for example, DNA probes or primers prepared from the sequences of the present invention, specific to tissues, including but not limited to those shown in Table 1B. Panels of such reagents can identify tissue by species and/or by organ type. In a similar fashion, these reagents can be used to screen tissue cultures for contamination. Additional non-limiting examples of such uses are further described herein.

[0410] The polynucleotides of the present invention are also useful as hybridization probes for differential identification of the tissue(s) or cell type(s) present in a biological sample. Similarly, polypeptides and antibodies directed to polypeptides of the present invention are useful to provide immunological probes for differential identification of the tissue(s) (e.g., immunohistochemistry assays) or cell type(s) (e.g., immunocytochemistry assays). In addition, for a number of disorders of the above tissues or cells, significantly higher or lower levels of gene expression of the polynucleotides/polypeptides of the present invention may be detected in certain tissues (e.g., tissues expressing polypeptides and/or polynucleotides of the present invention, for example, those disclosed in column 5 of Table 1B.2, and/or cancerous and/or wounded tissues) or bodily fluids (e.g., semen, lymph, vaginal pool, serum, plasma, urine, synovial fluid or spinal fluid) taken from an individual having such a disorder, relative to a “standard” gene expression level, i.e., the expression level in healthy tissue from an individual not having the disorder.

[0411] Thus, the invention provides a diagnostic method of a disorder, which involves: (a) assaying gene expression level in cells or body fluid of an individual; (b) comparing the gene expression level with a standard gene expression level, whereby an increase or decrease in the assayed gene expression level compared to the standard expression level is indicative of a disorder.

[0412] In the very least, the polynucleotides of the present invention can be used as molecular weight markers on Southern gels, as diagnostic probes for the presence of a specific mRNA in a particular cell type, as a probe to “subtract-out” known sequences in the process of discovering novel polynucleotides, for selecting and making oligomers for attachment to a “gene chip” or other support, to raise anti-DNA antibodies using DNA immunization techniques, and as an antigen to elicit an immune response.

Uses of the Polypeptides

[0413] Each of the polypeptides identified herein can be used in numerous ways. The following description should be considered exemplary and utilizes known techniques.

[0414] Polypeptides and antibodies directed to polypeptides of the present invention are useful to provide immunological probes for differential identification of the tissue(s) (e.g., immunohistochemistry assays such as, for example, ABC immunoperoxidase (Hsu et al., J. Histochem. Cytochem. 29:577-580 (1981)) or cell type(s) (e.g., immunocytochemistry assays).

[0415] Antibodies can be used to assay levels of polypeptides encoded by polynucleotides of the invention in a biological sample using classical immunohistological methods known to those of skill in the art (e.g., see Jalcanen, et al., J. Cell. Biol. 101:976-985 (1985); Jalkanen, et al., J. Cell. Biol. 105:3087-3096 (1987)). Other antibody-based methods useful for detecting protein gene expression include immunoassays, such as the enzyme linked immunosorbent assay (ELISA) and the radioimmunoassay (RIA). Suitable antibody assay labels are known in the art and include enzyme labels, such as, glucose oxidase; radioisotopes, such as iodine (¹³¹I, ¹²⁵I, ¹²³I, ¹²¹I), carbon (¹⁴C), sulfur (³⁵S), tritium (³H), indium (^{115m}In, ^{113m}In, ¹¹²In, ¹¹¹In), and technetium (⁹⁹Tc, ^{99m}Tc), thallium (²⁰¹Ti), gallium (⁶⁸Ga, ⁶⁷Ga), palladium (¹⁰³Pd), molybdenum (⁹⁹Mo), xenon (¹³³Xe), fluorine (¹⁸F), ¹⁵³Sm, ¹⁷⁷Lu, ¹⁵⁹Gd, ¹⁴⁹Pm, ¹⁴⁰La, ¹⁷⁵Yb, ¹⁶⁶Ho, ⁹⁰Y, ⁴⁷Sc, ¹⁸⁶Re, ¹⁸⁸Re, ¹⁴²Pr, ¹⁰⁵Rh, ⁹⁷Ru; luminescent labels, such as luminol; and fluorescent labels, such as fluorescein and rhodamine, and biotin.

[0416] In addition to assaying levels of polypeptide of the present invention in a biological sample, proteins can also be detected in vivo by imaging. Antibody labels or markers for in vivo imaging of protein include those detectable by X-radiography, NMR or ESR. For X-radiography, suitable labels include radioisotopes such as barium or cesium, which emit detectable radiation but are not overtly harmful to the subject. Suitable markers for NMR and ESR include those with a detectable characteristic spin, such as deuterium, which may be incorporated into the antibody by labeling of nutrients for the relevant hybridoma.

[0417] A protein-specific antibody or antibody fragment which has been labeled with an appropriate detectable imaging moiety, such as a radioisotope (for example, ¹³¹I, ¹¹²In, ^{99m}TC, (¹³¹I, ¹²⁵I, ¹²³I, ¹²¹I), carbon (¹⁴C), sulfur (³⁵S), tritium (³H), indium (^{115m}In, ^{113m}In, ¹¹²In, ¹¹¹In), and technetium (⁹⁹Tc, ^{99m}Tc), thallium (²⁰¹Ti), gallium (⁶⁸Ga, ⁶⁷Ga), palladium (¹⁰³Pd), molybdenum (⁹⁹Mo), xenon (¹³³Xe), fluorine (¹⁸F, ¹⁵³Sm, ¹⁷⁷Lu, ¹⁵⁹Gd, ¹⁴⁹Pm, ¹⁴⁰La, ¹⁷⁵Yb, ¹⁶⁶Ho, ⁹⁰Y, ⁴⁷Sc, ¹⁸⁶Re, ¹⁸⁸Re, ¹⁴²Pr, ¹⁰⁵Rh, ⁹⁷Ru), a radio-opaque substance, or a material detectable by nuclear magnetic resonance, is introduced (for example, parenterally, subcutaneously or intraperitoneally) into the mammal to be examined for immune system disorder. It will be understood in the art that the size of the subject and the imaging system used will determine the quantity of imaging moiety needed to produce diagnostic images. In the case of a radioisotope moiety, for a human subject, the quantity of radioactivity injected will normally range from about 5 to 20 millicuries of ^{99m}Tc. The labeled antibody or antibody fragment will then preferentially accumulate at the location of cells which express the polypeptide encoded by a polynucleotide of the invention. In vivo tumor imaging is described in S. W. Burchiel et al., “Immunopharmacokinetics of Radiolabeled Antibodies and Their Fragments” (Chapter 13 in Tumor Imaging: The Radiochemical Detection of Cancer, S. W. Burchiel and B. A. Rhodes, eds., Masson Publishing Inc. (1982)).

[0418] In one embodiment, the invention provides a method for the specific delivery of compositions of the invention to cells by administering polypeptides of the invention (e.g., polypeptides encoded by polynucleotides of the invention and/or antibodies) that are associated with heterologous polypeptides or nucleic acids. In one example, the invention provides a method for delivering a therapeutic protein into the targeted cell. In another example, the invention provides a method for delivering a single stranded nucleic acid (e.g., antisense or ribozymes) or double stranded nucleic acid (e.g., DNA that can integrate into the cell's genome or replicate episomally and that can be transcribed) into the targeted cell.

[0419] In another embodiment, the invention provides a method for the specific destruction of cells (e.g., the destruction of tumor cells) by administering polypeptides of the invention in association with toxins or cytotoxic prodrugs.

[0420] By “toxin” is meant one or more compounds that bind and activate endogenous cytotoxic effector systems, radioisotopes, holotoxins, modified toxins, catalytic subunits of toxins, or any molecules or enzymes not normally present in or on the surface of a cell that under defined conditions cause the cell's death. Toxins that may be used according to the methods of the invention include, but are not limited to, radioisotopes known in the art, compounds such as, for example, antibodies (or complement fixing containing portions thereof) that bind an inherent or induced endogenous cytotoxic effector system, thymidine kinase, endonuclease, RNAse, alpha toxin, ricin, abrin, Pseudomonas exotoxin A, diphtheria toxin, saporin, momordin, gelonin, pokeweed antiviral protein, alpha-sarcin and cholera toxin. “Toxin” also includes a cytostatic or cytocidal agent, a therapeutic agent or a radioactive metal ion, e.g., alpha-emitters such as, for example, ²¹³Bi, or other radioisotopes such as, for example, ¹⁰³Pd, ¹³³Xe, ¹³¹I, ⁶⁸Ge, ⁵⁷Co, ⁶⁵Zn, ⁸⁵Sr, ³²P, ³⁵S, ⁹⁰Y, ¹⁵³Sm, ¹⁵³Gd, ¹⁶⁹Yb, ⁵¹Cr, ⁵⁴Mn, ⁷⁵Se, ¹¹³Sn, ⁹⁰Yttrium, ¹¹⁷Tin, ¹⁸⁶Rhenium, ¹⁶⁶Holmium, and ¹⁸⁸Rhenium; luminescent labels, such as luminol; and fluorescent labels, such as fluorescein and rhodamine, and biotin. In a specific embodiment, the invention provides a method for the specific destruction of cells (e.g., the destruction of tumor cells) by administering polypeptides of the invention or antibodies of the invention in association with the radioisotope ⁹⁰Y. In another specific embodiment, the invention provides a method for the specific destruction of cells (e.g., the destruction of tumor cells) by administering polypeptides of the invention or antibodies of the invention in association with the radioisotope ¹¹¹In. In a further specific embodiment, the invention provides a method for the specific destruction of cells (e.g., the destruction of tumor cells) by administering polypeptides of the invention or antibodies of the invention in association with the radioisotope ¹³¹I.

[0421] Techniques known in the art may be applied to label polypeptides of the invention (including antibodies). Such techniques include, but are not limited to, the use of bifunctional conjugating agents (see e.g., U.S. Pat. Nos. 5,756,065; 5,714,631; 5,696,239; 5,652,361; 5,505,931; 5,489,425; 5,435,990; 5,428,139; 5,342,604; 5,274,119; 4,994,560; and 5,808,003; the contents of each of which are hereby incorporated by reference in its entirety).

[0422] Thus, the invention provides a diagnostic method of a disorder, which involves (a) assaying the expression level of a polypeptide of the present invention in cells or body fluid of an individual; and (b) comparing the assayed polypeptide expression level with a standard polypeptide expression level, whereby an increase or decrease in the assayed polypeptide expression level compared to the standard expression level is indicative of a disorder. With respect to cancer, the presence of a relatively high amount of transcript in biopsied tissue from an individual may indicate a predisposition for the development of the disease, or may provide a means for detecting the disease prior to the appearance of actual clinical symptoms. A more definitive diagnosis of this type may allow health professionals to employ preventative measures or aggressive treatment earlier thereby preventing the development or further progression of the cancer.

[0423] Moreover, polypeptides of the present invention can be used to treat or prevent diseases or conditions such as, for example, neural disorders, immune system disorders, muscular disorders, reproductive disorders, gastrointestinal disorders, pulmonary disorders, cardiovascular disorders, renal disorders, proliferative disorders, and/or cancerous diseases and conditions. For example, patients can be administered a polypeptide of the present invention in an effort to replace absent or decreased levels of the polypeptide (e.g., insulin), to supplement absent or decreased levels of a different polypeptide (e.g., hemoglobin S for hemoglobin B, SOD, catalase, DNA repair proteins), to inhibit the activity of a polypeptide (e.g., an oncogene or tumor supressor), to activate the activity of a polypeptide (e.g., by binding to a receptor), to reduce the activity of a membrane bound receptor by competing with it for free ligand (e.g., soluble TNP receptors used in reducing inflammation), or to bring about a desired response (e.g., blood vessel growth inhibition, enhancement of the immune response to proliferative cells or tissues).

[0424] Similarly, antibodies directed to a polypeptide of the present invention can also be used to treat disease (as described supra, and elsewhere herein). For example, administration of an antibody directed to a polypeptide of the present invention can bind, and/or neutralize the polypeptide, and/or reduce overproduction of the polypeptide. Similarly, administration of an antibody can activate the polypeptide, such as by binding to a polypeptide bound to a membrane (receptor).

[0425] At the very least, the polypeptides of the present invention can be used as molecular weight markers on SDS-PAGE gels or on molecular sieve gel filtration columns using methods well known to those of skill in the art. Polypeptides can also be used to raise antibodies, which in turn are used to measure protein expression from a recombinant cell, as a way of assessing transformation of the host cell. Moreover, the polypeptides of the present invention can be used to test the biological activities described herein.

Diagnostic Assays

[0426] The compounds of the present invention are useful for diagnosis, treatment, prevention and/or prognosis of various disorders in mammals, preferably humans. Such disorders include, but are not limited to, those related to biological activities described in Table 1D and, also as described herein under the section heading “biological Activities”.

[0427] For a number of disorders, substantially altered (increased or decreased) levels of gene expression can be detected in tissues, cells or bodily fluids (e.g., sera, plasma, urine, semen, synovial fluid or spinal fluid) taken from an individual having such a disorder, relative to a “standard” gene expression level, that is, the expression level in tissues or bodily fluids from an individual not having the disorder. Thus, the invention provides a diagnostic method useful during diagnosis of a disorder, which involves measuring the expression level of the gene encoding the polypeptide in tissues, cells or body fluid from an individual and comparing the measured gene expression level with a standard gene expression level, whereby an increase or decrease in the gene expression level(s) compared to the standard is indicative of a disorder. These diagnostic assays may be performed in vivo or in vitro, such as, for example, on blood samples, biopsy tissue or autopsy tissue.

[0428] The present invention is also useful as a prognostic indicator, whereby patients exhibiting enhanced or depressed gene expression will experience a worse clinical outcome relative to patients expressing the gene at a level nearer the standard level.

[0429] In certain embodiments, a polypeptide of the invention, or polynucleotides, antibodies, agonists, or antagonists corresponding to that polypeptide, may be used to diagnose and/or prognosticate diseases and/or disorders associated with the tissue(s) in which the polypeptide of the invention is expressed, including one, two, three, four, five, or more tissues disclosed in Table 1B.2, column 5 (Tissue Distribution Library Code).

[0430] By “assaying the expression level of the gene encoding the polypeptide” is intended qualitatively or quantitatively measuring or estimating the level of the polypeptide of the invention or the level of the mRNA encoding the polypeptide of the invention in a first biological sample either directly (e.g., by determining or estimating absolute protein level or mRNA level) or relatively (e.g., by comparing to the polypeptide level or mRNA level in a second biological sample). Preferably, the polypeptide expression level or mRNA level in the first biological sample is measured or estimated and compared to a standard polypeptide level or mRNA level, the standard being taken from a second biological sample obtained from an individual not having the disorder or being determined by averaging levels from a population of individuals not having the disorder. As will be appreciated in the art, once a standard polypeptide level or mRNA level is known, it can be used repeatedly as a standard for comparison.

[0431] By “biological sample” is intended any biological sample obtained from an individual, cell line, tissue culture, or other source containing polypeptides of the invention (including portions thereof) or mRNA. As indicated, biological samples include body fluids (such as sera, plasma, urine, synovial fluid and spinal fluid) and tissue sources found to express the full length or fragments thereof of a polypeptide or mRNA. Methods for obtaining tissue biopsies and body fluids from mammals are well known in the art. Where the biological sample is to include mRNA, a tissue biopsy is the preferred source.

[0432] Total cellular RNA can be isolated from a biological sample using any suitable technique such as the single-step guanidinium-thiocyanate-phenol-chloroform method described in Chomczynski and Sacchi, Anal. Biochem. 162:156-159 (1987). Levels of mRNA encoding the polypeptides of the invention are then assayed using any appropriate method. These include Northern blot analysis, S1 nuclease mapping, the polymerase chain reaction (PCR), reverse transcription in combination with the polymerase chain reaction (RT-PCR), and reverse transcription in combination with the ligase chain reaction (RT-LCR).

[0433] The present invention also relates to diagnostic assays such as quantitative and diagnostic assays for detecting levels of polypeptides of the invention, in a biological sample (e.g., cells and tissues), including determination of normal and abnormal levels of polypeptides. Thus, for instance, a diagnostic assay in accordance with the invention for detecting over-expression of polypeptides of the invention compared to normal control tissue samples may be used to detect the presence of tumors. Assay techniques that can be used to determine levels of a polypeptide, such as a polypeptide of the present invention in a sample derived from a host are well-known to those of skill in the art. Such assay methods include radioimmunoassays, competitive-binding assays, Western Blot analysis and ELISA assays. Assaying polypeptide levels in a biological sample can occur using any art-known method.

[0434] Assaying polypeptide levels in a biological sample can occur using antibody-based techniques. For example, polypeptide expression in tissues can be studied with classical immunohistological methods (Jalkanen et al., J. Cell. Biol. 101:976-985 (1985); Jalkanen, M., et al., J. Cell. Biol. 105:3087-3096 (1987)). Other antibody-based methods useful for detecting polypeptide gene expression include immunoassays, such as the enzyme linked immunosorbent assay (ELISA) and the radioimmunoassay (RIA). Suitable antibody assay labels are known in the art and include enzyme labels, such as, glucose oxidase, and radioisotopes, such as iodine (¹²⁵I, ¹²¹I, carbon (¹⁴C), sulfur (³⁵S), tritium (³H), indium (¹¹²In), and technetium (^{99m}Tc), and fluorescent labels, such as fluorescein and rhodamine, and biotin.

[0435] The tissue or cell type to be analyzed will generally include those which are known, or suspected, to express the gene of inteest (such as, for example, cancer). The protein isolation methods employed herein may, for example, be such as those described in Harlow and Lane (Harlow, E. and Lane, D., 1988, “Antibodies: A Laboratory Manual”, Cold Spring Harbor Laboratory Press, Cold Spring Harbor, N.Y.), which is incorporated herein by reference in its entirety. The isolated cells can be derived from cell culture or from a patient. The analysis of cells taken from culture may be a necessary step in the assessment of cells that could be used as part of a cell-based gene therapy technique or, alternatively, to test the effect of compounds on the expression of the gene.

[0436] For example, antibodies, or fragments of antibodies, such as those described herein, may be used to quantitatively or qualitatively detect the presence of gene products or conserved variants or peptide fragments thereof. This can be accomplished, for example, by immunofluorescence techniques employing a fluorescently labeled antibody coupled with light microscopic, flow cytometric, or fluorimetric detection.

[0437] In a preferred embodiment, antibodies, or fragments of antibodies directed to any one or all of the predicted epitope domains of the polypeptides of the invention (shown in Table 1B) may be used to quantitatively or qualitatively detect the presence of gene products or conserved variants or peptide fragments thereof. This can be accomplished, for example, by immunofluorescence techniques employing a fluorescently labeled antibody coupled with light microscopic, flow cytometric, or fluorimetric detection.

[0438] In an additional preferred embodiment, antibodies, or fragments of antibodies directed to a conformational epitope of a polypeptide of the invention may be used to quantitatively or qualitatively detect the presence of gene products or conserved variants or peptide fragments thereof. This can be accomplished, for example, by immunofluorescence techniques employing a fluorescently labeled antibody coupled with light microscopic, flow cytometric, or fluorimetric detection.

[0439] The antibodies (or fragments thereof), and/or polypeptides of the present invention may, additionally, be employed histologically, as in immunofluorescence, immunoelectron microscopy or non-immunological assays, for in situ detection of gene products or conserved variants or peptide fragments thereof. In situ detection may be accomplished by removing a histological specimen from a patient, and applying thereto a labeled antibody or polypeptide of the present invention. The antibody (or fragment thereof) or polypeptide is preferably applied by overlaying the labeled antibody (or fragment) onto a biological sample. Through the use of such a procedure, it is possible to determine not only the presence of the gene product, or conserved variants or peptide fragments, or polypeptide binding, but also its distribution in the examined tissue. Using the present invention, those of ordinary skill will readily perceive that any of a wide variety of histological methods (such as staining procedures) can be modified in order to achieve such in situ detection.

[0440] Immunoassays and non-immunoassays for gene products or conserved variants or peptide fragments thereof will typically comprise incubating a sample, such as a biological fluid, a tissue extract, freshly harvested cells, or lysates of cells which have been incubated in cell culture, in the presence of a detectably labeled antibody capable of binding gene products or conserved variants or peptide fragments thereof, and detecting the bound antibody by any of a number of techniques well-known in the art.

[0441] The biological sample may be brought in contact with and immobilized onto a solid phase support or carrier such as nitrocellulose, or other solid support which is capable of immobilizing cells, cell particles or soluble proteins. The support may then be washed with suitable buffers followed by treatment with the detectably labeled antibody or detectable polypeptide of the invention. The solid phase support may then be washed with the buffer a second time to remove unbound antibody or polypeptide. Optionally the antibody is subsequently labeled. The amount of bound label on solid support may then be detected by conventional means.

[0442] By “solid phase support or carrier” is intended any support capable of binding an antigen or an antibody. Well-known supports or carriers include glass, polystyrene, polypropylene, polyethylene, dextran, nylon, amylases, natural and modified celluloses, polyacrylamides, gabbros, and magnetite. The nature of the carrier can be either soluble to some extent or insoluble for the purposes of the present invention. The support material may have virtually any possible structural configuration so long as the coupled molecule is capable of binding to an antigen or antibody. Thus, the support configuration may be spherical, as in a bead, or cylindrical, as in the inside surface of a test tube, or the external surface of a rod. Alternatively, the surface may be flat such as a sheet, test strip, etc. Preferred supports include polystyrene beads. Those skilled in the art will know many other suitable carriers for binding antibody or antigen, or will be able to ascertain the same by use of routine experimentation.

[0443] The binding activity of a given lot of antibody or antigen polypeptide may be determined according to well known methods. Those skilled in the art will be able to determine operative and optimal assay conditions for each determination by employing routine experimentation.

[0444] In addition to assaying polypeptide levels or polynucleotide levels in a biological sample obtained from an individual, polypeptide or polynucleotide can also be detected in vivo by imaging. For example, in one embodiment of the invention, polypeptides and/or antibodies of the invention are used to image diseased cells, such as neoplasms. In another embodiment, polynucleotides of the invention (e.g., polynucleotides complementary to all or a portion of an mRNA) and/or antibodies (e.g., antibodies directed to any one or a combination of the epitopes of a polypeptide of the invention, antibodies directed to a conformational epitope of a polypeptide of the invention, or antibodies directed to the full length polypeptide expressed on the cell surface of a mammalian cell) are used to image diseased or neoplastic cells.

[0445] Antibody labels or markers for in vivo imaging of polypeptides of the invention include those detectable by X-radiography, NMR, MRI, CAT-scans or ESR. For X-radiography, suitable labels include radioisotopes such as barium or cesium, which emit detectable radiation but are not overtly harmful to the subject. Suitable markers for NMR and ESR include those with a detectable characteristic spin, such as deuterium, which may be incorporated into the antibody by labeling of nutrients for the relevant hybridoma. Where in vivo imaging is used to detect enhanced levels of polypeptides for diagnosis in humans, it may be preferable to use human antibodies or “humanized” chimeric monoclonal antibodies. Such antibodies can be produced using techniques described herein or otherwise known in the art. For example methods for producing chimeric antibodies are known in the art. See, for review, Morrison, Science 229:1202 (1985); Oi et al., BioTechniques 4:214 (1986); Cabilly et al., U.S. Pat. No. 4,816,567; Taniguchi et al., EP 171496; Morrison et al., EP 173494; Neuberger et al., WO 8601533; Robinson et al., WO 8702671; Boulianne et al., Nature 312:643 (1984); Neuberger et al., Nature 314:268 (1985).

[0446] Additionally, any polypeptides of the invention whose presence can be detected, can be administered. For example, polypeptides of the invention labeled with a radio-opaque or other appropriate compound can be administered and visualized in vivo, as discussed, above for labeled antibodies. Further, such polypeptides can be utilized for in vitro diagnostic procedures.

[0447] A polypeptide-specific antibody or antibody fragment which has been labeled with an appropriate detectable imaging moiety, such as a radioisotope (for example, ¹³¹I, ¹¹²In, ^{99m}Tc), a radio-opaque substance, or a material detectable by nuclear magnetic resonance, is introduced (for example, parenterally, subcutaneously or intraperitoneally) into the mammal to be examined for a disorder. It will be understood in the art that the size of the subject and the imaging system used will determine the quantity of imaging moiety needed to produce diagnostic images. In the case of a radioisotope moiety, for a human subject, the quantity of radioactivity injected will normally range from about 5 to 20 millicuries of ^{99m}Tc. The labeled antibody or antibody fragment will then preferentially accumulate at the location of cells which contain the antigenic protein. In vivo tumor imaging is described in S. W. Burchiel et al., “Immunopharmacokinetics of Radiolabeled Antibodies and Their Fragments” (Chapter 13 in Tumor imaging: The Radiochemical Detection of Cancer, S. W. Burchiel and B. A. Rhodes, eds., Masson Publishing Inc. (1982)).

[0448] With respect to antibodies, one of the ways in which an antibody of the present invention can be detectably labeled is by linking the same to a reporter enzyme and using the linked product in an enzyme immunoassay (EIA) (Voller, A., “The Enzyme Linked Immunosorbent Assay (ELISA)”, 1978, Diagnostic Horizons 2:1-7, Microbiological Associates Quarterly Publication, Walkersville, Md.); Voller et al., J. Clin. Pathol. 31:507-520 (1978); Butler, J. E., Meth. Enzymol. 73:482-523 (1981); Maggio, E. (ed.), 1980, Enzyme Immunoassay, CRC Press, Boca Raton, Fla.,; Ishikawa, E. et al., (eds.), 1981, Enzyme Immunoassay, Kgaku Shoin, Tokyo). The reporter enzyme which is bound to the antibody will react with an appropriate substrate, preferably a chromogenic substrate, in such a manner as to produce a chemical moiety which can be detected, for example, by spectrophotometric, fluorimetric or by visual means. Reporter enzymes which can be used to detectably label the antibody include, but are not limited to, malate dehydrogenase, staphylococcal nuclease, delta-5-steroid isomerase, yeast alcohol dehydrogenase, alpha-glycerophosphate, dehydrogenase, triose phosphate isomerase, horseradish peroxidase, alkaline phosphatase, asparaginase, glucose oxidase, beta-galactosidase, ribonuclease, urease, catalase, glucose-6-phosphate dehydrogenase, glucoamylase and acetylcholinesterase. Additionally, the detection can be accomplished by calorimetric methods which employ a chromogenic substrate for the reporter enzyme. Detection may also be accomplished by visual comparison of the extent of enzymatic reaction of a substrate in comparison with similarly prepared standards.

[0449] Detection may also be accomplished using any of a variety of other immunoassays. For example, by radioactively labeling the antibodies or antibody fragments, it is possible to detect polypeptides through the use of a radioimmunoassay (RIA) (see, for example, Weintraub, B., Principles of Radioimmunoassays, Seventh Training Course on Radioligand Assay Techniques, The Endocrine Society, March, 1986, which is incorporated by reference herein). The radioactive isotope can be detected by means including, but not limited to, a gamma counter, a scintillation counter, or autoradiography.

[0450] It is also possible to label the antibody with a fluorescent compound. When the fluorescently labeled antibody is exposed to light of the proper wave length, its presence can then be detected due to fluorescence. Among the most commonly used fluorescent labeling compounds are fluorescein isothiocyanate, rhodamine, phycoerythrin, phycocyanin, allophycocyanin, ophthaldehyde and fluorescamine.

[0451] The antibody can also be detectably labeled using fluorescence emitting metals such as ¹⁵²Eu, or others of the lanthanide series. These metals can be attached to the antibody using such metal chelating groups as diethylenetriaminepentacetic acid (DTPA) or ethylenediaminetetraacetic acid (EDTA).

[0452] The antibody also can be detectably labeled by coupling it to a chemiluminescent compound. The presence of the chemiluminescent-tagged antibody is then determined by detecting the presence of luminescence that arises during the course of a chemical reaction. Examples of particularly useful chemiluminescent labeling compounds are luminol, isoluminol, theromatic acridinium ester, imidazole, acridinium salt and oxalate ester.

[0453] Likewise, a bioluminescent compound may be used to label the antibody of the present invention. Bioluminescence is a type of chemiluminescence found in biological systems in, which a catalytic protein increases the efficiency of the chemiluminescent reaction. The presence of a bioluminescent protein is determined by detecting the presence of luminescence. Important bioluminescent compounds for purposes of labeling are luciferin, luciferase and aequorin.

Methods for Detecting Diseases

[0454] In general, a disease may be detected in a patient based on the presence of one or more proteins of the invention and/or polynucleotides encoding such proteins in a biological sample (for example, blood, sera, urine, and/or tumor biopsies) obtained from the patient. In other words, such proteins may be used as markers to indicate the presence or absence of a disease or disorder, including cancer and/or as described elsewhere herein. In addition, such proteins may be useful for the detection of other diseases and cancers. The binding agents provided herein generally permit detection of the level of antigen that binds to the agent in the biological sample. Polynucleotide primers and probes may be used to detect the level of mRNA encoding polypeptides of the invention, which is also indicative of the presence or absence of a disease or disorder, including cancer. In general, polypeptides of the invention should be present at a level that is at least three fold higher in diseased tissue than in normal tissue.

[0455] There are a variety of assay formats known to those of ordinary skill in the art for using a binding agent to detect polypeptide markers in a sample. See, e.g., Harlow and Lane, supra. In general, the presence or absence of a disease in a patient may be determined by (a) contacting a biological sample obtained from a patient with a binding agent; (b) detecting in the sample a level of polypeptide that binds to the binding agent; and (c) comparing the level of polypeptide with a predetermined cut-off value.

[0456] In a preferred embodiment, the assay involves the use of a binding agent(s) immobilized on a solid support to bind to and remove the polypeptide of the invention from the remainder of the sample. The bound polypeptide may then be detected using a detection reagent that contains a reporter group and specifically binds to the binding agent/polypeptide complex. Such detection reagents may comprise, for example, a binding agent that specifically binds to the polypeptide or an antibody or other agent that specifically binds to the binding agent, such as an anti-immunoglobulin, protein G, protein A or a lectin. Alternatively, a competitive assay may be utilized, in which a polypeptide is labeled with a reporter group and allowed to bind to the immobilized binding agent after incubation of the binding agent with the sample. The extent to which components of the sample inhibit the binding of the labeled polypeptide to the binding agent is indicative of the reactivity of the sample with the immobilized binding agent. Suitable polypeptides for use within such assays include polypeptides of the invention and portions thereof, or antibodies, to which the binding agent binds, as described above.

[0457] The solid support may be any material known to those of skill in the art to which polypeptides of the invention may be attached. For example, the solid support may be a test well in a microtiter plate or a nitrocellulose or other suitable membrane. Alternatively, the support may be a bead or disc, such as glass fiberglass, latex or a plastic material such as polystyrene or polyvinylchloride. The support may also be a magnetic particle or a fiber optic sensor, such as those disclosed, for example, in U.S. Pat. No. 5,359,681. The binding agent may be immobilized on the solid support using a variety of techniques known to those of skill in the art, which are amply described in the patent and scientific literature. In the context of the present invention, the term “immobilization” refers to both noncovalent association, such as adsorption, and covalent attachment (which may be a direct linkage between the agent and functional groups on the support or may be a linkage by way of a cross-linking agent). Immobilization by adsorption to a well in a microtiter plate or to a membrane is preferred. In such cases, adsorption may be achieved by contacting the binding agent, in a suitable buffer, with the solid support for the suitable amount of time. The contact time varies with temperature, but is typically between about 1 hour and about 1 day. In general, contacting a well of plastic microtiter plate (such as polystyrene or polyvinylchloride) with an amount of binding agent ranging from about 10 ng to about 10 ug, and preferably about 100 ng to about 1 ug, is sufficient to immobilize an adequate amount of binding agent.

[0458] Covalent attachment of binding agent to a solid support may generally be achieved by first reacting the support with a bifunctional reagent that will react with both the support and a functional group, such as a hydroxyl or amino group, on the binding agent. For example, the binding agent may be covalently attached to supports having an appropriate polymer coating using benzoquinone or by condensation of an aldehyde group on the support with an amine and an active hydrogen on the binding partner (see, e.g., Pierce Immunotechnology Catalog and Handbook, 1991, at A12-A13).

Gene Therapy Methods

[0459] Also encompassed by the invention are gene therapy methods for treating or preventing disorders, diseases and conditions. The gene therapy methods relate to the introduction of nucleic acid (DNA, RNA and antisense DNA or RNA) sequences into an animal to achieve expression of the polypeptide of the present invention. This method requires a polynucleotide which codes for a polypeptide of the present invention operatively linked to a promoter and any other genetic elements necessary for the expression of the polypeptide by the target tissue. Such gene therapy and delivery techniques are known in the art, see, for example, WO90/11092, which is herein incorporated by reference.

[0460] Thus, for example, cells from a patient may be engineered with a polynucleotide (DNA or RNA) comprising a promoter operably linked to a polynucleotide of the present invention ex vivo, with the engineered cells then being provided to a patient to be treated with the polypeptide of the present invention. Such methods are well-known in the arL For example, see Belldegrun, A., et al., J. Natl. Cancer Inst. 85: 207-216 (1993); Ferrantini, M. et al., Cancer Research 53: 1107-1112 (1993); Ferrantini, M. et al., J. Immunology 153: 4604-4615 (1994); Kaido, T., et al., Int. J. Cancer 60: 221-229 (1995); Ogura, H., et al., Cancer Research 50: 5102-5106 (1990); Santodonato, L., et al., Human Gene Therapy 7:1-10 (1996); Santodonato, L., et al., Gene Therapy 4:1246-1255 (1997); and Zhang, J.-F. et al., Cancer Gene Therapy 3: 31-38 (1996)), which are herein incorporated by reference. In one embodiment, the cells which are engineered are arterial cells. The arterial cells may be reintroduced into the patient through direct injection to the artery, the tissues surrounding the artery, or through catheter injection.

[0461] As discussed in more detail below, the polynucleotide constructs can be delivered by any method that delivers injectable materials to the cells of an animal, such as, injection into the interstitial space of tissues (heart, muscle, skin, lung, liver, and the like). The polynucleotide constructs may be delivered in a pharmaceutically acceptable liquid or aqueous carrier.

[0462] In one embodiment, the polynucleotide of the present invention is delivered as a naked polynucleotide. The term “naked” polynucleotide, DNA or RNA refers to sequences that are free from any delivery vehicle that acts to assist, promote or facilitate entry into the cell, including viral sequences, viral particles, liposome formulations, lipofectin or precipitating agents and the like. However, the polynucleotide of the present invention can also be delivered in liposome formulations and lipofectin formulations and the like can be prepared by methods well known to those skilled in the art. Such methods are described, for example, in U.S. Pat. Nos. 5,593,972, 5,589,466, and 5,580,859, which are herein incorporated by reference.

[0463] The polynucleotide vector constructs used in the gene therapy method are preferably constructs that will not integrate into the host genome nor will they contain sequences that allow for replication. Appropriate vectors include pWLNEO, pSV2CAT, pOG44, pXT1 and pSG available from Stratagene; pSVK3, pBPV, pMSG and pSVL available from Pharmacia; and pEF1/V5, pcDNA3.1, and pRc/CMV2 available from Invitrogen. Other suitable vectors will be readily apparent to the skilled artisan.

[0464] Any strong promoter known to those skilled in the art can be used for driving the expression of the polynucleotide sequence. Suitable promoters include adenoviral promoters, such as the adenoviral major late promoter, or heterologous promoters, such as the cytomegalovirus (CMV) promoter, the respiratory syncytial virus (RSV) promoter; inducible promoters, such as the MMT promoter, the metallothionein promoter, heat shock promoters; the albumin promoter; the ApoAI promoter; human globin promoters; viral thymidine kinase promoters, such as the Herpes Simplex thymidine kinase promoter; retroviral LTRs; the b-actin promoter, and human growth hormone promoters. The promoter also may be the native promoter for the polynucleotide of the present invention.

[0465] Unlike other gene therapy techniques, one major advantage of introducing naked nucleic acid sequences into target cells is the transitory nature of the polynucleotide synthesis in the cells. Studies have shown that non-replicating DNA sequences can be introduced into cells to provide production of the desired polypeptide for periods of up to six months.

[0466] The polynucleotide construct can be delivered to the interstitial space of tissues within the an animal, including of muscle, skin, brain, lung, liver, spleen, bone marrow, thymus, heart, lymph, blood, bone, cartilage, pancreas, kidney, gall bladder, stomach, intestine, testis, ovary, uterus, rectum, nervous system, eye, gland, and connective tissue. Interstitial space of the tissues comprises the intercellular, fluid, mucopolysaccharide matrix among the reticular fibers of organ tissues, elastic fibers in the walls of vessels or chambers, collagen fibers of fibrous tissues, or that same matrix within connective tissue ensheathing muscle cells or in the lacunae of bone. It is similarly the space occupied by the plasma of the circulation and the lymph fluid of the lymphatic channels. Delivery to the interstitial space of muscle tissue is preferred for the reasons discussed below. They may be conveniently delivered by injection into the tissues comprising these cells. They are preferably delivered to and expressed in persistent, non-dividing cells which are differentiated, although delivery and expression may be achieved in non-differentiated or less completely differentiated cells, such as, for example, stem cells of blood or skin fibroblasts. In vivo muscle cells are particularly competent in their ability to take up and express polynucleotides.

[0467] For the naked nucleic acid sequence injection, an effective dosage amount of DNA or RNA will be in the range of from about 0.05 mg/kg body weight to about 50 mg/kg body weight. Preferably the dosage will be from about 0.005 mg/kg to about 20 mg/kg and more preferably from about 0.05 mg/kg to about 5 mg/kg. Of course, as the artisan of ordinary skill will appreciate, this dosage will vary according to the tissue site of injection. The appropriate and effective dosage of nucleic acid sequence can readily be determined by those of ordinary skill in the art and may depend on the condition being treated and the route of administration.

[0468] The preferred route of administration is by the parenteral route of injection into the interstitial space of tissues. However, other parenteral routes may also be used, such as, inhalation of an aerosol formulation particularly for delivery to lungs or bronchial tissues, throat or mucous membranes of the nose. In addition, naked DNA constructs can be delivered to arteries during angioplasty by the catheter used in the procedure.

[0469] The naked polynucleotides are delivered by any method known in the art, including, but not limited to, direct needle injection at the delivery site, intravenous injection, topical administration, catheter infusion, and so-called “gene guns”. These delivery methods are known in the art.

[0470] The constructs may also be delivered with delivery vehicles such as viral sequences, viral particles, liposome formulations, lipofectin, precipitating agents, etc. Such methods of delivery are known in the art.

[0471] In certain embodiments, the polynucleotide constructs are complexed in a liposome preparation. Liposomal preparations for use in the instant invention include cationic (positively charged), anionic (negatively charged) and neutral preparations. However, cationic liposomes are particularly preferred because a tight charge complex can be formed between the cationic liposome and the polyanionic nucleic acid. Cationic liposomes have been shown to mediate intracellular delivery of plasmid DNA (Felgner et al., Proc. Natl. Acad. Sci. USA (1987) 84:7413-7416, which is herein incorporated by reference); mRNA (Malone et al., Proc. Natl. Acad. Sci. USA (1989) 86:6077-6081, which is herein incorporated by reference); and purified transcription factors (Debs et al., J. Biol. Chem. (1990) 265:10189-10192, which is herein incorporated by reference), in functional form.

[0472] Cationic liposomes are readily available. For example, N[1-2,3-dioleyloxy)propyl]-N,N,N-triethylammonium (DOTMA) liposomes are particularly useful and are available under the trademark Lipofectin, from GIBCO BRL, Grand Island, N.Y. (See, also, Felgner et al., Proc. Natl. Acad. Sci. USA (1987) 84:7413-7416, which is herein incorporated by reference). Other commercially available liposomes include transfectace (DDAB/DOPE) and DOTAP/DOPE (Boehringer).

[0473] Other cationic liposomes can be prepared from readily available materials using techniques well known in the art. See, e.g. PCT Publication No. WO 90/11092 (which is herein incorporated by reference) for a description of the synthesis of DOTAP (1,2-bis(oleoyloxy)-3-(trimethylammonio)propane) liposomes. Preparation of DOTMA liposomes is explained in the literature, see, e.g., P. Felgner et al., Proc. Natl. Acad. Sci. USA 84:7413-7417, which is herein incorporated by reference. Similar methods can be used to prepare liposomes from other cationic lipid materials.

[0474] Similarly, anionic and neutral liposomes are readily available, such as from Avanti Polar Lipids (Birmingham, Ala.), or can be easily prepared using readily available materials. Such materials include phosphatidyl, choline, cholesterol, phosphatidyl ethanolamine, dioleoylphosphatidyl choline (DOPC), dioleoylphosphatidyl glycerol (DOPG), dioleoylphoshatidyl ethanolamine (DOPE), among others. These materials can also be mixed with the DOTMA and DOTAP starting materials in appropriate ratios. Methods for making liposomes using these materials are well known in the art.

[0475] For example, commercially dioleoylphosphatidyl choline (DOPC), dioleoylphosphatidyl glycerol (DOPG), and dioleoylphosphatidyl ethanolamine (DOPE) can be used in various combinations to make conventional liposomes, with or without the addition of cholesterol. Thus, for example, DOPG/DOPC vesicles can be prepared by drying 50 mg each of DOPG and DOPC under a stream of nitrogen gas into a sonication vial. The sample is placed under a vacuum pump overnight and is hydrated the following day with deionized water. The sample is then sonicated for 2 hours in a capped vial, using a Heat Systems model 350 sonicator equipped with an inverted cup (bath type) probe at the maximum setting while the bath is circulated at 15EC. Alternatively, negatively charged vesicles can be prepared without sonication to produce multilamellar vesicles or by extrusion through nucleopore membranes to produce unilamellar vesicles of discrete size. Other methods are known and available to those of skill in the art.

[0476] The liposomes can comprise multilamellar vesicles (MLVs), small unilamellar vesicles (SUVs), or large unilamellar vesicles (LUVs), with SUVs being preferred. The various liposome-nucleic acid complexes are prepared using methods well known in the art. See, e.g., Straubinger et al., Methods of Immunology (1983), 101:512-527, which is herein incorporated by reference. For example, MLVs containing nucleic acid can be prepared by depositing a thin film of phospholipid on the walls of a glass tube and subsequently hydrating with a solution of the material to be encapsulated. SUVs are prepared by extended sonication of MLVs to produce a homogeneous population of unilamellar liposomes. The material to be entrapped is added to a suspension of preformed MLVs and then sonicated. When using liposomes containing cationic lipids, the dried lipid film is resuspended in an appropriate solution such as sterile water or an isotonic buffer solution such as 10 mM Tris/NaCl, sonicated, and then the preformed liposomes are mixed directly with the DNA. The liposome and DNA form a very stable complex due to binding of the positively charged liposomes to the cationic DNA. SUVs find use with small nucleic acid fragments. LUVs are prepared by a number of methods, well known in the art. Commonly used methods include Ca²⁺-EDTA chelation (Papahadjopoulos et al., Biochim. Biophys. Acta (1975) 394:483; Wilson et al., Cell 17:77 (1979)); ether injection (Deamer, D. and Bangham, A., Biochim. Biophys. Acta 443:629 (1976); Ostro et al., Biochem Biophys. Res. Commun. 76:836 (1977); Fraley et al., Proc. Natl. Acad. Sci. USA 76:3348 (1979)); detergent dialysis (Enoch, H. and Strittmatter, P., Proc. Natl. Acad. Sci. USA 76:145 (1979)); and reverse-phase evaporation (REV) Fraley et al., J. Biol. Chem. 255:10431 (1980); Szoka, F. and Papahadjopoulos, D., Proc. Natl. Acad. Sci. USA 75:145 (1978); Schaefer-Ridder et al., Science 215:166 (1982)), which are herein incorporated by reference.

[0477] Generally, the ratio of DNA to liposomes will be from about 10:1 to about 1:10. Preferably, the ration will be from about 5:1 to about 1:5. More preferably, the ration will be about 3:1 to about 1:3. Still more preferably, the ratio will be about 1:1.

[0478] U.S. Pat. No. 5,676,954 (which is herein incorporated by reference) reports on the injection of genetic material, complexed with cationic liposomes carriers, into mice. U.S. Pat. Nos. 4,897,355, 4,946,787, 5,049,386, 5,459,127, 5,589,466, 5,693,622, 5,580,859, 5,703,055, and international publication no. WO 94/9469 (which are herein incorporated by reference) provide cationic lipids for use in transfecting DNA into cells and mammals. U.S. Pat. Nos. 5,589,466, 5,693,622, 5,580,859, 5,703,055, and international publication no. WO 94/9469 provide methods for delivering DNA-cationic lipid complexes to mammals.

[0479] In certain embodiments, cells are engineered, ex vivo or in vivo, using a retroviral particle containing RNA which comprises a sequence encoding a polypeptide of the present invention. Retroviruses from which the retroviral plasmid vectors may be derived include, but are not limited to, Moloney Murine Leukemia Virus, spleen necrosis virus, Rous sarcoma Virus, Harvey Sarcoma Virus, avian leukosis virus, gibbon ape leukemia virus, human immunodeficiency virus, Myeloproliferative Sarcoma Virus, and mammary tumor virus.

[0480] The retroviral plasmid vector is employed to transduce packaging cell lines to form producer cell lines. Examples of packaging cells which may be transfected include, but are not limited to, the PE501, PA317, R-2, R-AM, PA12, T19-14X, VT-19-17-H2, RCRE, RCRIP, GP+E-86, GP+envAm12, and DAN cell lines as described in Miller, Human Gene Therapy 1:5-14 (1990), which is incorporated herein by reference in its entirety. The vector may transduce the packaging cells through any means known in the arL Such means include, but are not limited to, electroporation, the use of liposomes, and CaPO₄ precipitation. In one alternative, the retroviral plasmid vector may be encapsulated into a liposome, or coupled to a lipid, and then administered to a host.

[0481] The producer cell line generates infectious retroviral vector particles which include polynucleotide encoding a polypeptide of the present invention. Such retroviral vector particles then may be employed, to transduce eukaryotic cells, either in vitro or in vivo. The transduced eukaryotic cells will express a polypeptide of the present invention.

[0482] In certain other embodiments, cells are engineered, ex vivo or in vivo, with polynucleotide contained in an adenovirus vector. Adenovirus can be manipulated such that it encodes and expresses a polypeptide of the present invention, and at the same time is inactivated in terms of its ability to replicate in a normal lytic viral life cycle. Adenovirus expression is achieved without integration of the viral DNA into the host cell chromosome, thereby alleviating concerns about insertional mutagenesis. Furthermore, adenoviruses have been used as live enteric vaccines for many years with an excellent safety profile (Schwartz et al. Am. Rev. Respir. Dis.109:233-238 (1974)). Finally, adenovirus mediated gene transfer has been demonstrated in a number of instances including transfer of alpha-1-antitrypsin and CFtR to the lungs of cotton rats (Rosenfeld, M. A. et al. (1991) Science 252:431-434; Rosenfeld et al., (1992) Cell 68:143-155). Furthermore, extensive studies to attempt to establish adenovirus as a causative agent in human cancer were uniformly negative (Green, M. et al. (1979) Proc. Natl. Acad. Sci. USA 76:6606).

[0483] Suitable adenoviral vectors useful in the present invention are described, for example, in Kozarsky and Wilson, Curr. Opin. Genet. Devel. 3:499-503 (1993); Rosenfeld et al., Cell 68:143-155 (1992); Engelhardt et al., Human Genet. Ther. 4:759-769 (1993); Yang et al., Nature Genet. 7:362-369 (1994); Wilson et al., Nature 365:691-692 (1993); and U.S. Pat. No. 5,652,224, which are herein incorporated by reference. For example, the adenovirus vector Ad2 is useful and can be grown in human 293 cells. These cells contain the E1 region of adenovirus and constitutively express E1a and E1b, which complement the defective adenoviruses by providing the products of the genes deleted from the vector. In addition to Ad2, other varieties of adenovirus (e.g., Ad3, Ad5, and Ad7) are also useful in the present invention.

[0484] Preferably, the adenoviruses used in the present invention are replication deficient. Replication deficient adenoviruses require the aid of a helper virus and/or packaging cell line to form infectious particles. The resulting virus is capable of infecting cells and can express a polynucleotide of interest which is operably linked to a promoter, but cannot replicate in most cells. Replication deficient adenoviruses may be deleted in one or more of all or a portion of the following genes: E1a, E1b, E3, E4, E2a, or L1 through L5.

[0485] In certain other embodiments, the cells are engineered, ex vivo or in vivo, using an adeno-associated virus (AAV). AAVs are naturally occurring defective viruses that require helper viruses to produce infectious particles (Muzyczka, N., Curr. Topics in Microbiol. Immunol. 158:97 (1992)). It is also one of the few viruses that may integrate its DNA into non-dividing cells. Vectors containing as little as 300 base pairs of AAV can be packaged and can integrate, but space for exogenous DNA is limited to about 4.5 kb. Methods for producing and using such AAVs are known in the art. See, for example, U.S. Pat. Nos. 5,139,941, 5,173,414, 5,354,678, 5,436,146, 5,474,935,5,478,745, and 5,589,377.

[0486] For example, an appropriate AAV vector for use in the present invention will include all the sequences necessary for DNA replication, encapsidation, and host-cell integration. The polynucleotide construct is inserted into the AAV vector using standard cloning methods, such as those found in Sambrook et al., Molecular Cloning: A Laboratory Manual, Cold Spring Harbor Press (1989). The recombinant AAV vector is then transfected into packaging cells which are infected with a helper virus, using any standard technique, including lipofection, electroporation, calcium phosphate precipitation, etc. Appropriate helper viruses include adenoviruses, cytomegaloviruses, vaccinia viruses, or herpes viruses. Once the packaging cells are transfected and infected, they will produce infectious AAV viral particles which contain the polynucleotide construct. These viral particles are then used to transduce eukaryotic cells, either ex vivo or in vivo. The transduced cells will contain the polynucleotide construct integrated into its genome, and will express a polypeptide of the invention.

[0487] Another method of gene therapy involves operably associating heterologous control regions and endogenous polynucleotide sequences (e.g. encoding a polypeptide of the present invention) via homologous recombination (see, e.g., U.S. Pat. No. 5,641,670, issued Jun. 24, 1997; International Publication No. WO 96/29411, published Sep. 26, 1996; International Publication No. WO 94/12650, published Aug. 4, 1994; Koller et al., Proc. Natl. Acad. Sci. USA 86:8932-8935 (1989); and Zijlstra et al., Nature 342:435-438 (1989), which are herein encorporated by reference. This method involves the activation of a gene which is present in the target cells, but which is not normally expressed in the cells, or is expressed at a lower level than desired.

[0488] Polynucleotide constructs are made, using standard techniques known in the art, which contain the promoter with targeting sequences flanking the promoter. Suitable promoters are described herein. The targeting sequence is sufficiently complementary to an endogenous sequence to permit homologous recombination of the promoter-targeting sequence with the endogenous sequence. The targeting sequence will be sufficiently near the 5′ end of the desired endogenous polynucleotide sequence so the promoter will be operably linked to the endogenous sequence upon homologous recombination.

[0489] The promoter and the targeting sequences can be amplified using PCR. Preferably, the amplified promoter contains distinct restriction enzyme sites on the 5′ and 3′ ends. Preferably, the 3′ end of the first targeting sequence contains the same restriction enzyme site as the 5′ end of the amplified promoter and the 5′ end of the second targeting sequence contains the same restriction site as the 3′ end of the amplified promoter. The amplified promoter and targeting sequences are digested and ligated together.

[0490] The promoter-targeting sequence construct is delivered to the cells, either as naked polynucleotide, or in conjunction with transfection-facilitating agents, such as liposomes, viral sequences, viral particles, whole viruses, lipofection, precipitating agents, etc., described in more detail above. The P promoter-targeting sequence can be delivered by any method, included direct needle injection, intravenous injection, topical administration, catheter infusion, particle accelerators, etc. The methods are described in more detail below.

[0491] The promoter-targeting sequence construct is taken up by cells. Homologous recombination between the construct and the endogenous sequence takes place, such that an endogenous sequence is placed under the control of the promoter. The promoter then drives the expression of the endogenous sequence.

[0492] The polynucleotide encoding a polypeptide of the present invention may contain a secretory signal sequence that facilitates secretion of the protein. Typically, the signal sequence is positioned in the coding region of the polynucleotide to be expressed towards or at the 5′ end of the coding region. The signal sequence may be homologous or heterologous to the polynucleotide of interest and may be homologous or heterologous to the cells to be transfected. Additionally, the signal sequence may be chemically synthesized using methods known in the art.

[0493] Any mode of administration of any of the above-described polynucleotides constructs can be used so long as the mode results in the expression of one or more molecules in an amount sufficient to provide a therapeutic effect. This includes direct needle injection, systemic injection, catheter infusion, biolistic injectors, particle accelerators (i.e., “gene guns”), gelfoam sponge depots, other commercially available depot materials, osmotic pumps (e.g., Alza ninipumps), oral or suppositorial solid (tablet or pill) pharmaceutical formulations, and decanting or topical applications during surgery. For example, direct injection of naked calcium phosphate-precipitated plasmid into rat liver and rat spleen or a protein-coated plasmid into the portal vein has resulted in gene expression of the foreign gene in the rat livers (Kaneda et al., Science 243:375 (1989)).

[0494] A preferred method of local administration is by direct injection. Preferably, a recombinant molecule of the present invention complexed with a delivery vehicle is administered by direct injection into or locally within the area of arteries. Administration of a composition locally within the area of arteries refers to injecting the composition centimeters and preferably, millimeters within arteries.

[0495] Another method of local administration is to contact a polynucleotide construct of the present invention in or around a surgical wound. For example, a patient can undergo surgery and the polynucleotide construct can be coated on the surface of tissue inside the wound or the construct can be injected into areas of tissue inside the wound.

[0496] Therapeutic compositions useful in systemic administration, include recombinant molecules of the present invention complexed to a targeted delivery vehicle of the present invention. Suitable delivery vehicles for use with systemic administration comprise liposomes comprising ligands for targeting the vehicle to a particular site. In specific embodiments, suitable delivery vehicles for use with systemic administration comprise liposomes comprising polypeptides of the invention for targeting the vehicle to a particular site.

[0497] Preferred methods of systemic administration, include intravenous injection, aerosol, oral and percutaneous (topical) delivery. Intravenous injections can be performed using methods standard in the art. Aerosol delivery can also be performed using methods standard in the art (see, for example, Stribling et al., Proc. Natl. Acad. Sci. USA 189:11277-11281, 1992, which is incorporated herein by reference). Oral delivery can be performed by complexing a polynucleotide construct of the present invention to a carrier capable of withstanding degradation by digestive enzymes in the gut of an animal. Examples of such carriers, include plastic capsules or tablets, such as those known in the art. Topical delivery can be performed by mixing a polynucleotide construct of the present invention with a lipophilic reagent (e.g., DMSO) that is capable of passing into the skin.

[0498] Determining an effective amount of substance to be delivered can depend upon a number of factors including, for example, the chemical structure and biological activity of the substance, the age and weight of the animal, the precise condition requiring treatment and its severity, and the route of administration. The frequency of treatments depends upon a number of factors, such as the amount of polynucleotide constructs administered per dose, as well as the health and history of the subject. The precise amount, number of doses, and timing of doses will be determined by the attending physician or veterinarian.

[0499] Therapeutic compositions of the present invention can be administered to any animal, preferably to mammals and birds. Preferred mammals include humans, dogs, cats, mice, rats, rabbits sheep, cattle, horses and pigs, with humans being particularly preferred.

Biological Activities

[0500] Polynucleotides or polypeptides, or agonists or antagonists of the present invention, can be used in assays to test for one or more biological activities. If these polynucleotides or polypeptides, or agonists or antagonists of the present invention, do exhibit activity in a particular assay, it is likely that these molecules may be involved in the diseases associated with the biological activity. Thus, the polynucleotides and polypeptides, and agonists or antagonists could be used to treat the associated disease.

[0501] Members of the secreted family of proteins are believed to be involved in biological activities associated with, for example, cellular signaling. Accordingly, compositions of the invention (including polynucleotides, polypeptides and antibodies of the invention, and fragments and variants thereof) may be used in diagnosis, prognosis, prevention and/or treatment of diseases and/or disorders associated with aberrant activity of secreted polypeptides.

[0502] In preferred embodiments, compositions of the invention (including polynucleotides, polypeptides and antibodies of the invention, and fragments and variants thereof) may be used in the diagnosis, prognosis, prevention, treatment, and/or amelioration of diseases and/or disorders relating to the hematopoietic system (e.g., blood coagulation disorders (e.g., hemophilia); blood clotting disorders (e.g., thromboembolism, and pulmonary embolism); fibrinolysis disorders; complement activation disorders (e.g., complement component deficiencies); hematopoietic disorders (e.g., X-linked agammaglobulinemia, anemia); or immune system disorders (e.g., autoimmunity and immunodeficiencies)); and/or as described under “Immune Activity”, “Cardiovascular Disorders”, and “Blood-Related Disorders” below, and neoplastic disorders (e.g., cell migration, prohormone activation, extracellular matrix turnover), and/or as described under “Immune Activity” and “Hyperproliferative Disorders” below.

[0503] In certain embodiments, a polypeptide of the invention, or polynucleotides, antibodies, agonists, or antagonists corresponding to that polypeptide, may be used to diagnose and/or prognosticate diseases and/or disorders associated with the tissue(s) in which the polypeptide of the invention is expressed including one, two, three, four, five, or more tissues disclosed in Table 1B.2, column 5 (Tissue Distribution Library Code).

[0504] Thus, polynucleotides, translation products and antibodies of the invention are useful in the diagnosis, detection, prevention, prognistication, and/or treatment of diseases and/or disorders associated with activities that include, but are not limited to, prohormone activation, neurotransmitter activity, cellular signaling, cellular proliferation, cellular differentiation, and cell migration.

[0505] More generally, polynucleotides, translation products and antibodies corresponding to this gene may be useful for the diagnosis, prognosis, prevention, treatment and/or amelioration of diseases and/or disorders associated with the following system or systems.

Immune Activity

[0506] Polynucleotides, polypeptides, antibodies, and/or agonists or antagonists of the present invention may be useful in preventing, diagnosing, prognosticating, treating, and/or ameliorating diseases, disorders, and/or conditions of the immune system, by, for example, activating or inhibiting the proliferation, differentiation, or mobilization (chemotaxis) of immune cells. Immune cells develop through a process called hematopoiesis, producing myeloid (platelets, red blood cells, neutrophils, and macrophages) and lymphoid (B and T lymphocytes) cells from pluripotent stem cells. The etiology of these immune diseases, disorders, and/or conditions may be genetic, somatic, such as cancer and some autoimmune diseases, acquired (e.g., by chemotherapy or toxins), or infectious. Moreover, polynucleotides, polypeptides, antibodies, and/or agonists or antagonists of the present invention can be used as a marker or detector of a particular immune system disease or disorder.

[0507] In another embodiment, a polypeptide of the invention, or polynucleotides, antibodies, agonists, or antagonists corresponding to that polypeptide, may be used to treat diseases and disorders of the immune system and/or to inhibit or enhance an immune response generated by cells associated with the tissue(s) in which the polypeptide of the invention is expressed, including one, two, three, four, five, or more tissues disclosed in Table 1B.2, column 5 (Tissue Distribution Library Code).

[0508] Polynucleotides, polypeptides, antibodies, and/or agonists or antagonists of the present invention may be useful in preventing, diagnosing, prognosticating, treating and/or ameliorating immunodeficiencies, including both congenital and acquired immunodeficiencies. Examples of B cell immunodeficiencies in which immunoglobulin levels B cell function and/or B cell numbers are decreased include: X-linked agammaglobulinemia (Bruton's disease), X-linked infantile agammaglobulinemia, X-linked immunodeficiency with hyper IgM, non X-linked immunodeficiency with hyper IgM, X-linked lymphoproliferative syndrome (XLP), agammaglobulinemia including congenital and acquired agammaglobulinemia, adult onset agammaglobulinemia, late-onset agammaglobulinemia, dysgammaglobulinemia, hypogammaglobulinemia, unspecified hypogammaglobulinemia, recessive agammaglobulinemia (Swiss type), Selective IgM deficiency, selective IgA deficiency, selective IgG subclass deficiencies, IgG subclass deficiency (with or without IgA deficiency), Ig deficiency with increased IgM, IgG and IgA deficiency with increased IgM, antibody deficiency with normal or elevated Igs, Ig heavy chain deletions, kappa chain deficiency, B cell lymphoproliferative disorder (BLPD), common variable immunodeficiency (CVID), common variable immunodeficiency (CVI) (acquired), and transient hypogammaglobulinemia of infancy.

[0509] In specific embodiments, ataxia-telangiectasia or conditions associated with ataxia-telangiectasia are detected, prevented, diagnosed, prognosticated, treated, and/or ameliorated using the polypeptides or polynucleotides of the invention, and/or agonists or antagonists thereof.

[0510] Examples of congenital immunodeficiencies in which T cell and/or B cell function and/or number is decreased include, but are not limited to: DiGeorge anomaly, severe combined immunodeficiencies (SCID) (including, but not limited to, X-linked SCID, autosomal recessive SCID, adenosine deaminase deficiency, purine nucleoside phosphorylase (PNP) deficiency, Class II MHC deficiency (Bare lymphocyte syndrome), Wiskott-Aldrich syndrome, and ataxia telangiectasia), thymic hypoplasia, third and fourth pharyngeal pouch syndrome, 22q11.2 deletion, chronic mucocutaneous candidiasis, natural killer cell deficiency (NK), idiopathic CD4+ T-lymphocytopenia, immunodeficiency with predominant T cell defect (unspecified), and unspecified immunodeficiency of cell mediated immunity.

[0511] In specific embodiments, DiGeorge anomaly or conditions associated with DiGeorge anomaly are prevented, detected, diagnosed, prognosticated, treated and/or ameliorated using polypeptides or polynucleotides of the invention, or antagonists or agonists thereof.

[0512] Other immunodeficiencies that may be prevented, detected, diagnosed, prognosticated, treated and/or ameliorated using polypeptides or polynucleotides of the invention, and/or agonists or antagonists thereof, include, but are not limited to, chronic granulomatous disease, Chédiak-Higashi syndrome, myeloperoxidase deficiency, leukocyte glucose-6-phosphate dehydrogenase deficiency, X-linked lymphoproliferative syndrome (XLP), leukocyte adhesion deficiency, complement component deficiencies (including C1, C2, C3, C4, C5, C6, C7, C8 and/or C9 deficiencies), reticular dysgenesis, thymic alymphoplasia-aplasia, immunodeficiency with thymoma, severe congenital leukopenia, dysplasia with immunodeficiency, neonatal neutropenia, short limbed dwarfism, and Nezelof syndrome-combined immunodeficiency with Igs.

[0513] In a preferred embodiment, the immunodeficiencies and/or conditions associated with the immunodeficiencies recited above are prevented, detected, diagnosed, prognosticated, treated and/or ameliorated using polynucleotides, polypeptides, antibodies, and/or agonists or antagonists of the present invention.

[0514] In a preferred embodiment polynucleotides, polypeptides, antibodies, and/or agonists or antagonists of the present invention could be used as an agent to boost immunoresponsiveness among immunodeficient individuals. In specific embodiments, polynucleotides, polypeptides, antibodies, and/or agonists or antagonists of the present invention could be used as an agent to boost immunoresponsiveness among B cell and/or T cell immunodeficient individuals.

[0515] The polynucleotides, polypeptides, antibodies, and/or agonists or antagonists of the present invention may be useful in preventing, detecting, diagnosing, prognosticating, treating and/or ameliorating autoimmune disorders. Many autoimmune disorders result from inappropriate recognition of self as foreign material by immune cells. This inappropriate recognition results in an immune response leading to the destruction of the host tissue. Therefore, the administration of polynucleotides and polypeptides of the invention that can inhibit an immune response, particularly the proliferation, differentiation, or chemotaxis of T-cells, may be an effective therapy in preventing autoimmune disorders.

[0516] Autoimmune diseases or disorders that may be prevented, detected, diagnosed, prognosticated, treated, and/or ameliorated by polynucleotides, polypeptides, antibodies, and/or agonists or antagonists of the present invention include, but are not limited to, one or more of the following: systemic lupus erythematosus, rheumatoid arthritis, ankylosing spondylitis, multiple sclerosis, autoimmune thyroiditis, Hashimoto's thyroiditis, autoimmune hemolytic anemia, hemolytic anemia, thrombocytopenia, autoimmune thrombocytopenia purpura, autoimmune neonatal thrombocytopenia, idiopathic thrombocytopenia purpura, purpura (e.g., Henloch-Scoenlein purpura), autoimmunocytopenia, Goodpasture's syndrome, Pemphigus vulgaris, myasthenia gravis, Grave's disease (hyperthyroidism), and insulin-resistant diabetes mellitus.

[0517] Additional disorders that are likely to have an autoimmune component that may be prevented, detected, diagnosed, prognosticated, treated and/or ameliorated with the compositions of the invention include, but are not limited to, type II collagen-induced arthritis, antiphospholipid syndrome, dermatitis, allergic encephalomyelitis, myocarditis, relapsing polychondritis, rheumatic heart disease, neuritis, uveitis ophthalmia, polyendocrinopathies, Reiter's Disease, Stiff-Man Syndrome, autoimmune pulmonary inflammation, autism, Guillain-Barre Syndrome, insulin dependent diabetes mellitus, and autoimmune inflammatory eye disorders.

[0518] Additional disorders that are likely to have an autoimmune component that may be prevented, detected, diagnosed, prognosticated, treated and/or ameliorated with the compositions of the invention include, but are not limited to, scleroderma with anti-collagen antibodies (often characterized, e.g., by nucleolar and other nuclear antibodies), mixed connective tissue disease (often characterized, e.g., by antibodies to extractable nuclear antigens (e.g., ribonucleoprotein)), polymyositis (often characterized, e.g., by nonhistone ANA), pernicious anemia (often characterized, e.g., by antiparietal cell, microsomes, and intrinsic factor antibodies), idiopathic Addison's disease (often characterized, e.g., by humoral and cell-mediated adrenal cytotoxicity, infertility (often characterized, e.g., by antispermatozoal antibodies), glomerulonephritis (often characterized, e.g., by glomerular basement membrane antibodies or immune complexes), bullous pemphigoid (often characterized, e.g., by IgG and complement in basement membrane), Sjogren's syndrome (often characterized, e.g., by multiple tissue antibodies, and/or a specific nonhistone ANA (SS-B)), diabetes mellitus (often characterized, e.g., by cell-mediated and humoral islet cell antibodies), and adrenergic drug resistance (including adrenergic drug resistance with asthma or cystic fibrosis) (often characterized, e.g., by beta-adrenergic receptor antibodies).

[0519] Additional disorders that may have an autoimmune component that may be prevented, detected, diagnosed, prognosticated, treated and/or ameliorated with the compositions of the invention include, but are not limited to, chronic active hepatitis (often characterized, e.g., by smooth muscle antibodies), primary biliary cirrhosis (often characterized, e.g., by mitochondria antibodies), other endocrine gland failure (often characterized, e.g., by specific tissue antibodies in some cases), vitiligo (often characterized, e.g., by melanocyte antibodies), vasculitis (often characterized, e.g., by Ig and complement in vessel walls and/or low serum complement), post-MI (often characterized, e.g., by myocardial antibodies), cardiotomy syndrome (often characterized, e.g., by myocardial antibodies), urticaria (often characterized, e.g., by IgG and IgM antibodies to IgE), atopic dermatitis (often characterized, e.g., by IgG and IgM antibodies to IgE), asthma (often characterized, e.g., by IgG and IgM antibodies to IgE), and many other inflammatory, granulomatous, degenerative, and atrophic disorders.

[0520] In a preferred embodiment, the autoimmune diseases and disorders and/or conditions associated with the diseases and disorders recited above are prevented, detected, diagnosed, prognosticated, treated and/or ameliorated using for example, antagonists or agonists, polypeptides or polynucleotides, or antibodies of the present invention. In a specific preferred embodiment, rheumatoid arthritis is prevented, detected, diagnosed, prognosticated, treated and/or ameliorated using polynucleotides, polypeptides, antibodies, and/or agonists or antagonists of the present invention.

[0521] In another specific preferred embodiment, systemic lupus erythematosus is prevented, detected, diagnosed, prognosticated, treated and/or ameliorated using polynucleotides, polypeptides, antibodies, and/or agonists or antagonists of the present invention. In another specific preferred embodiment, idiopathic thrombocytopenia purpura is prevented, detected, diagnosed, prognosticated, treated and/or ameliorated using polynucleotides, polypeptides, antibodies, and/or agonists or antagonists of the present invention.

[0522] In another specific preferred embodiment IgA nephropathy is prevented, detected, diagnosed, prognosticated, treated and/or ameliorated using polynucleotides, polypeptides, antibodies, and/or agonists or antagonists of the present invention.

[0523] In a preferred embodiment, the autoimmune diseases and disorders and/or conditions associated with the diseases and disorders recited above are prevented, detected, diagnosed, prognosticated, treated and/or ameliorated using polynucleotides, polypeptides, antibodies, and/or agonists or antagonists of the present invention.

[0524] In preferred embodiments, polypeptides, antibodies, polynucleotides and/or agonists or antagonists of the present invention are used as a immunosuppressive agent(s).

[0525] Polynucleotides, polypeptides, antibodies, and/or agonists or antagonists of the present invention may be useful in detecting, preventing, diagnosing, prognosticating, treating, and/or ameliorating diseases, disorders, and/or conditions of hematopoietic cells. Polynucleotides, polypeptides, antibodies, and/or agonists or antagonists of the present invention could be used to increase differentiation and proliferation of hematopoietic cells, including the pluripotent stem cells, in an effort to treat or prevent those diseases, disorders, and/or conditions associated with a decrease in certain (or many) types hematopoietic cells, including but not limited to, leukopenia, neutropenia, anemia, and thrombocytopenia. Alternatively, Polynucleotides, polypeptides, antibodies, and/or agonists or antagonists of the present invention could be used to increase differentiation and proliferation of hematopoietic cells, including the pluripotent stem cells, in an effort to treat or prevent those diseases, disorders, and/or conditions associated with an increase in certain (or many) types of hematopoietic cells, including but not limited to, histiocytosis.

[0526] Allergic reactions and conditions, such as asthma (particularly allergic asthma) or other respiratory problems, may also be detected, prevented, diagnosed, prognosticated, treated, and/or ameliorated using polypeptides, antibodies, or polynucleotides of the invention, and/or agonists or antagonists thereof. Moreover, these molecules can be used to treat, prevent, prognose, and/or diagnose anaphylaxis, hypersensitivity to an antigenic molecule, or blood group incompatibility.

[0527] Additionally, polypeptides or polynucleotides of the invention, and/or agonists or antagonists thereof, may be used to detect, prevent, diagnose, prognosticate, treat, and/or ameliorate IgE-mediated allergic reactions. Such allergic reactions include, but are not limited to, asthma, rhinitis, and eczema. In specific embodiments, polynucleotides, polypeptides, antibodies, and/or agonists or antagonists of the present invention may be used to modulate IgE concentrations in vitro or in vivo.

[0528] Moreover, polynucleotides, polypeptides, antibodies, and/or agonists or antagonists of the present invention have uses in the detection, prevention, diagnosis, prognostication, treatment, and/or amelioration of inflammatory conditions. For example, since polypeptides, antibodies, or polynucleotides of the invention, and/or agonists or antagonists of the invention may inhibit the activation, proliferation and/or differentiation of cells involved in an inflammatory response, these molecules can be used to prevent and/or treat chronic and acute inflammatory conditions. Such inflammatory conditions include, but are not limited to, for example, inflammation associated with infection (e.g., septic shock, sepsis, or systemic inflammatory response syndrome), ischemia-reperfusion injury, endotoxin lethality, complement-mediated hyperacute rejection, nephritis, cytokine or chemokine induced lung injury, inflammatory bowel disease, Crohn's disease, over production of cytokines (e.g., TNF or IL-1.), respiratory disorders (e.g., asthma and allergy); gastrointestinal disorders (e.g., inflammatory bowel disease); cancers (e.g., gastric, ovarian, lung, bladder, liver, and breast); CNS disorders (e.g., multiple sclerosis; ischemic brain injury and/or stroke, traumatic brain injury, neurodegenerative disorders (e.g., Parkinson's disease and Alzheimer's disease); AIDS-related dementia; and prion disease); cardiovascular disorders (e.g., atherosclerosis, myocarditis, cardiovascular disease, and cardiopulmonary bypass complications); as well as many additional diseases, conditions, and disorders that are characterized by inflammation (e.g., hepatitis, rheumatoid arthritis, gout, trauma, pancreatitis, sarcoidosis, dermatitis, renal ischemia-reperfusion injury, Grave's disease, systemic lupus erythematosus, diabetes mellitus, and allogenic transplant rejection).

[0529] Because inflammation is a fundamental defense mechanism, inflammatory disorders can effect virtually any tissue of the body. Accordingly, polynucleotides, polypeptides, and antibodies of the invention, as well as agonists or antagonists thereof, have uses in the treatment of tissue-specific inflammatory disorders, including, but not limited to, adrenalitis, alveolitis, angiocholecystitis, appendicitis, balanitis, blepharitis, bronchitis, bursitis, carditis, cellulitis, cervicitis, cholecystitis, chorditis, cochlitis, colitis, conjunctivitis, cystitis, dermatitis, diverticulitis, encephalitis, endocarditis, esophagitis, eustachitis, fibrositis, folliculitis, gastritis, gastroenteritis, gingivitis, glossitis, hepatosplenitis, keratitis, labyrinthitis, laryngitis, lymphangitis, mastitis, media otitis, meningitis, metritis, mucitis, myocarditis, myosititis, myringitis, nephritis, neuritis, orchitis, osteochondritis, otitis, pericarditis, peritendonitis, peritonitis, pharyngitis, phlebitis, poliomyelitis, prostatitis, pulpitis, retinitis, rhinitis, salpingitis, scleritis, sclerochoroiditis, scrotitis, sinusitis, spondylitis, steatitis, stomatitis, synovitis, syringitis, tendonitis, tonsillitis, urethritis, and vaginitis.

[0530] In specific embodiments, polypeptides, antibodies, or polynucleotides of the invention, and/or agonists or antagonists thereof, are useful to detect, prevent, diagnose, prognosticate, treat, and/or ameliorate organ transplant rejections and graft-versus-host disease. Organ rejection occurs by host immune cell destruction of the transplanted tissue through an immune response. Similarly, an immune response is also involved in GVHD, but, in this case, the foreign transplanted immune cells destroy the host tissues. Polypeptides, antibodies, or polynucleotides of the invention, and/or agonists or antagonists thereof, that inhibit an immune response, particularly the activation, proliferation, differentiation, or chemotaxis of T-cells, may be an effective therapy in preventing organ rejection or GVHD. In specific embodiments, polypeptides, antibodies, or polynucleotides of the invention, and/or agonists or antagonists thereof, that inhibit an immune response, particularly the activation, proliferation, differentiation, or chemotaxis of T-cells, may be an effective therapy in preventing experimental allergic and hyperacute xenograft rejection.

[0531] In other embodiments, polypeptides, antibodies, or polynucleotides of the invention, and/or agonists or antagonists thereof, are useful to detect, prevent, diagnose, prognosticate, treat, and/or ameliorate immune complex diseases, including, but not limited to, serum sickness, post streptococcal glomeralonephritis, polyarteritis nodosa, and immune complex-induced vasculitis.

[0532] Polypeptides, antibodies, polynucleotides and/or agonists or antagonists of the invention can be used to treat, detect, and/or prevent infectious agents. For example, by increasing the immune response, particularly increasing the proliferation activation and/or differentiation of B and/or T cells, infectious diseases may be treated, detected, and/or prevented. The immune response may be increased by either enhancing an existing immune response, or by initiating a new immune response. Alternatively, polynucleotides, polypeptides, antibodies, and/or agonists or antagonists of the present invention may also directly inhibit the infectious agent (refer to section of application listing infectious agents, etc), without necessarily eliciting an immune response.

[0533] In another embodiment, polypeptides, antibodies, polynucleotides and/or agonists or antagonists of the present invention are used as a vaccine adjuvant that enhances immune responsiveness to an antigen. In a specific embodiment, polypeptides, antibodies, polynucleotides and/or agonists or antagonists of the present invention are used as an adjuvant to enhance tumor-specific immune responses.

[0534] In another specific embodiment, polypeptides, antibodies, polynucleotides and/or agonists or antagonists of the present invention are used as an adjuvant to enhance anti-viral immune responses. Anti-viral immune responses that may be enhanced using the compositions of the invention as an adjuvant, include virus and virus associated diseases or symptoms described herein or otherwise known in the art. In specific embodiments, the compositions of the invention are used as an adjuvant to enhance an immune response to a virus, disease, or symptom selected from the group consisting of: AIDS, meningitis, Dengue, EBV, and hepatitis (e.g., hepatitis B). In another specific embodiment, the compositions of the invention are used as an adjuvant to enhance an immune response to a virus, disease, or symptom selected from the group consisting of: HIV/AIDS, respiratory syncytial virus, Dengue, rotavirus, Japanese B encephalitis, influenza A and B, parainfluenza, measles, cytomegalovirus, rabies, Junin, Chikungunya, Rift Valley Fever, herpes simplex, and yellow fever.

[0535] In another specific embodiment, polypeptides, antibodies, polynucleotides and/or agonists or antagonists of the present invention are used as an adjuvant to enhance anti-bacterial or anti-fungal immune responses. Anti-bacterial or anti-fungal immune responses that may be enhanced using the compositions of the invention as an adjuvant, include bacteria or fungus and bacteria or fungus associated diseases or symptoms described herein or otherwise known in the art. In specific embodiments, the compositions of the invention are used as an adjuvant to enhance an immune response to a bacteria or fungus, disease, or symptom selected from the group consisting of: tetanus, Diphtheria, botulism, and meningitis type B.

[0536] In another specific embodiment, the compositions of the invention are used as an adjuvant to enhance an immune response to a bacteria or fungus, disease, or symptom selected from the group consisting of: Vibrio cholerae, Mycobacterium leprae, Salmonella typhi, Salmonella paratyphi, Meisseria meningitidis, Streptococcus pneumoniae, Group B streptococcus, Shigella spp., Enterotoxigenic Escherichia coli, Enterohemorrhagic E. coli, and Borrelia burgdorferi.

[0537] In another specific embodiment, polypeptides, antibodies, polynucleotides and/or agonists or antagonists of the present invention are used as an adjuvant to enhance anti-parasitic immune responses. Anti-parasitic immune responses that may be enhanced using the compositions of the invention as an adjuvant, include parasite and parasite associated diseases or symptoms described herein or otherwise known in the art. In specific embodiments, the compositions of the invention are used as an adjuvant to enhance an immune response to a parasite. In another specific embodiment, the compositions of the invention are used as an adjuvant to enhance an immune response to Plasmodium (malaria) or Leishmania.

[0538] In another specific embodiment, polypeptides, antibodies, polynucleotides and/or agonists or antagonists of the present invention may also be employed to treat infectious diseases including silicosis, sarcoidosis, and idiopathic pulmonary fibrosis; for example, by preventing the recruitment and activation of mononuclear phagocytes.

[0539] In another specific embodiment, polypeptides, antibodies, polynucleotides and/or agonists or antagonists of the present invention are used as an antigen for the generation of antibodies to inhibit or enhance immune mediated responses against polypeptides of the invention.

[0540] In one embodiment, polypeptides, antibodies, polynucleotides and/or agonists or antagonists of the present invention are administered to an animal (e.g., mouse, rat, rabbit, hamster, guinea pig, pigs, micro-pig, chicken, camel, goat, horse, cow, sheep, dog, cat, non-human primate, and human, most preferably human) to boost the immune system to produce increased quantities of one or more antibodies (e.g., IgG, IgA, IgM, and IgE), to induce higher affinity antibody production and immunoglobulin class switching (e.g., IgG, IgA, IgM, and IgE), and/or to increase an immune response.

[0541] In another specific embodiment, polypeptides, antibodies, polynucleotides and/or agonists or antagonists of the present invention are used as a stimulator of B cell responsiveness to pathogens.

[0542] In another specific embodiment, polypeptides, antibodies, polynucleotides and/or agonists or antagonists of the present invention are used as an activator of T cells.

[0543] In another specific embodiment, polypeptides, antibodies, polynucleotides and/or agonists or antagonists of the present invention are used as an agent that elevates the immune status of an individual prior to their receipt of immunosuppressive therapies.

[0544] In another specific embodiment, polypeptides, antibodies, polynucleotides and/or agonists or antagonists of the present invention are used as an agent to induce higher affinity antibodies.

[0545] In another specific embodiment, polypeptides, antibodies, polynucleotides and/or agonists or antagonists of the present invention are used as an agent to increase serum immunoglobulin concentrations.

[0546] In another specific embodiment, polypeptides, antibodies, polynucleotides and/or agonists or antagonists of the present invention are used as an agent to accelerate recovery of immunocompromised individuals.

[0547] In another specific embodiment, polypeptides, antibodies, polynucleotides and/or agonists or antagonists of the present invention are used as an agent to boost immunoresponsiveness among aged populations and/or neonates.

[0548] In another specific embodiment, polypeptides, antibodies, polynucleotides and/or agonists or antagonists of the present invention are used as an immune system enhancer prior to, during, or after bone marrow transplant and/or other transplants (e.g., allogeneic or xenogeneic organ transplantation). With respect to transplantation, compositions of the invention may be administered prior to, concomitant with, and/or after transplantation. In a specific embodiment, compositions of the invention are administered after transplantation, prior to the beginning of recovery of T-cell populations. In another specific embodiment, compositions of the invention are first administered after transplantation after the beginning of recovery of T cell populations, but prior to full recovery of B cell populations.

[0549] In another specific embodiment, polypeptides, antibodies, polynucleotides and/or agonists or antagonists of the present invention are used as an agent to boost immunoresponsiveness among individuals having an acquired loss of B cell function. Conditions resulting in an acquired loss of B cell function that may be ameliorated or treated by administering the polypeptides, antibodies, polynucleotides and/or agonists or antagonists thereof, include, but are not limited to, HIV Infection, AIDS, bone marrow transplant, and B cell chronic lymphocytic leukemia (CLL).

[0550] In another specific embodiment, polypeptides, antibodies, polynucleotides and/or agonists or antagonists of the present invention are used as an agent to boost immunoresponsiveness among individuals having a temporary immune deficiency. Conditions resulting in a temporary immune deficiency that may be ameliorated or treated by administering the polypeptides, antibodies, polynucleotides and/or agonists or antagonists thereof, include, but are not limited to, recovery from viral infections (e.g., influenza), conditions associated with malnutrition, recovery from infectious mononucleosis, or conditions associated with stress, recovery from measles, recovery from blood transfusion, and recovery from surgery.

[0551] In another specific embodiment, polypeptides, antibodies, polynucleotides and/or agonists or antagonists of the present invention are used as a regulator of antigen presentation by monocytes, dendritic cells, and/or Bells. In one embodiment, polynucleotides, polypeptides, antibodies, and/or agonists or antagonists of the present invention enhance antigen presentation or antagonizes antigen presentation in vitro or in vivo. Moreover, in related embodiments, said enhancement or antagonism of antigen presentation may be useful as an anti-tumor treatment or to modulate the immune system.

[0552] In another specific embodiment, polypeptides, antibodies, polynucleotides and/or agonists or antagonists of the present invention are used as an agent to direct an individual's immune system towards development of a humoral response (i.e. TH2) as opposed to a TH1 cellular response.

[0553] In another specific embodiment, polypeptides, antibodies, polynucleotides and/or agonists or antagonists of the present invention are used as a means to induce tumor proliferation and thus make it more susceptible to anti-neoplastic agents. For example, multiple myeloma is a slowly dividing disease and is thus refractory to virtually all anti-neoplastic regimens. If these cells were forced to proliferate more rapidly their susceptibility profile would likely change.

[0554] In another specific embodiment, polypeptides, antibodies, polynucleotides and/or agonists or antagonists of the present invention are used as a stimulator of B cell production in pathologies such as AIDS, chronic lymphocyte disorder and/or Common Variable Immunodificiency.

[0555] In another specific embodiment, polypeptides, antibodies, polynucleotides and/or agonists or antagonists of the present invention are used as a therapy for generation and/or regeneration of lymphoid tissues following surgery, trauma or genetic defect In another specific embodiment, polypeptides, antibodies, polynucleotides and/or agonists or antagonists of the present invention are used in the pretreatment of bone marrow samples prior to transplant.

[0556] In another specific embodiment, polypeptides, antibodies, polynucleotides and/or agonists or antagonists of the present invention are used as a gene-based therapy for genetically inherited disorders resulting in immuno-incompetence/immunodeficiency such as observed among SCID patients.

[0557] In another specific embodiment, polypeptides, antibodies, polynucleotides and/or agonists or antagonists of the present invention are used as a means of activating monocytes/macrophages to defend against parasitic diseases that effect monocytes such as Leishmania

[0558] In another specific embodiment, polypeptides, antibodies, polynucleotides and/or agonists or antagonists of the present invention are used as a means of regulating secreted cytokines that are elicited by polypeptides of the invention.

[0559] In another embodiment, polypeptides, antibodies, polynucleotides and/or agonists or antagonists of the present invention are used in one or more of the applications decribed herein, as they may apply to veterinary medicine.

[0560] In another specific embodiment, polypeptides, antibodies, polynucleotides and/or agonists or antagonists of the present invention are used as a means of blocking various aspects of immune responses to foreign agents or self. Examples of diseases or conditions in which blocking of certain aspects of immune responses may be desired include autoimmune disorders such as lupus, and arthritis, as well as immunoresponsiveness to skin allergies, inflammation, bowel disease, injury and diseases/disorders associated with pathogens.

[0561] In another specific embodiment, polypeptides, antibodies, polynucleotides and/or agonists or antagonists of the present invention are used as a therapy for preventing the B cell proliferation and Ig secretion associated with autoimmune diseases such as idiopathic thrombocytopenic purpura, systemic lupus erythematosus and multiple sclerosis.

[0562] In another specific embodiment, polypeptides, antibodies, polynucleotides and/or agonists or antagonists of the present invention are used as a inhibitor of B and/or T cell migration in endothelial cells. This activity disrupts tissue architecture or cognate responses and is useful, for example in disrupting immune responses, and blocking sepsis.

[0563] In another specific embodiment, polypeptides, antibodies, polynucleotides and/or agonists or antagonists of the present invention are used as a therapy for chronic hypergammaglobulinemia evident in such diseases as monoclonal gammopathy of undetermined significance (MGUS), Waldenstrom's disease, related idiopathic monoclonal gammopathies, and plasmacytomas.

[0564] In another specific embodiment, polypeptides, antibodies, polynucleotides and/or agonists or antagonists of the present invention may be employed for instance to inhibit polypeptide chemotaxis and activation of macrophages and their precursors, and of neutrophils, basophils, B lymphocytes and some T-cell subsets, e.g., activated and CD8 cytotoxic T cells and natural killer cells, in certain autoimmune and chronic inflammatory and infective diseases. Examples of autoimmune diseases are described herein and include multiple sclerosis, and insulin-dependent diabetes.

[0565] The polypeptides, antibodies, polynucleotides and/or agonists or antagonists of the present invention may also be employed to treat idiopathic hyper-eosinophilic syndrome by, for example, preventing eosinophil production and migration.

[0566] In another specific embodiment, polypeptides, antibodies, polynucleotides and/or agonists or antagonists of the present invention are used to enhance or inhibit complement mediated cell lysis.

[0567] In another specific embodiment, polypeptides, antibodies, polynucleotides and/or agonists or antagonists of the present invention are used to enhance or inhibit antibody dependent cellular cytotoxicity.

[0568] In another specific embodiment, polypeptides, antibodies, polynucleotides and/or agonists or antagonists of the present invention may also be employed for treating atherosclerosis, for example, by preventing monocyte infiltration in the artery wall.

[0569] In another specific embodiment, polypeptides, antibodies, polynucleotides and/or agonists or antagonists of the present invention may be employed to treat adult respiratory distress syndrome (ARDS).

[0570] In another specific embodiment, polypeptides, antibodies, polynucleotides and/or agonists or antagonists of the present invention may be useful for stimulating wound and tissue repair, stimulating angiogenesis, and/or stimulating the repair of vascular or lymphatic diseases or disorders. Additionally, agonists and antagonists of the invention may be used to stimulate the regeneration of mucosal surfaces.

[0571] In a specific embodiment, polynucleotides or polypeptides, and/or agonists thereof are used to detect, prevent, diagnose, prognosticate, treat, and/or ameliorate a disorder characterized by primary or acquired immunodeficiency, deficient serum immunoglobulin production, recurrent infections, and/or immune system dysfunction. Moreover, polynucleotides or polypeptides, and/or agonists thereof may be used to treat or prevent infections of the joints, bones, skin, and/or parotid glands, blood-borne infections (e.g., sepsis, meningitis, septic arthritis, and/or osteomyelitis), autoimmune diseases (e.g., those disclosed herein), inflammatory disorders, and malignancies, and/or any disease or disorder or condition associated with these infections, diseases, disorders and/or malignancies) including, but not limited to, CVID, other primary immune deficiencies, HIV disease, CLL, recurrent bronchitis, sinusitis, otitis media, conjunctivitis, pneumonia, hepatitis, meningitis, herpes zoster (e.g., severe herpes zoster), and/or pneumocystis carnii. Other diseases and disorders that may be detected, prevented, diagnosed, prognosticated, treated, and/or ameliorated with polynucleotides or polypeptides, and/or agonists of the present invention include, but are not limited to, H[V infection, HTLV-BLV infection, lymphopenia, phagocyte bactericidal dysfunction anemia, thrombocytopenia, and hemoglobinuria.

[0572] In another embodiment, polynucleotides, polypeptides, antibodies, and/or agonists or antagonists of the present invention are used to treat, and/or diagnose an individual having common variable immunodeficiency disease (“CVID”; also known as “acquired agammaglobulinemia” and “acquired hypogarnmaglobulinemia”) or a subset of this disease.

[0573] In a specific embodiment, polynucleotides, polypeptides, antibodies, and/or agonists or antagonists of the present invention may be used to detect, prevent, diagnose, prognosticate, treat, and/or ameliorate cancers or neoplasms including immune cell or immune tissue-related cancers or neoplasms. Examples of cancers or neoplasms that may be detected, prevented, diagnosed, prognosticated, treated, and/or ameliorated by polynucleotides, polypeptides, antibodies, and/or agonists or antagonists of the present invention include, but are not limited to, acute myelogenous leukemia, chronic myelogenous leukemia, Hodgkin's disease, non-Hodgkin's lymphoma, acute lymphocytic anemia (ALL) Chronic lymphocyte leukemia, plasmacytomas, multiple myeloma, Burkitt's lymphoma, EBV-transformed diseases, and/or diseases and disorders described in the section entitled “Hyperproliferative Disorders” elsewhere herein.

[0574] In another specific embodiment, polypeptides, antibodies, polynucleotides and/or agonists or antagonists of the present invention are used as a therapy for decreasing cellular proliferation of Large B-cell Lymphomas.

[0575] In another specific embodiment, polypeptides, antibodies, polynucleotides and/or agonists or antagonists of the present invention are used as a means of decreasing the involvement of B cells and Ig associated with Chronic Myelogenous Leukemia.

[0576] In specific embodiments, the compositions of the invention are used as an agent to boost immunoresponsiveness among B cell immunodeficient individuals, such as, for example, an individual who has undergone a partial or complete splenectomy.

[0577] Antagonists of the invention include, for example, binding and/or inhibitory antibodies, antisense nucleic acids, ribozymes or soluble forms of the polypeptides of the present invention (e.g., Fc fusion protein; see, e.g., Example 9). Agonists of the invention include, for example, binding or stimulatory antibodies, and soluble forms of the polypeptides (e.g., Fc fusion proteins; see, e.g., Example 9). polypeptides, antibodies, polynucleotides and/or agonists or antagonists of the present invention may be employed in a composition with a pharmaceutically acceptable carrier, e.g., as described herein.

[0578] In another embodiment, polypeptides, antibodies, polynucleotides and/or agonists or antagonists of the present invention are administered to an animal (including, but not limited to, those listed above, and also including transgenic animals) incapable of producing functional endogenous antibody molecules or having an otherwise compromised endogenous immune system, but which is capable of producing human immunoglobulin molecules by means of a reconstituted or partially reconstituted immune system from another animal (see, e.g., published PCr Application Nos. WO98/24893, WO/9634096, WO/9633735, and WO/9110741). Administration of polypeptides, antibodies, polynucleotides and/or agonists or antagonists of the present invention to such animals is useful for the generation of monoclonal antibodies against the polypeptides, antibodies, polynucleotides and/or agonists or antagonists of the present invention.

Blood-Related Disorders

[0579] The polynucleotides, polypeptides, antibodies, and/or agonists or antagonists of the present invention may be used to modulate hemostatic (the stopping of bleeding) or thrombolytic (clot dissolving) activity. For example, by increasing hemostatic or thrombolytic activity, polynucleotides or polypeptides, and/or agonists or antagonists of the present invention could be used to treat or prevent blood coagulation diseases, disorders, and/or conditions (e.g., afibrinogenemia, factor deficiencies, hemophilia), blood platelet diseases, disorders, and/or conditions (e.g., thrombocytopenia), or wounds resulting from trauma, surgery, or other causes. Alternatively, polynucleotides, polypeptides, antibodies, and/or agonists or antagonists of the present invention that can decrease hemostatic or thrombolytic activity could be used to inhibit or dissolve clotting. These molecules could be important in the treatment or prevention of heart attacks (infarction), strokes, or scarring.

[0580] In specific embodiments, the polynucleotides, polypeptides, antibodies, and/or agonists or antagonists of the present invention may be used to detect, prevent, diagnose, prognosticate, treat, and/or ameliorate thrombosis, arterial thrombosis, venous thrombosis, thromboembolism, pulmonary embolism, atherosclerosis, myocardial infarction, transient ischemic attack, unstable angina. In specific embodiments, the polynucleotides, polypeptides, antibodies, and/or agonists or antagonists of the present invention may be used for the prevention of occulsion of saphenous grafts, for reducing the risk of periprocedural thrombosis as might accompany angioplasty procedures, for reducing the risk of stroke in patients with atrial fibrillation including nonrheumatic atrial fibrillation, for reducing the risk of embolism associated with mechanical heart valves and or mitral valves disease. Other uses for the polynucleotides, polypeptides, antibodies, and/or agonists or antagonists of the present invention, include, but are not limited to, the prevention of occlusions in extrcorporeal devices (e.g., intravascular canulas, vascular access shunts in hemodialysis patients, hemodialysis machines, and cardiopulmonary bypass machines).

[0581] In another embodiment, a polypeptide of the invention, or polynucleotides, antibodies, agonists, or antagonists corresponding to that polypeptide, may be used to detect, prevent, diagnose, prognosticate, treat, and/or ameliorate diseases and disorders of the blood and/or blood forming organs associated with the tissue(s) in which the polypeptide of the invention is expressed, including one, two, three, four, five, or more tissues disclosed in Table 1B.2, column 5 (Tissue Distribution Library Code).

[0582] The polynucleotides, polypeptides, antibodies, and/or agonists or antagonists of the present invention may be used to modulate hematopoietic activity (the formation of blood cells). For example, the polynucleotides, polypeptides, antibodies, and/or agonists or antagonists of the present invention may be used to increase the quantity of all or subsets of blood cells, such as, for example, erythrocytes, lymphocytes (B or T cells), myeloid cells (e.g., basophils, eosinophils, neutrophils, mast cells, macrophages) and platelets. The ability to decrease the quantity of blood cells or subsets of blood cells may be useful in the detection, prevention, diagnosis, prognostication, treatment, and/or amelioration of anemias and leukopenias described below. Alternatively, the polynucleotides, polypeptides, antibodies, and/or agonists or antagonists of the present invention may be used to decrease the quantity of all or subsets of blood cells, such as, for example, erythrocytes, lymphocytes (B or T cells), myeloid cells (e.g., basophils, eosinophils, neutrophils, mast cells, macrophages) and platelets. The ability to decrease the quantity of blood cells or subsets of blood cells may be useful in the detection, prevention, diagnosis, prognostication, treatment, and/or amelioration of leukocytoses, such as, for example eosinophilia.

[0583] The polynucleotides, polypeptides, antibodies, and/or agonists or antagonists of the present invention may be used to detect, prevent, diagnose, prognosticate, treat, and/or ameliorate blood dyscrasia.

[0584] Anemias are conditions in which the number of red blood cells or amount of hemoglobin (the protein that carries oxygen) in them is below normal. Anemia may be caused by excessive bleeding, decreased red blood cell production, or increased red blood cell destruction (hemolysis). The polynucleotides, polypeptides, antibodies, and/or agonists or antagonists of the present invention may be useful in detecting, preventing, diagnosing, prognosticating, treating, and/or ameliorating anemias. Anemias that may be treated detect, prevented, diagnosed, prognosticated, treated, and/or ameliorated by the polynucleotides, polypeptides, antibodies, and/or agonists or antagonists of the present invention include iron deficiency anemia, hypochromic anemia, microcytic anemia, chlorosis, hereditary siderob; astic anemia, idiopathic acquired sideroblastic anemia, red cell aplasia, megaloblastic anemia (e.g., pernicious anemia, (vitamin B12 deficiency) and folic acid deficiency anemia), aplastic anemia, hemolytic anemias (e.g., autoimmune helolytic anemia, microangiopathic hemolytic anemia, and paroxysmal nocturnal hemoglobinuria). The polynucleotides, polypeptides, antibodies, and/or agonists or antagonists of the present invention may be useful in detecting, preventing, diagnosing, prognosticating, treating, and/or ameliorating anemias associated with diseases including but not limited to, anemias associated with systemic lupus erythematosus, cancers, lymphomas, chronic renal disease, and enlarged spleens. The polynucleotides, polypeptides, antibodies, and/or agonists or antagonists of the present invention may be useful in detecting, preventing, diagnosing, prognosticating, treating, and/or ameliorating anemias arising from drug treatments such as anemias associated with methyldopa, dapsone, and/or sulfadrugs. Additionally, rhe polynucleotides, polypeptides, antibodies, and/or agonists or antagonists of the present invention may be useful in detecting, preventing, diagnosing, prognosticating, treating, and/or ameliorating anemias associated with abnormal red blood cell architecture including but not limited to, hereditary spherocytosis, hereditary elliptocytosis, glucose-6-phosphate dehydrogenase deficiency, and sickle cell anemia.

[0585] The polynucleotides, polypeptides, antibodies, and/or agonists or antagonists of the present invention may be useful in detecting, preventing, diagnosing, prognosticating, treating, and/or ameliorating hemoglobin abnormalities, (e.g., those associated with sickle cell anemia, hemoglobin C disease, hemoglobin S—C disease, and hemoglobin E disease). Additionally, the polynucleotides, polypeptides, antibodies, and/or agonists or antagonists of the present invention may be useful in detecting, preventing, diagnosing, prognosticating, treating, and/or ameliorating thalassemias, including, but not limited to major and minor forms of alpha-thalassemia and beta-thalassemia.

[0586] In another embodiment, the polynucleotides, polypeptides, antibodies, and/or agonists or antagonists of the present invention may be useful in detecting, preventing, diagnosing, prognosticating, treating, and/or ameliorating bleeding disorders including, but not limited to, thrombocytopenia (e.g., idiopathic thrombocytopenic purpura, and thrombotic thrombocytopenic purpura), Von Willebrand's disease, hereditary platelet disorders (e.g., storage pool disease such as Chediak-Higashi and Hermansky-Pudlak syndromes, thromboxane A2 dysfunction, thromboasthenia, and BemardSoulier syndrome), hemolytic-uremic syndrome, hemophelias such as hemophelia A or Factor VII deficiency and Christmas disease or Factor IX deficiency, Hereditary Hemorhhagic Telangiectsia, also known as Rendu-Osler-Weber syndrome, allergic purpura (Henoch Schonlein purpura) and disseminated intravascular coagulation.

[0587] The effect of the polynucleotides, polypeptides, antibodies, and/or agonists or antagonists of the present invention on the clotting time of blood may be monitored using any of the clotting tests known in the art including, but not limited to, whole blood partial thromboplastin time (PTT), the activated partial thromboplastin time (aPTT), the activated clotting time (ACI), the recalcified activated clotting time, or the Lee-White Clotting time.

[0588] Several diseases and a variety of drugs can cause platelet dysfunction. Thus, in a specific embodiment, the polynucleotides, polypeptides, antibodies, and/or agonists or antagonists of the present invention may be useful in detecting, preventing, diagnosing, prognosticating, treating, and/or ameliorating acquired platelet dysfunction such as platelet dysfunction accompanying kidney failure, leukemia, multiple myeloma, cirrhosis of the liver, and systemic lupus erythematosus as well as platelet dysfunction associated with drug treatments, including treatment with aspirin, ticlopidine, nonsteroidal anti-inflammatory drugs (used for arthritis, pain, and sprains), and penicillin in high doses.

[0589] In another embodiment, the polynucleotides, polypeptides, antibodies, and/or agonists or antagonists of the present invention may be useful in detecting, preventing, diagnosing, prognosticating, treating, and/or ameliorating diseases and disorders characterized by or associated with increased or decreased numbers of white blood cells. Leukopenia occurs when the number of white blood cells decreases below normal. Leukopenias include, but are not limited to, neutropenia and lymphocytopenia. An increase in the number of white blood cells compared to normal is known as leukocytosis. The body generates increased numbers of white blood cells during infection. Thus, leukocytosis may simply be a normal physiological parameter that reflects infection. Alternatively, leukocytosis may be an indicator of injury or other disease such as cancer. Leokocytoses, include but are not limited to, eosinophilia, and accumulations of macrophages. In specific embodiments, the polynucleotides, polypeptides, antibodies, and/or agonists or antagonists of the present invention may be useful in detecting, preventing, diagnosing, prognosticating, treating, and/or ameliorating leukopenia. In other specific embodiments, the polynucleotides, polypeptides, antibodies, and/or agonists or antagonists of the present invention may be useful in detecting, preventing, diagnosing, prognosticating, treating, and/or ameliorating leukocytosis.

[0590] Leukopenia may be a generalized decreased in all types of white blood cells, or may be a specific depletion of particular types of white blood cells. Thus, in specific embodiments, the polynucleotides, polypeptides, antibodies, and/or agonists or antagonists of the present invention may be useful in detecting, preventing, diagnosing, prognosticating, treating, and/or ameliorating decreases in neutrophil numbers, known as neutropenia. Neutropenias that may be detected, prevented, diagnosed, prognosticated, treated, and/or ameliorated by the polynucleotides, polypeptides, antibodies, and/or agonists or antagonists of the present invention include, but are not limited to, infantile genetic agranulocytosis, familial neutropenia, cyclic neutropenia, neutropenias resulting from or associated with dietary deficiencies (e.g., vitamin B 12 deficiency or folic acid deficiency), neutropenias resulting from or associated with drug treatments (e.g., antibiotic regimens such as penicillin treatment, sulfonamide treatment, anticoagulant treatment, anticonvulsant drugs, anti-thyroid drugs, and cancer chemotherapy), and neutropenias resulting from increased neutrophil destruction that may occur in association with some bacterial or viral infections, allergic disorders, autoimmune diseases, conditions in which an individual has an enlarged spleen (e.g., Felty syndrome, malaria and sarcoidosis), and some drug treatment regimens.

[0591] The polynucleotides, polypeptides, antibodies, and/or agonists or antagonists of the present invention may be useful in detecting, preventing, diagnosing, prognosticating, treating, and/or ameliorating lymphocytopenias (decreased numbers of B and/or T lymphocytes), including, but not limited lymphocytopenias resulting from or associated with stress, drug treatments (e.g., drug treatment with corticosteroids, cancer chemotherapies, and/or radiation therapies), AIDS infection and/or other diseases such as, for example, cancer, rheumatoid arthritis, systemic lupus erythematosus, chronic infections, some viral infections and/or hereditary disorders (e.g., DiGeorge syndrome, Wiskott-Aldrich Syndome, severe combined immunodeficiency, ataxia telangiectsia).

[0592] The polynucleotides, polypeptides, antibodies, and/or agonists or antagonists of the present invention may be useful in detecting, preventing, diagnosing, prognosticating, treating, and/or ameliorating diseases and disorders associated with macrophage numbers and/or macrophage function including, but not limited to, Gaucher's disease, Niemann-Pick disease, Letterer-Siwe disease and Hand-Schuller-Christian disease.

[0593] In another embodiment, the polynucleotides, polypeptides, antibodies, and/or agonists or antagonists of the present invention may be useful in detecting, preventing, diagnosing, prognosticating, treating, and/or ameliorating diseases and disorders associated with eosinophil numbers and/or eosinophil function including, but not limited to, idiopathic hypereosinophilic syndrome, eosinophilia-myalgia syndrome, and Hand-Schuller-Christian disease.

[0594] In yet another embodiment, the polynucleotides, polypeptides, antibodies, and/or agonists or antagonists of the present invention may be useful in detecting, preventing, diagnosing, prognosticating, treating, and/or ameliorating leukemias and lymphomas including, but not limited to, acute lymphocytic (lymphpblastic) leukemia (ALL), acute myeloid (myelocytic, myelogenous, myeloblastic, or myelomonocytic) leukemia, chronic lymphocytic leukemia (e.g., B cell leukemias, T cell leukemias, Sezary syndrome, and Hairy cell leukenia), chronic myelocytic (myeloid, myelogenous, or granulocytic) leukemia, Hodgkin's lymphoma, non-hodgkin's lymphoma, Burkitt's lymphoma, and mycosis fungoides.

[0595] In other embodiments, the polynucleotides, polypeptides, antibodies, and/or agonists or antagonists of the present invention may be useful in detecting, preventing, diagnosing, prognosticating, treating, and/or ameliorating diseases and disorders of plasma cells including, but not limited to, plasma cell dyscrasias, monoclonal gammaopathies, monoclonal gammopathies of undetermined significance, multiple myeloma, macroglobulinemia, Waldenstrom's macroglobulinemia, cryoglobulinemia, and Raynaud's phenomenon.

[0596] In other embodiments, the polynucleotides, polypeptides, antibodies, and/or agonists or antagonists of the present invention may be useful in detecting, preventing, diagnosing, prognosticating, treating, and/or ameliorating myeloproliferative disorders, including but not limited to, polycythemia vera, relative polycythemia, secondary polycythemia, myelofibrosis, acute myelofibrosis, agnogenic myelod metaplasia, thrombocythemia, (including both primary and seconday thrombocythemia) and chronic myelocytic leukemia

[0597] In other embodiments, the polynucleotides, polypeptides, antibodies, and/or agonists or antagonists of the present invention may be useful as a treatment prior to surgery, to increase blood cell production.

[0598] In other embodiments, the polynucleotides, polypeptides, antibodies, and/or agonists or antagonists of the present invention may be useful as an agent to enhance the migration, phagocytosis, superoxide production, antibody dependent cellular cytotoxicity of neutrophils, eosionophils and macrophages.

[0599] In other embodiments, the polynucleotides, polypeptides, antibodies, and/or agonists or antagonists of the present invention may be useful as an agent to increase the number of stem cells in circulation prior to stem cells pheresis. In another specific embodiment, the polynucleotides, polypeptides, antibodies, and/or agonists or antagonists of the present invention may be useful as an agent to increase the number of stem cells in circulation prior to platelet pheresis.

[0600] In other embodiments, the polynucleotides, polypeptides, antibodies, and/or agonists or antagonists of the present invention may be useful as an agent to increase cytokine production.

[0601] In other embodiments, the polynucleotides, polypeptides, antibodies, and/or agonists or antagonists of the present invention may be useful in detecting, preventing, diagnosing, prognosticating, treating, and/or ameliorating primary hematopoietic and hematologic disorders.

Hyperproliferative Disorders

[0602] In certain embodiments, polynucleotides or polypeptides, or agonists or antagonists of the present invention can be used to treat or detect hyperproliferative disorders, including neoplasms. Polynucleotides or polypeptides, or agonists or antagonists of the present invention may inhibit the proliferation of the disorder through direct or indirect interactions. Alternatively, Polynucleotides or polypeptides, or agonists or antagonists of the present invention may proliferate other cells which can inhibit the hyperproliferative disorder.

[0603] For example, by increasing an immune response, particularly increasing antigenic qualities of the hyperproliferative disorder or by proliferating, differentiating, or mobilizing T-cells, hyperproliferative disorders can be treated. This immune response may be increased by either enhancing an existing immune response, or by initiating a new immune response. Alternatively, decreasing an immune response may also be a method of treating hyperproliferative disorders, such as a chemotherapeutic agent.

[0604] Examples of hyperproliferative disorders that can be treated or detected by polynucleotides or polypeptides, or agonists or antagonists of the present invention include, but are not limited to neoplasms located in the: colon, abdomen, bone, breast, digestive system, liver, pancreas, peritoneum, endocrine glands (adrenal, parathyroid, pituitary, testicles, ovary, thymus, thyroid), eye, head and neck, nervous (central and peripheral), lymphatic system, pelvis, skin, soft tissue, spleen, thorax, and urogenital tract.

[0605] Similarly, other hyperproliferative disorders can also be treated or detected by polynucleotides or polypeptides, or agonists or antagonists of the present invention. Examples of such hyperproliferative disorders include, but are not limited to: Acute Childhood Lymphoblastic Leukemia, Acute Lymphoblastic Leukemia, Acute Lymphocytic Leukemia, Acute Myeloid Leukemia, Adrenocortical Carcinoma, Adult (Primary) Hepatocellular Cancer, Adult (Primary) Liver Cancer, Adult Acute Lymphocytic Leukemia, Adult Acute Myeloid Leukemia, Adult Hodgkin's Disease, Adult Hodgkin's Lymphoma, Adult Lymphocytic Leukemia, Adult Non-Hodgkin's Lymphoma, Adult Primary Liver Cancer, Adult Soft Tissue Sarcoma, AIDS-Related Lymphoma, AIDS-Related Malignancies, Anal Cancer, Astrocytoma, Bile Duct Cancer, Bladder Cancer, Bone Cancer, Brain Stem Glioma, Brain Tumors, Breast Cancer, Cancer of the Renal Pelvis and Ureter, Central Nervous System (Primary) Lymphoma, Central Nervous System Lymphoma, Cerebellar Astrocytoma, Cerebral Astrocytoma, Cervical Cancer, Childhood (Primary) Hepatocellular Cancer, Childhood (Primary) Liver Cancer, Childhood Acute Lymphoblastic Leukemia, Childhood Acute Myeloid Leukemia, Childhood Brain Stem Glioma, Childhood Cerebellar Astrocytoma, Childhood Cerebral Astrocytoma, Childhood Extracranial Germ Cell Tumors, Childhood Hodgkin's Disease, Childhood Hodgkin's Lymphoma, Childhood Hypothalamic and Visual Pathway Glioma, Childhood Lymphoblastic Leukemia, Childhood Medulloblastoma, Childhood Non-Hodgkin's Lymphoma, Childhood Pineal and Supratentorial Primitive Neuroectodermal Tumors, Childhood Primary Liver Cancer, Childhood Rhabdomyosarcoma, Childhood Soft Tissue Sarcoma, Childhood Visual Pathway and Hypothalamic Glioma, Chronic Lymphocytic Leukemia, Chronic Myelogenous Leukemia, Colon Cancer, Cutaneous T-Cell Lymphoma, Endocrine Pancreas Islet Cell Carcinoma, Endometrial Cancer, Ependymoma, Epithelial Cancer, Esophageal Cancer, Ewing's Sarcoma and Related Tumors, Exocrine Pancreatic Cancer, Extracranial Germ Cell Tumor, Extragonadal Germ Cell Tumor, Extrahepatic Bile Duct Cancer, Eye Cancer, Female Breast Cancer, Gaucher's Disease, Gallbladder Cancer, Gastric Cancer, Gastrointestinal Carcinoid Tumor, Gastrointestinal Tumors, Germ Cell Tumors, Gestational Trophoblastic Tumor, Hairy Cell Leukemia, Head and Neck Cancer, Hepatocellular Cancer, Hodgkin's Disease, Hodgkin's Lymphoma, Hypergammaglobulinemia, Hypopharyngeal Cancer, Intestinal Cancers, Intraocular Melanoma, Islet Cell Carcinoma, Islet Cell Pancreatic Cancer, Kaposi's Sarcoma, Kidney Cancer, Laryngeal Cancer, Lip and Oral Cavity Cancer, Liver Cancer, Lung Cancer, Lymphoproliferative Disorders, Macroglobulinemia, Male Breast Cancer, Malignant Mesothelioma, Malignant Thymoma, Medulloblastoma, Melanoma, Mesothelioma, Metastatic Occult Primary Squamous Neck Cancer, Metastatic Primary Squamous Neck Cancer, Metastatic Squamous Neck Cancer, Multiple Myeloma, Multiple Myeloma/Plasma Cell Neoplasm, Myelodysplastic Syndrome, Myelogenous Leukemia, Myeloid Leukemia, Myeloproliferative Disorders, Nasal Cavity and Paranasal Sinus Cancer, Nasopharyngeal Cancer, Neuroblastoma, Non-Hodgkin's Lymphoma During Pregnancy, Nonmelanoma Skin Cancer, Non-Small Cell Lung Cancer, Occult Primary Metastatic Squamous Neck Cancer, Oropharyngeal Cancer, Osteo-/Malignant Fibrous Sarcoma, Osteosarcoma/Malignant Fibrous Histiocytoma, Osteosarcoma/Malignant Fibrous Histiocytoma of Bone, Ovarian Epithelial Cancer, Ovarian Germ Cell Tumor, Ovarian Low Malignant Potential Tumor, Pancreatic Cancer, Paraproteinemias, Purpura, Parathyroid Cancer, Penile Cancer, Pheochromocytoma, Pituitary Tumor, Plasma Cell Neoplasm/Multiple Myeloma, Primry Central Nervous System Lymphoma, Priry Liver Cancer, Prostate Cancer, Rectal Cancer, Renal Cell Cancer, Renal Pelvis and Ureter Cancer, Retinoblastoma, Rhabdomyosarcoma, Salivary Gland Cancer, Sarcoidosis Sarcomas, Sezary Syndrome, Skin Cancer, Small Cell Lung Cancer, Small Intestine Cancer, Soft Tissue Sarcoma, Squamous Neck Cancer, Stomach Cancer, Supratentorial Primitive Neuroectodermal and Pineal Tumors, T-Cell Lymphoma, Testicular Cancer, Thymoma, Thyroid Cancer, Transitional Cell Cancer of the Renal Pelvis and Ureter, Transitional Renal Pelvis and Ureter Cancer, Trophoblastic Tumors, Ureter and Renal Pelvis Cell Cancer, Urethral Cancer, Uterine Cancer, Uterine Sarcoma, Vaginal Cancer, Visual Pathway and Hypothalamic Glioma, Vulvar Cancer, Waldenstrom's Macroglobulinemia, Wilms' Tumor, and any other hyperproliferative disease, besides neoplasia, located in an organ system listed above.

[0606] In another preferred embodiment, polynucleotides or polypeptides, or agonists or antagonists of the present invention are used to detect, prevent, diagnose, prognosticate, treat, and/or ameliorate premalignant conditions and to prevent progression to a neoplastic or malignant state, including but not limited to those disorders described above. Such uses are indicated in conditions known or suspected of preceding progression to neoplasia or cancer, in particular, where non-neoplastic cell growth consisting of hyperplasia, metaplasia, or most particularly, dysplasia has occurred (for review of such abnormal growth conditions, see Robbins and Angell, 1976, Basic Pathology, 2d Ed., W.B. Saunders Co., Philadelphia, pp. 68-79.)

[0607] Hyperplasia is a form of controlled cell proliferation, involving an increase in cell number in a tissue or organ, without significant alteration in structure or function. Hyperplastic disorders which can be detected, prevented, diagnosed, prognosticated, treated, and/or ameliorated with compositions of the invention (including polynucleotides, polypeptides, agonists or antagonists) include, but are not limited to, angiofollicular mediastinal lymph node hyperplasia, angiolymphoid hyperplasia with eosinophilia, atypical melanocytic hyperplasia, basal cell hyperplasia, benign giant lymph node hyperplasia, cementum hyperplasia, congenital adrenal hyperplasia, congenital sebaceous hyperplasia, cystic hyperplasia, cystic hyperplasia of the breast, denture hyperplasia, ductal hyperplasia, endometrial hyperplasia, fibromuscular hyperplasia, focal epithelial hyperplasia, gingival hyperplasia, inflammatory fibrous hyperplasia, inflammatory papillary hyperplasia, intravascular papillary endothelial hyperplasia, nodular hyperplasia of prostate, nodular regenerative hyperplasia, pseudoepitheliomatous hyperplasia, senile sebaceous hyperplasia, and verrucous hyperplasia.

[0608] Metaplasia is a form of controlled cell growth in which one type of adult or fully differentiated cell substitutes for another type of adult cell. Metaplastic disorders which can be detected, prevented, diagnosed, prognosticated, treated, and/or ameliorated with compositions of the invention (including polynucleotides, polypeptides, agonists or antagonists) include, but are not limited to, agnogenic myeloid metaplasia, apocrine metaplasia, atypical metaplasia, autoparenchymatous metaplasia, connective tissue metaplasia, epithelial metaplasia, intestinal metaplasia, metaplastic anemia, metaplastic ossification, metaplastic polyps, myeloid metaplasia, primary myeloid metaplasia, secondary myeloid metaplasia, squamous metaplasia, squamous metaplasia of amnion, and symptomatic myeloid metaplasia.

[0609] Dysplasia is frequently a forerunner of cancer, and is found mainly in the epithelia; it is the most disorderly form of non-neoplastic cell growth, involving a loss in individual cell uniformity and in the architectural orientation of cells. Dysplastic cells often have abnormally large, deeply stained nuclei, and exhibit pleomorphism. Dysplasia characteristically occurs where there exists chronic irritation or inflammation. Dysplastic disorders which can be detected, prevented, diagnosed, prognosticated, treated, and/or ameliorated with compositions of the invention (including polynucleotides, polypeptides, agonists or antagonists) include, but are not limited to, anhidrotic ectodermal dysplasia, anterofacial dysplasia, asphyxiating thoracic dysplasia, atriodigital dysplasia, bronchopulmonary dysplasia, cerebral dysplasia, cervical dysplasia, chondroectodermal dysplasia, cleidocranial dysplasia, congenital ectodermal dysplasia, craniodiaphysial dysplasia, craniocarpotarsal dysplasia, craniometaphysial dysplasia, dentin dysplasia, diaphysial dysplasia, ectodermal dysplasia, enamel dysplasia, encephalo-ophthalmic dysplasia, dysplasia epiphysialis hemimelia, dysplasia epiphysialis multiplex, dysplasia epiphysialis punctata, epithelial dysplasia, faciodigitogenital dysplasia, familial fibrous dysplasia of jaws, familial white folded dysplasia, fibromuscular dysplasia, fibrous dysplasia of bone, florid osseous dysplasia, hereditary renal-retinal dysplasia, hidrotic ectodermal dysplasia, hypohidrotic ectodermal dysplasia, lymphopenic thymic dysplasia, mammary dysplasia, mandibulofacial dysplasia, metaphysial dysplasia, Mondini dysplasia, monostotic fibrous dysplasia, mucoepithelial dysplasia, multiple epiphysial dysplasia, oculoauriculovertebral dysplasia, oculodentodigital dysplasia, oculovertebral dysplasia, odontogenic dysplasia, ophthalmomandibulomelic dysplasia, periapical cemental dysplasia, polyostotic fibrous dysplasia, pseudoachondroplastic spondyloepiphysial dysplasia, retinal dysplasia, septo-optic dysplasia, spondyloepiphysial dysplasia, and ventriculoradial dysplasia.

[0610] Additional pre-neoplastic disorders which can be detected, prevented, diagnosed, prognosticated, treated, and/or ameliorated with compositions of the invention (including polynucleotides, polypeptides, agonists or antagonists) include, but are not limited to, benign dysproliferative disorders (e.g., benign tumors, fibrocystic conditions, tissue hypertrophy, intestinal polyps, colon polyps, and esophageal dysplasia), leukoplakia, keratoses, Bowen's disease, Farmer's Skin, solar cheilitis, and solar keratosis.

[0611] In another embodiment, a polypeptide of the invention, or polynucleotides, antibodies, agonists, or antagonists corresponding to that polypeptide, may be used to diagnose and/or prognosticate disorders associated with the tissue(s) in which the polypeptide of the invention is expressed, including one, two, three, four, five, or more tissues disclosed in Table 1B.2, column 5 (Tissue Distribution Library Code).

[0612] In another embodiment, polynucleotides, polypeptides, antibodies, and/or agonists or antagonists of the present invention conjugated to a toxin or a radioactive isotope, as described herein, may be used to treat cancers and neoplasms, including, but not limited to those described herein. In a further preferred embodiment, polynucleotides, polypeptides, antibodies, and/or agonists or antagonists of the present invention conjugated to a toxin or a radioactive isotope, as described herein, may be used to treat acute myelogenous leukemia.

[0613] Additionally, polynucleotides, polypeptides, and/or agonists or antagonists of the invention may affect apoptosis, and therefore, would be useful in treating a number of diseases associated with increased cell survival or the inhibition of apoptosis. For example, diseases associated with increased cell survival or the inhibition of apoptosis that could be detected, prevented, diagnosed, prognosticated, treated, and/or ameliorated by polynucleotides, polypeptides, and/or agonists or antagonists of the invention, include cancers (such as follicular lymphomas, carcinomas with p53 mutations, and hormone-dependent tumors, including, but not limited to colon cancer, cardiac tumors, pancreatic cancer, melanoma, retinoblastoma, glioblastoma, lung cancer, intestinal cancer, testicular cancer, stomach cancer, neuroblastoma, myxoma, myoma, lymphoma, endothelioma, osteoblastoma, osteoclastoma, osteosarcoma, chondrosarcoma, adenoma, breast cancer, prostate cancer, Kaposi's sarcoma and ovarian cancer); autoimmune disorders such as, multiple sclerosis, Sjogren's syndrome, Hashimoto's thyroiditis, biliary cirrhosis, Behcet's disease, Crohn's disease, polymyositis, systemic lupus erythematosus and immune-related glomerulonephritis and rheumatoid arthritis) and viral infections (such as herpes viruses, pox viruses and adenoviruses), inflammation, graft v. host disease, acute graft rejection, and chronic graft rejection.

[0614] In preferred embodiments, polynucleotides, polypeptides, and/or agonists or antagonists of the invention are used to inhibit growth, progression, and/or metastasis of cancers, in particular those listed above.

[0615] Additional diseases or conditions associated with increased cell survival that could be detected, prevented, diagnosed, prognosticated, treated, and/or ameliorated by polynucleotides, polypeptides, and/or agonists or antagonists of the invention, include, but are not limited to, progression, and/or metastases of malignancies and related disorders such as leukemia (including acute leukemias (e.g., acute lymphocytic leukemia, acute myelocytic leukemia (including myeloblastic, promyelocytic, myelomonocytic, monocytic, and erythroleukemia)) and chronic leukemias (e.g., chronic myelocytic (granulocytic) leukemia and chronic lymphocytic leukemia)), polycythemia vera, lymphomas (e.g., Hodgkin's disease and non-Hodgkin's disease), multiple myeloma, Waldenstrom's macroglobulinemia, heavy chain disease, and solid tumors including, but not limited to, sarcomas and carcinomas such as fibrosarcoma, myxosarcoma, liposarcoma, chondrosarcoma, osteogenic sarcoma, chordoma, angiosarcoma, endotheliosarcoma, lymphangiosarcoma, lymphangioendotheliosarcoma, synovioma, mesothelioma, Ewing's tumor, leiomyosarcoma, rhabdomyosarcoma, colon carcinoma, pancreatic cancer, breast cancer, ovarian cancer, prostate cancer, squamous cell carcinoma, basal cell carcinoma, adenocarcinoma, sweat gland carcinoma, sebaceous gland carcinoma, papillary carcinoma, papillary adenocarcinomas, cystadenocarcinoma, medullary carcinoma, bronchogenic carcinoma, renal cell carcinoma, hepatoma, bile duct carcinoma, choriocarcinoma, seminoma, embryonal carcinoma, Wilm's tumor, cervical cancer, testicular tumor, lung carcinoma, small cell lung carcinoma, bladder carcinoma, epithelial carcinoma, glioma, astrocytoma, medulloblastoma, craniopharyngioma, ependymoma, pinealoma, emangioblastoma, acoustic neuroma, oligodendroglioma, menangioma, melanoma, neuroblastoma, and retinoblastoma.

[0616] Diseases associated with increased apoptosis that could be detected, prevented, diagnosed, prognosticated, treated, and/or ameliorated by polynucleotides, polypeptides, and/or agonists or antagonists of the invention, include AIDS; neurodegenerative disorders (such as Alzheimer's disease, Parkinson's disease, amyotrophic lateral sclerosis, retinitis pigmentosa, cerebellar degeneration and brain tumor or prior associated disease); autoimmune disorders (such as, multiple sclerosis, Sjogren's syndrome, Hashimoto's thyroiditis, biliary cirrhosis, Behcet's disease, Crohn's disease, polymyositis, systemic lupus erythematosus and immune-related glomerulonephritis and rheumatoid arthritis) myelodysplastic syndromes (such as aplastic anemia), graft v. host disease, ischemic injury (such as that caused by myocardial infarction, stroke and reperfusion injury), liver injury (e.g., hepatitis related liver injury, ischemia/reperfusion injury, cholestosis (bile duct injury) and liver cancer); toxin-induced liver disease (such as that caused by alcohol), septic shock, cachexia and anorexia

[0617] Hyperproliferative diseases and/or disorders that could be detected, prevented, diagnosed, prognosticated, treated, and/or ameliorated by polynucleotides, polypeptides, and/or agonists or antagonists of the invention, include, but are not limited to, neoplasms located in the liver, abdomen, bone, breast, digestive system, pancreas, peritoneum, endocrine glands (adrenal, parathyroid, pituitary, testicles, ovary, thymus, thyroid), eye, head and neck, nervous system (central and peripheral), lymphatic system, pelvis, skin, soft tissue, spleen, thorax, and urogenital tract.

[0618] Similarly, other hyperproliferative disorders can also be detected, prevented, diagnosed, prognosticated, treated, and/or ameliorated by polynucleotides, polypeptides, and/or agonists or antagonists of the invention. Examples of such hyperproliferative disorders include, but are not limited to: hypergammaglobulinemia, lymphoproliferative disorders, paraproteinemias, purpura, sarcoidosis, Sezary Syndrome, Waldenstron's macroglobulinemia, Gaucher's Disease, histiocytosis, and any other hyperproliferative disease, besides neoplasia, located in an organ system listed above.

[0619] Another preferred embodiment utilizes polynucleotides of the present invention to inhibit aberrant cellular division, by gene therapy using the present invention, and/or protein fusions or fragments thereof.

[0620] Thus, the present invention provides a method for treating cell proliferative disorders by inserting into an abnormally proliferating cell a polynucleotide of the present invention, wherein said polynucleotide represses said expression.

[0621] Another embodiment of the present invention provides a method of treating cell-proliferative disorders in individuals comprising administration of one or more active gene copies of the present invention to an abnormally proliferating cell or cells. In a preferred embodiment, polynucleotides of the present invention is a DNA construct comprising a recombinant expression vector effective in expressing a DNA sequence encoding said polynucleotides. In another preferred embodiment of the present invention, the DNA construct encoding the poynucleotides of the present invention is inserted into cells to be treated utilizing a retrovirus, or more preferably an adenoviral vector (See G J. Nabel, et. al., PNAS 1999 96: 324-326, which is hereby incorporated by reference). In a most preferred embodiment, the viral vector is defective and will not transform non-proliferating cells, only proliferating cells. Moreover, in a preferred embodiment, the polynucleotides of the present invention inserted into proliferating cells either alone, or in combination with or fused to other polynucleotides, can then be modulated via an external stimulus (i.e. magnetic, specific small molecule, chemical, or drug administration, etc.), which acts upon the promoter upstream of said polynucleotides to induce expression of the encoded protein product. As such the beneficial therapeutic affect of the present invention may be expressly modulated (i.e. to increase, decrease, or inhibit expression of the present invention) based upon said external stimulus.

[0622] Polynucleotides of the present invention may be useful in repressing expression of oncogenic genes or antigens. By “repressing expression of the oncogenic genes” is intended the suppression of the transcription of the gene, the degradation of the gene transcript (pre-message RNA), the inhibition of splicing, the destruction of the messenger RNA, the prevention of the post-translational modifications of the protein, the destruction of the protein, or the inhibition of the normal function of the protein.

[0623] For local administration to abnormally proliferating cells, polynucleotides of the present invention may be administered by any method known to those of skill in the art including, but not limited to transfection, electroporation, microinjection of cells, or in vehicles such as liposomes, lipofectin, or as naked polynucleotides, or any other method described throughout the specification. The polynucleotide of the present invention may be delivered by known gene delivery systems such as, but not limited to, retroviral vectors (Gilboa, J. Virology 44:845 (1982); Hocke, Nature 320:275 (1986); Wilson, et al., Proc. Natl. Acad. Sci. U.S.A. 85:3014), vaccinia virus system (Chakrabarty et al., Mol. Cell Biol. 5:3403 (1985) or other efficient DNA delivery systems (Yates et al., Nature 313:812 (1985)) known to those skilled in the art. These references are exemplary only and are hereby incorporated by reference. In order to specifically deliver or transfect cells which are abnormally proliferating and spare non-dividing cells, it is preferable to utilize a retrovirus, or adenoviral (as described in the art and elsewhere herein) delivery system known to those of skill in the art. Since host DNA replication is required for retroviral DNA to integrate and the retrovirus will be unable to self replicate due to the lack of the retrovirus genes needed for its life cycle. Utilizing such a retroviral delivery system for polynucleotides of the present invention will target said gene and constructs to abnormally proliferating cells and will spare the non-dividing normal cells.

[0624] The polynucleotides of the present invention may be delivered directly to cell proliferative disorder/disease sites in internal organs, body cavities and the like by use of imaging devices used to guide an injecting needle directly to the disease site. The polynucleotides of the present invention may also be administered to disease sites at the time of surgical intervention.

[0625] By “cell proliferative disease” is meant any human or animal disease or disorder, affecting any one or any combination of organs, cavities, or body parts, which is characterized by single or multiple local abnormal proliferations of cells, groups of cells, or tissues, whether benign or malignant.

[0626] Any amount of the polynucleotides of the present invention may be administered as long as it has a biologically inhibiting effect on the proliferation of the treated cells. Moreover, it is possible to administer more than one of the polynucleotide of the present invention simultaneously to the same site. By “biologically inhibiting” is meant partial or total growth inhibition as well as decreases in the rate of proliferation or growth of the cells. The biologically inhibitory dose may be determined by assessing the effects of the polynucleotides of the present invention on target malignant or abnormally proliferating cell growth in tissue culture, tumor growth in animals and cell cultures, or any other method known to one of ordinary skill in the art.

[0627] The present invention is further directed to antibody-based therapies which involve administering of anti-polypeptides and anti-polynucleotide antibodies to a mammalian, preferably human, patient for treating one or more of the described disorders. Methods for producing anti-polypeptides and anti-polynucleotide antibodies polyclonal and monoclonal antibodies are described in detail elsewhere herein. Such antibodies may be provided in pharmaceutically acceptable compositions as known in the art or as described herein.

[0628] A summary of the ways in which the antibodies of the present invention may be used therapeutically includes binding polynucleotides or polypeptides of the present invention locally or systemically in the body or by direct cytotoxicity of the antibody, e.g. as mediated by complement (CDC) or by effector cells (ADCC). Some of these approaches are described in more detail below. Armed with the teachings provided herein, one of ordinary skill in the art will know how to use the antibodies of the present invention for diagnosis, prognosis, monitoring, or therapeutic purposes without undue experimentation.

[0629] In particular, the antibodies, fragments and derivatives of the present invention are useful for treating a subject having or developing cell proliferative and/or differentiation disorders as described herein. Such treatment comprises administering a single or multiple doses of the antibody, or a fragment, derivative, or a conjugate thereof.

[0630] The antibodies of this invention may be advantageously utilized in combination with other monoclonal or chimeric antibodies, or with lymphokines or hematopoietic growth factors, for example., which serve to increase the number or activity of effector cells which interact with the antibodies.

[0631] It is preferred to use high affinity and/or potent in vivo inhibiting and/or neutralizing antibodies against polypeptides or polynucleotides of the present invention, fragments or regions thereof, for both immunoassays directed to and therapy of disorders related to polynucleotides or polypeptides, including fragements thereof, of the present invention. Such antibodies, fragments, or regions, will preferably have an affinity for polynucleotides or polypeptides, including fragements thereof. Preferred binding affinities include those with a dissociation constant or Kd less than 5×10⁻⁶M, 10⁻⁶M, 5×10⁻⁷M, 10⁻⁷M, 5×10⁻⁸M, 10⁻⁸M, 5×10⁻⁹M, 10⁻⁹M, 5×10⁻¹⁰M, 10⁻¹⁰M, 5×10⁻¹¹M, 10⁻¹¹M, 5×10⁻¹²M, 10⁻¹²M, 5×10⁻¹³M, 10⁻¹³M, 5×10⁻¹⁴M, 10⁻¹⁴M, 5×10⁻¹⁵M, and 10⁻¹⁵M.

[0632] Moreover, polypeptides of the present invention are useful in inhibiting the angiogenesis of proliferative cells or tissues, either alone, as a protein fusion, or in combination with other polypeptides directly or indirectly, as described elsewhere herein. In a most preferred embodiment, said anti-angiogenesis effect may be achieved indirectly, for example, through the inhibition of hematopoietic, tumor-specific cells, such as tumor-associated macrophages (See Joseph I B, et al. J Natl Cancer Inst, 90(21):1648-53 (1998), which is hereby incorporated by reference). Antibodies directed to polypeptides or polynucleotides of the present invention may also result in inhibition of angiogenesis directly, or indirectly (See Witte L, et al., Cancer Metastasis Rev. 17(2):155-61 (1998), which is hereby incorporated by reference)).

[0633] Polypeptides, including protein fusions, of the present invention, or fragments thereof may be useful in inhibiting proliferative cells or tissues through the induction of apoptosis. Said polypeptides may act either directly, or indirectly to induce apoptosis of proliferative cells and tissues, for example in the activation of a death-domain receptor, such as tumor necrosis factor (TNF) receptor-1, CD95 (Fas/APO-1), TNF-receptor-related apoptosis-mediated protein (TRAMP) and TNF-related apoptosis-inducing ligand (TRAIL) receptor-1 and -2 (See Schulze-Osthoff K, et. al., Eur J Biochem 254(3):439-59 (1998), which is hereby incorporated by reference). Moreover, in another preferred embodiment of the present invention, said polypeptides may induce apoptosis through other mechanisms, such as in the activation of other proteins which will activate apoptosis, or through stimulating the expression of said proteins, either alone or in combination with small molecule drugs or adjuviants, such as apoptonin, galectins, thioredoxins, anti-inflammatory proteins (See for example, Mutat Res 400(1-2):447-55 (1998), Med Hypotheses. 50(5):423-33 (1998), Chem Biol Interact April 24; 111-112:23-34 (1998), J Mol Med. 76(6):402-12 (1998), Int J Tissue React;20(1):3-15 (1998), which are all hereby incorporated by reference).

[0634] Polypeptides, including protein fusions to, or fragments thereof, of the present invention are useful in inhibiting the metastasis of proliferative cells or tissues. Inhibition may occur as a direct result of administering polypeptides, or antibodies directed to said polypeptides as described elsewere herein, or indirectly, such as activating the expression of proteins known to inhibit metastasis, for example alpha 4 integrins, (See, e.g., Curr Top Microbiol Immunol 1998;231:125-41, which is hereby incorporated by reference). Such thereapeutic affects of the present invention may be achieved either alone, or in combination with small molecule drugs or adjuvants.

[0635] In another embodiment, the invention provides a method of delivering compositions containing the polypeptides of the invention (e.g., compositions containing polypeptides or polypeptide antibodes associated with heterologous polypeptides, heterologous nucleic acids, toxins, or prodrugs) to targeted cells expressing the polypeptide of the present invention. Polypeptides or polypeptide antibodes of the invention may be associated with with heterologous polypeptides, heterologous nucleic acids, toxins, or prodrugs via hydrophobic, hydrophilic, ionic and/or covalent interactions.

[0636] Polypeptides, protein fusions to, or fragments thereof, of the present invention are useful in enhancing the immunogenicity and/or antigenicity of proliferating cells or tissues, either directly, such as would occur if the polypeptides of the present invention ‘vaccinated’ the immune response to respond to proliferative antigens and immunogens, or indirectly, such as in activating the expression of proteins known to enhance the immune response (e.g. chemokines), to said antigens and immunogens.

Cardiovascular Disorders

[0637] Polynucleotides or polypeptides, or agonists or antagonists of the present invention, may be used to detect, prevent, diagnose, prognosticate, treat, and/or ameliorate cardiovascular diseases and disorders, including, but not limited to, peripheral artery disease, such as limb ischemia.

[0638] Cardiovascular disorders include, but are not limited to, cardiovascular abnormalities, such as arterio-arterial fistula, arteriovenous fistula, cerebral arteriovenous malformations, congenital heart defects, pulmonary atresia, and Scimitar Syndrome. Congenital heart defects include, but are not limited to, aortic coarctation, cor triatriatum, coronary vessel anomalies, crisscross heart, dextrocardia, patent ductus arteriosus, Ebstein's anomaly, Eisemnenger complex, hypoplastic left heart syndrome, levocardia, tetralogy of fallot, transposition of great vessels, double outlet right ventricle, tricuspid atresia, persistent truncus arteriosus, and heart septal defects, such as aortopulmonary septal defect, endocardial cushion defects, Lutembacher's Syndrome, trilogy of Fallot, ventricular heart septal defects.

[0639] Cardiovascular disorders also include, but are not limited to, heart disease, such as arrhythmias, carcinoid heart disease, high cardiac output, low cardiac output, cardiac tamponade, endocarditis (including bacterial), heart aneurysm, cardiac arrest, congestive heart failure, congestive cardiomyopathy, paroxysmal dyspnea, cardiac edema, heart hypertrophy, congestive cardiomyopathy, left ventricular hypertrophy, right ventricular hypertrophy, post-infarction heart rupture, ventricular septal rupture, heart valve diseases, myocardial diseases, myocardial ischemia, pericardial effusion, pericarditis (including constrictive and tuberculous), pneumopericardium, postpericardiotomy syndrome, pulmonary heart disease, rheumatic heart disease, ventricular dysfunction, hyperemia, cardiovascular pregnancy complications, Scimitar Syndrome, cardiovascular syphilis, and cardiovascular tuberculosis.

[0640] Arrhythmias include, but are not limited to, sinus arrhythmia, atrial fibrillation, atrial flutter, bradycardia, extrasystole, Adams-Stokes Syndrome, bundle-branch block, sinoatrial block, long QT syndrome, parasystole, Lown-Ganong-Levine Syndrome, Mahaim-type pre-excitation syndrome, Wolff-Parkinson-White syndrome, sick sinus syndrome, tachycardias, and ventricular fibrillation. Tachycardias include paroxysmal tachycardia, supraventricular tachycardia, accelerated idioventricular rhythm, atrioventricular nodal reentry tachycardia, ectopic atrial tachycardia, ectopic junctional tachycardia, sinoatrial nodal reentry tachycardia, sinus tachycardia, Torsades de Pointes, and ventricular tachycardia.

[0641] Heart valve diseases include, but are not limited to, aortic valve insufficiency, aortic valve stenosis, hear murmurs, aortic valve prolapse, mitral valve prolapse, tricuspid valve prolapse, mitral valve insufficiency, mitral valve stenosis, pulmonary atresia, pulmonary valve insufficiency, pulmonary valve stenosis, tricuspid atresia, ticuspid valve insufficiency, and tricuspid valve stenosis.

[0642] Myocardial diseases include, but are not limited to, alcoholic cardiomyopathy, congestive cardiomyopathy, hypertrophic cardiomyopathy, aortic subvalvular stenosis, pulmonary subvalvular stenosis, restrictive cardiomyopathy, Chagas cardiomyopathy, endocardial fibroelastosis, endomyocardial fibrosis, Kearns Syndrome, myocardial reperfusion injury, and myocarditis.

[0643] Myocardial ischemias include, but are not limited to, coronary disease, such as angina pectoris, coronary aneurysm, coronary arteriosclerosis, coronary thrombosis, coronary vasospasm, myocardial infarction and myocardial stunning.

[0644] Cardiovascular diseases also include vascular diseases such as aneurysms, angiodysplasia, angiomatosis, bacillary angiomatosis, Hippel-Lindau Disease, Klippel-Trenaunay-Weber Syndrome, Sturge-Weber Syndrome, angioneurotic edema, aortic diseases, Takayasu's Arteritis, aortitis, Leriche's Syndrome, arterial occlusive diseases, arteritis, enarteritis, polyarteritis nodosa, cerebrovascular disorders, diabetic angiopathies, diabetic retinopathy, embolisms, thrombosis, erythromelalgia, hemorrhoids, hepatic veno-occlusive disease, hypertension, hypotension, ischemia, peripheral vascular diseases, phlebitis, pulmonary veno-occlusive disease, Raynaud's disease, CREST syndrome, retinal vein occlusion, Scimitar syndrome, superior vena cava syndrome, telangiectasia, atacia telangiectasia, hereditary hemorrhagic telangiectasia, varicocele, varicose veins, varicose ulcer, vasculitis, and venous insufficiency.

[0645] Aneurysms include, but are not limited to, dissecting aneurysms, false aneurysms, infected aneurysms, ruptured aneurysms, aortic aneurysms, cerebral aneurysms; coronary aneurysms, heart aneurysms, and iliac aneurysms.

[0646] Arterial occlusive diseases include, but are not limited to, arteriosclerosis, intermittent claudication, carotid stenosis, fibromuscular dysplasias, mesenteric vascular occlusion, Moyamoya disease, renal artery obstruction, retinal artery occlusion, and thromboangiitis obliterans.

[0647] Cerebrovascular disorders include, but are not limited to, carotid artery diseases, cerebral amyloid angiopathy, cerebral aneurysm, cerebral anoxia, cerebral arteriosclerosis, cerebral arteriovenous malformation, cerebral artery diseases, cerebral embolism and thrombosis, carotid artery thrombosis, sinus thrombosis, Wallenberg's syndrome, cerebral hemorrhage, epidural hematoma, subdural hematoma, subaraxhnoid hemorrhage, cerebral infarction, cerebral ischemia (including transient), subclavian steal syndrome, periventricular leukomalacia, vascular headache, cluster headache, migraine, and vertebrobasilar insufficiency.

[0648] Embolisms include, but are not limited to, air embolisms, amniotic fluid embolisms, cholesterol embolisms, blue toe syndrome, fat embolisms, pulmonary embolisms, and thromoboembolisms. Thrombosis include, but are not limited to, coronary thrombosis, hepatic vein thrombosis, retinal vein occlusion, carotid artery thrombosis, sinus thrombosis, Wallenberg's syndrome, and thrombophlebitis.

[0649] Ischemic disorders include, but are not limited to, cerebral ischemia, ischemic colitis, compartment syndromes, anterior compartment syndrome, myocardial ischemia, reperfusion injuries, and peripheral limb ischemia. Vasculitis includes, but is not limited to, aortitis, arteritis, Behcet's Syndrome, Churg-Strauss Syndrome, mucocutaneous lymph node syndrome, thromboangiitis obliterans, hypersensitivity vasculitis, Schoenlein-Henoch purpura, allergic cutaneous vasculitis, and Wegener's granulomatosis.

[0650] Polypeptides may be administered using any method known in the art, including, but not limited to, direct needle injection at the delivery site, intravenous injection, topical administration, catheter infusion, biolistic injectors, particle accelerators, gelfoam sponge depots, other commercially available depot materials, osmotic pumps, oral or suppositorial solid pharmaceutical formulations, decanting or topical applications during surgery, aerosol delivery. Such methods are known in the art. Polypeptides may be administered as part of a Therapeutic, described in more detail below. Methods of delivering polynucleotides are described in more detail herein.

Diseases at the Cellular Level

[0651] Diseases associated with increased cell survival or the inhibition of apoptosis that could be detected, prevented, diagnosed, prognosticated, treated, and/or ameliorated using polynucleotides or polypeptides, as well as antagonists or agonists of the present invention, include cancers (such as follicular lymphomas, carcinomas with p53 mutations, and hormone-dependent tumors, including, but not limited to colon cancer, cardiac tumors, pancreatic cancer, melanoma, retinoblastoma, glioblastoma, lung cancer, intestinal cancer, testicular cancer, stomach cancer, neuroblastoma, myxoma, myoma, lymphoma, endothelioma, osteoblastoma, osteoclastoma, osteosarcoma, chondrosarcoma, adenoma, breast cancer, prostate cancer, Kaposi's sarcoma and ovarian cancer); autoimmune disorders (such as, multiple sclerosis, Sjogren's syndrome, Hashimoto's thyroiditis, biliary cirrhosis, Behcet's disease, Crohn's disease, polymyositis, systemic lupus erythematosus and immune-related glomerulonephritis and rheumatoid arthritis) and viral infections (such as herpes viruses, pox viruses and adenoviruses), inflammation, graft v. host disease, acute graft rejection, and chronic graft rejection.

[0652] In preferred embodiments, polynucleotides, polypeptides, and/or antagonists of the invention are used to inhibit growth, progression, and/or metasis of cancers, in particular those listed above.

[0653] Additional diseases or conditions associated with increased cell survival that could be treated or detected by polynucleotides or polypeptides, or agonists or antagonists of the present invention include, but are not limited to, progression, and/or metastases of malignancies and related disorders such as leukemia (including acute leukemias (e.g., acute lymphocytic leukemia, acute myelocytic leukemia (including myeloblastic, promyelocytic, myelomonocytic, monocytic, and erythroleukemia)) and chronic leukemias (e.g., chronic myelocytic (granulocytic) leukemia and chronic lymphocytic leukemia)), polycythemia vera, lymphomas (e.g., Hodgkin's disease and non-Hodgkin's disease), multiple myeloma, Waldenstrom's macroglobulinemia, heavy chain disease, and solid tumors including, but not limited to, sarcomas and carcinomas such as fibrosarcoma, myxosarcoma, liposarcoma, chondrosarcoma, osteogenic sarcoma, chordoma, angiosarcoma, endotheliosarcoma, lymphangiosarcoma, lymphangioendotheliosarcoma, synovioma, mesothelioma, Ewing's tumor, leiomyosarcoma, rhabdomyosarcoma, colon carcinoma, pancreatic cancer, breast cancer, ovarian cancer, prostate cancer, squamous cell carcinoma, basal cell carcinoma, adenocarcinoma, sweat gland carcinoma, sebaceous gland carcinoma, papillary carcinoma, papillary adenocarcinomas, cystadenocarcinoma, medullary carcinoma, bronchogenic carcinoma, renal cell carcinoma, hepatoma, bile duct carcinoma, choriocarcinoma, seminoma, embryonal carcinoma, Wilm's tumor, cervical cancer, testicular tumor, lung carcinoma, small cell lung carcinoma, bladder carcinoma, epithelial carcinoma, glioma, astrocytoma, medulloblastoma, craniopharyngioma, ependymoma, pinealoma, hemangioblastoma, acoustic neuroma, oligodendroglioma, menangioma, melanoma, neuroblastoma, and retinoblastoma.

[0654] Diseases associated with increased apoptosis that could be detected, prevented, diagnosed, prognosticated, treated, and/or ameliorated using polynucleotides or polypeptides, as well as agonists or antagonists of the present invention, include, but are not limited to, AIDS; neurodegenerative disorders (such as Alzheimer's disease, Parkinson's disease, Amyotrophic lateral sclerosis, Retinitis pigmentosa, Cerebellar degeneration and brain tumor or prior associated disease); autoimmune disorders (such as, multiple sclerosis, Sjogren's syndrome, Hashimoto's thyroiditis, biliary cirrhosis, Behcet's disease, Crohn's disease, polymyositis, systemic lupus erythematosus and immune-related glomerulonephritis and rheumatoid arthritis) myelodysplastic syndromes (such as aplastic anemia), graft v. host disease, ischemic injury (such as that caused by myocardial infarction, stroke and reperfusion injury), liver injury (e.g., hepatitis related liver injury, ischemia/reperfusion injury, cholestosis (bile duct injury) and liver cancer); toxin-induced liver disease (such as that caused by alcohol), septic shock, cachexia and anorexia.

Wound Healing and Epithelial Cell Proliferation

[0655] In accordance with yet a further aspect of the present invention, there is provided a process for utilizing polynucleotides or polypeptides, as well as agonists or antagonists of the present invention, for therapeutic purposes, for example, to stimulate epithelial cell proliferation and basal keratinocytes for the purpose of wound healing, and to stimulate hair follicle production and healing of dermal wounds. Polynucleotides or polypeptides, as well as agonists or antagonists of the present invention, may be clinically useful in stimulating wound healing including surgical wounds, excisional wounds, deep wounds involving damage of the dermis and epidermis, eye tissue wounds, dental tissue wounds, oral cavity wounds, diabetic ulcers, dermal ulcers, cubitus ulcers, arterial ulcers, venous stasis ulcers, burns resulting from heat exposure or chemicals, and other abnormal wound healing conditions such as uremia, malnutrition, vitamin deficiencies and complications associated with systemic treatment with steroids, radiation therapy and antineoplastic drugs and antimetabolites. Polynucleotides or polypeptides, as well as agonists or antagonists of the present invention, could be used to promote dermal reestablishment subsequent to dermal loss

[0656] Polynucleotides or polypeptides, as well as agonists or antagonists of the present invention, could be used to increase the adherence of skin grafts to a wound bed and to stimulate re-epithelialization from the wound bed. The following are types of grafts that polynucleotides or polypeptides, agonists or antagonists of the present invention, could be used to increase adherence to a wound bed: autografts, artificial skin, allografts, autodermic graft, autoepdermic grafts, avacular grafts, Blair-Brown grafts, bone graft, brephoplastic grafts, cutis graft, delayed graft, dermic graft, epidermic graft, fascia graft, full thickness graft, heterologous graft, xenograft, homologous graft, hyperplastic graft, lamellar graft, mesh graft, mucosal graft, Ollier-Thiersch graft, omenpal graft, patch graft, pedicle graft, penetrating graft, split skin graft, thick split graft. Polynucleotides or polypeptides, as well as agonists or antagonists of the present invention, can be used to promote skin strength and to improve the appearance of aged skin.

[0657] It is believed that polynucleotides or polypeptides, as well as agonists or antagonists of the present invention, will also produce changes in hepatocyte proliferation, and epithelial cell proliferation in the lung, breast, pancreas, stomach, small intestine, and large intestine. Polynucleotides or polypeptides, as well as agonists or antagonists of the present invention, could promote proliferation of epithelial cells such as sebocytes, hair follicles, hepatocytes, type II pneumocytes, mucin-producing goblet cells, and other epithelial cells and their progenitors contained within the skin, lung, liver, and gastrointestinal tract. Polynucleotides or polypeptides, agonists or antagonists of the present invention, may promote proliferation of endothelial cells, keratinocytes, and basal keratinocytes.

[0658] Polynucleotides or polypeptides, as well as agonists or antagonists of the present invention, could also be used to reduce the side effects of gut toxicity that result from radiation, chemotherapy treatments or viral infections. Polynucleotides or polypeptides, as well as agonists or antagonists of the present invention, may have a cytoprotective effect on the small intestine mucosa. Polynucleotides or polypeptides, as well as agonists or antagonists of the present invention, may also stimulate healing of mucositis (mouth ulcers) that result from chemotherapy and viral infections.

[0659] Polynucleotides or polypeptides, as well as agonists or antagonists of the present invention, could further be used in full regeneration of skin in full and partial thickness skin defects, including burns, (i.e., repopulation of hair follicles, sweat glands, and sebaceous glands), treatment of other skin defects such as psoriasis. Polynucleotides or polypeptides, as well as agonists or antagonists of the present invention, could be used to treat epidermolysis bullosa, a defect in adherence of the epidermis to the underlying dermis which results in frequent, open and painful blisters by accelerating reepithelialization of these lesions. Polynucleotides or polypeptides, as well as agonists or antagonists of the present invention, could also be used to treat gastric and doudenal ulcers and help heal by scar formation of the mucosal lining and regeneration of glandular mucosa and duodenal mucosal lining more rapidly. Inflammatory bowel diseases, such as Crohn's disease and ulcerative colitis, are diseases which result in destruction of the mucosal surface of the small or large intestine, respectively. Thus, polynucleotides or polypeptides, as well as agonists or antagonists of the present invention, could be used to promote the resurfacing of the mucosal surface to aid more rapid healing and to prevent progression of inflammatory bowel disease. Treatment with polynucleotides or polypeptides, agonists or antagonists of the present invention, is expected to have a significant effect on the production of mucus throughout the gastrointestinal tract and could be used to protect the intestinal mucosa from injurious substances that are ingested or following surgery. Polynucleotides or polypeptides, as well as agonists or antagonists of the present invention, could be used to treat diseases associate with the under expression.

[0660] Moreover, polynucleotides or polypeptides, as well as agonists or antagonists of the present invention, could be used to prevent and heal damage to the lungs due to various pathological states. Polynucleotides or polypeptides, as well as agonists or antagonists of the present invention, which could stimulate proliferation and differentiation and promote the repair of alveoli and brochiolar epithelium to prevent or treat acute or chronic lung damage. For example, emphysema, which results in the progressive loss of aveoli, and inhalation injuries, i.e., resulting from smoke inhalation and burns, that cause necrosis of the bronchiolar epithelium and alveoli could be effectively treated using polynucleotides or polypeptides, agonists or antagonists of the present invention. Also, polynucleotides or polypeptides, as well as agonists or antagonists of the present invention, could be used to stimulate the proliferation of and differentiation of type II pneumocytes, which may help treat or prevent disease such as hyaline membrane diseases, such as infant respiratory distress syndrome and bronchopulmonary displasia, in premature infants.

[0661] Polynucleotides or polypeptides, as well as agonists or antagonists of the present invention, could stimulate the proliferation and differentiation of hepatocytes and, thus, could be used to alleviate or treat liver diseases and pathologies such as fulminant liver failure caused by cirrhosis, liver damage caused by viral hepatitis and toxic substances (i.e., acetaminophen, carbon tetraholoride and other hepatotoxins known in the art).

[0662] In addition, polynucleotides or polypeptides, as well as agonists or antagonists of the present invention, could be used treat or prevent the onset of diabetes mellitus. In patients with newly diagnosed Types I and II diabetes, where some islet cell function remains, polynucleotides or polypeptides, as well as agonists or antagonists of the present invention, could be used to maintain the islet function so as to alleviate, delay or prevent permanent manifestation of the disease. Also, polynucleotides or polypeptides, as well as agonists or antagonists of the present invention, could be used as an auxiliary in islet cell transplantation to improve or promote islet cell function.

Infectious Disease

[0663] Polynucleotides or polypeptides, as well as agonists or antagonists of the present invention can be used to treat or detect infectious agents. For example, by increasing the immune response, particularly increasing the proliferation and differentiation of B and/or T cells, infectious diseases may be treated. The immune response may be increased by either enhancing an existing immune response, or by initiating a new immune response. Alternatively, polynucleotides or polypeptides, as well as agonists or antagonists of the present invention may also directly inhibit the infectious agent, without necessarily eliciting an immune response.

[0664] Viruses are one example of an infectious agent that can cause disease or symptoms that can be treated or detected by a polynucleotide or polypeptide and/or agonist or antagonist of the present invention. Examples of viruses, include, but are not limited to Examples of viruses, include, but are not limited to the following DNA and RNA viruses and viral families: Arbovirus, Adenoviridae, Arenaviridae, Arterivirus, Birnaviridae, Bunyaviridae, Caliciviridae, Circoviridae, Coronaviridae, Dengue, EBV, HIV, Flaviviridae, Hepadnaviridae (Hepatitis), Herpesviridae (such as, Cytomegalovirus, Herpes Simplex, Herpes Zoster), Mononegavirus (e.g., Paramyxoviridae, Morbillivirus, Rhabdoviridae), Orthomyxoviridae (e.g., Influenza A, Influenza B, and parainfluenza), Papiloma virus, Papovaviridae, Parvoviridae, Picornaviridae, Poxyiridae (such as Smallpox or Vaccinia), Reoviridae (e.g., Rotavirus), Retroviridae (HTLV-L HTLV-II, Lentivirus), and Togaviridae (e.g., Rubivirus). Viruses falling within these families can cause a variety of diseases or symptoms, including, but not limited to: arthritis, bronchiollitis, respiratory syncytial virus, encephalitis, eye infections (e.g., conjunctivitis, keratitis), chronic fatigue syndrome, hepatitis (A, B, C, E, Chronic Active, Delta), Japanese B encephalitis, Junin, Chikungunya, Rift Valley fever, yellow fever, meningitis, opportunistic infections (e.g., AIDS), pneumonia, Burkitt's Lymphoma, chickenpox, hemorrhagic fever, Measles, Mumps, Parainfluenza, Rabies, the common cold, Polio, leukemia, Rubella, sexually transmitted diseases, skin diseases (e.g., Kaposi's, warts), and viremia. polynucleotides or polypeptides, or agonists or antagonists of the invention, can be used to treat or detect any of these symptoms or diseases. In specific embodiments, polynucleotides, polypeptides, or agonists or antagonists of the invention are used to treat: meningitis, Dengue, EBV, and/or hepatitis (e.g., hepatitis B). In an additional specific embodiment polynucleotides, polypeptides, or agonists or antagonists of the invention are used to treat patients nonresponsive to one or more other commercially available hepatitis vaccines. In a further specific embodiment polynucleotides, polypeptides, or agonists or antagonists of the invention are used to treat AIDS.

[0665] Similarly, bacterial and fungal agents that can cause disease or symptoms and that can be treated or detected by a polynucleotide or polypeptide and/or agonist or antagonist of the present invention include, but not limited to, the following Gram-Negative and Gram-positive bacteria, bacterial families, and fungi: Actinomyces (e.g., Norcardia), Acinetobacter, Cryptococcus neoformans, Aspergillus, Bacillaceae (e.g., Bacillus anthrasis), Bacteroides (e.g., Bacteroides fragilis), Blastomycosis, Bordetella, Borrelia (e.g., Borrelia burgdorferi), Brucella, Candidia, Campylobacter, Chlamydia, Clostridium (e.g., Clostridium botulinum, Clostridium dificile, Clostridium perfringens, Clostridium tetani), Coccidioides, Corynebacterium (e.g., Corynebacterium diptheriae), Cryptococcus, Dermatocycoses, E. coli (e.g., Enterotoxigenic E. coli and Enterohemorrhagic E. coli), Enterobacter (e.g. Enterobacter aerogenes), Enterobacteriaceae (Klebsiella, Salmonella (e.g., Salmonella typhi, Salmonella enteritidis, Salmonella typhi), Serratia, Yersinia, Shigella), Erysipelothrix, Haemophilus (e.g., Haemophilus influenza type B), Helicobacter, Legionella (e.g., Legionella pneumophila), Leptospira, Listeria (e.g., Listeria monocytogenes), Mycoplasma, Mycobacterium (e.g., Mycobacterium leprae and Mycobacterium tuberculosis), Vibrio (e.g., Vibrio cholerae), Neisseriaceae (e.g., Neisseria gonorrhea, Neisseria meningitidis), Pasteurellacea, Proteus, Pseudomonas (e.g., Pseudomonas aeruginosa), Rickettsiaceae, Spirochetes (e.g., Treponema spp., Leptospira spp., Borrelia spp.), Shigella spp., Staphylococcus (e.g., Staphylococcus aureus), Meningiococcus, Pneumococcus and Streptococcus (e.g., Streptococcus pneumoniae and Groups A, B, and C Streptococci), and Ureaplasmas. These bacterial, parasitic, and fungal families can cause diseases or symptoms, including, but not limited to: antibiotic-resistant infections, bacteremia, endocarditis, septicemia, eye infections (e.g., conjunctivitis), uveitis, tuberculosis, gingivitis, bacterial diarrhea, opportunistic infections (e.g., AIDS related infections), paronychia, prosthesis-related infections, dental caries, Reiter's Disease, respiratory tract infections, such as Whooping Cough or Empyema, sepsis, Lyme Disease, Cat-Scratch Disease, dysentery, paratyphoid fever, food poisoning, Legionella disease, chronic and acute inflammation, erythema, yeast infections, typhoid, pneumonia, gonorrhea, meningitis (e.g., mengitis types A and B), chlamydia, syphillis, diphtheria, leprosy, brucellosis, peptic ulcers, anthrax, spontaneous abortions, birth defects, pneumonia, lung infections, ear infections, deafness, blindness, lethargy, malaise, vomiting, chronic diarrhea, Crohn's disease, colitis, vaginosis, sterility, pelvic inflammatory diseases, candidiasis, paratuberculosis, tuberculosis, lupus, botulism, gangrene, tetanus, impetigo, Rheumatic Fever, Scarlet Fever, sexually transmitted diseases, skin diseases (e.g., cellulitis, dermatocycoses), toxemia, urinary tract infections, wound infections, noscomial infections. Polynucleotides or polypeptides, agonists or antagonists of the invention, can be used to treat or detect any of these symptoms or diseases. In specific embodiments, polynucleotides, polypeptides, agonists or antagonists of the invention are used to treat: tetanus, diptheria, botulism, and/or meningitis type B.

[0666] Moreover, parasitic agents causing disease or symptoms that can be detected, prevented, diagnosed, prognosticated, treated, and/or ameliorated by a polynucleotide or polypeptide and/or agonist or antagonist of the present invention include, but not limited to, the following families or class: Amebiasis, Babesiosis, Coccidiosis, Cryptosporidiosis, Dientamoebiasis, Dourine, Ectoparasitic, Giardias, Helminthiasis, Leishmaniasis, Schistisoma, Theileriasis, Toxoplasmosis, Trypanosomiasis, and Trichomonas and Sporozoans (e.g., Plasmodium virax, Plasmodium falciparium, Plasmodium malariae and Plasmodium ovale). These parasites can cause a variety of diseases or symptoms, including, but not limited to: Scabies, Trombiculiasis, eye infections, intestinal disease (e.g., dysentery, giardiasis), liver disease, lung disease, opportunistic infections (e.g., AIDS related), malaria, pregnancy complications, and toxoplasmosis. polynucleotides or polypeptides, or agonists or antagonists of the invention, can be used to detect, prevent, diagnose, prognosticate, treat, and/or ameliorate any of these symptoms or diseases. In specific embodiments, polynucleotides, polypeptides, or agonists or antagonists of the invention are used to detect, prevent, diagnose, treat, and/or ameliorate malaria.

[0667] Polynucleotides or polypeptides, as well as agonists or antagonists of the present invention of the present invention could either be by administering an effective amount of a polypeptide to the patient, or by removing cells from the patient, supplying the cells with a polynucleotide of the present invention, and returning the engineered cells to the patient (ex vivo therapy). Moreover, the polypeptide or polynucleotide of the present invention can be used as an antigen in a vaccine to raise an immune response against infectious disease.

Regeneration

[0668] Polynucleotides or polypeptides, as well as agonists or antagonists of the present invention can be used to differentiate, proliferate, and attract cells, leading to the regeneration of tissues. (See, Science 276:59-87 (1997)). The regeneration of tissues could be used to repair, replace, or protect tissue damaged by congenital defects, trauma (wounds, burns, incisions, or ulcers), age, disease (e.g. osteoporosis, osteocarthritis, periodontal disease, liver failure), surgery, including cosmetic plastic surgery, fibrosis, reperfusion injury, or systemic cytokine damage.

[0669] Tissues that could be regenerated using the present invention include organs (e.g., pancreas, liver, intestine, kidney, skin, endothelium), muscle (smooth, skeletal or cardiac), vasculature (including vascular and lymphatics), nervous, hematopoietic, and skeletal (bone, cartilage, tendon, and ligament) tissue. Preferably, regeneration occurs without or decreased scarring. Regeneration also may include angiogenesis.

[0670] Moreover, polynucleotides or polypeptides, as well as agonists or antagonists of the present invention, may increase regeneration of tissues difficult to heal. For example, increased tendon/ligament regeneration would quicken recovery time after damage. Polynucleotides or polypeptides, as well as agonists or antagonists of the present invention could also be used prophylactically in an effort to avoid damage. Specific diseases that could be treated include of tendinitis, carpal tunnel syndrome, and other tendon or ligament defects. A further example of tissue regeneration of non-healing wounds includes pressure ulcers, ulcers associated with vascular insufficiency, surgical, and traumatic wounds.

[0671] Similarly, nerve and brain tissue could also be regenerated by using polynucleotides or polypeptides, as well as agonists or antagonists of the present invention, to proliferate and differentiate nerve cells. Diseases that could be treated using this method include central and peripheral nervous system diseases, neuropathies, or mechanical and traumatic disorders (e.g., spinal cord disorders, head trauma, cerebrovascular disease, and stoke). Specifically, diseases associated with peripheral nerve injuries, peripheral neuropathy (e.g., resulting from chemotherapy or other medical therapies), localized neuropathies, and central nervous system diseases (e.g., Alzheimer's disease, Parkinson's disease, Huntington's disease, amyotrophic lateral sclerosis, and Shy-Drager syndrome), could all be treated using the polynucleotides or polypeptides, as well as agonists or antagonists of the present invention.

Chemotaxis

[0672] Polynucleotides or polypeptides, as well as agonists or antagonists of the present invention may have chemotaxis activity. A chemotaxic molecule attracts or mobilizes cells (e.g., monocytes, fibroblasts, neutrophils, T-cells, mast cells, eosinophils, epithelial and/or endothelial cells) to a particular site in the body, such as inflammation, infection, or site of hyperproliferation. The mobilized cells can then fight off and/or heal the particular trauma or abnormality.

[0673] Polynucleotides or polypeptides, as well as agonists or antagonists of the present invention may increase chemotaxic activity of particular cells. These chemotactic molecules can then be used to treat inflammation, infection, hyperproliferative disorders, or any immune system disorder by increasing the number of cells targeted to a particular location in the body. For example, chemotaxic molecules can be used to treat wounds and other trauma to tissues by attracting immune cells to the injured location. Chemotactic molecules of the present invention can also attract fibroblasts, which can be used to treat wounds.

[0674] It is also contemplated that polynucleotides or polypeptides, as well as agonists or antagonists of the present invention may inhibit chemotactic activity. These molecules could also be used to treat disorders. Thus, polynucleotides or polypeptides, as well as agonists or antagonists of the present invention could be used as an inhibitor of chemotaxis.

Binding Activity

[0675] A polypeptide of the present invention may be used to screen for molecules that bind to the polypeptide or for molecules to which the polypeptide binds. The binding of the polypeptide and the molecule may activate (agonist), increase, inhibit (antagonist), or decrease activity of the polypeptide or the molecule bound. Examples of such molecules include antibodies, oligonucleotides, proteins (e.g., receptors), or small molecules.

[0676] Preferably, the molecule is closely related to the natural ligand of the polypeptide, e.g., a fragment of the ligand, or a natural substrate, a ligand, a structural or functional mimetic. (See, Coligan et al., Current Protocols in Immunology 1(2):Chapter 5 (1991)). Similarly, the molecule can be closely related to the natural receptor to which the polypeptide binds, or at least, a fragment of the receptor capable of being bound by the polypeptide (e.g., active site). In either case, the molecule can be rationally designed using known techniques.

[0677] Preferably, the screening for these molecules involves producing appropriate cells which express the polypeptide. Preferred cells include cells from mammals, yeast, Drosophila, or E. coli. Cells expressing the polypeptide (or cell membrane containing the expressed polypeptide) are then preferably contacted with a test compound potentially containing the molecule to observe binding, stimulation, or inhibition of activity of either the polypeptide or the molecule.

[0678] The assay may simply test binding of a candidate compound to the polypeptide, wherein binding is detected by a label, or in an assay involving competition with a labeled competitor. Further, the assay may test whether the candidate compound results in a signal generated by binding to the polypeptide.

[0679] Alternatively, the assay can be carried out using cell-free preparations, polypeptide/molecule affixed to a solid support, chemical libraries, or natural product mixtures. The assay may also simply comprise the steps of mixing a candidate compound with a solution containing a polypeptide, measuring polypeptide/molecule activity or binding, and comparing the polypeptide/molecule activity or binding to a standard.

[0680] Preferably, an ELISA assay can measure polypeptide level or activity in a sample (e.g., biological sample) using a monoclonal or polyclonal antibody. The antibody can measure polypeptide level or activity by either binding, directly or indirectly, to the polypeptide or by competing with the polypeptide for a substrate.

[0681] Additionally, the receptor to which the polypeptide of the present invention binds can be identified by numerous methods known to those of skill in the art, for example, ligand panning and FACS sorting (Coligan, et al., Current Protocols in Immun., 1(2), Chapter 5, (1991)). For example, expression cloning is employed wherein polyadenylated RNA is prepared from a cell responsive to the polypeptides, for example, NIH3T3 cells which are known to contain multiple receptors for the FGF family proteins, and SC-3 cells, and a cDNA library created from this RNA is divided into pools and used to transfect COS cells or other cells that are not responsive to the polypeptides. Transfected cells which are grown on glass slides are exposed to the polypeptide of the present invention, after they have been labeled. The polypeptides can be labeled by a variety of means including iodination or inclusion of a recognition site for a site-specific protein kinase.

[0682] Following fixation and incubation, the slides are subjected to auto-radiographic analysis. Positive pools are identified and sub-pools are prepared and re-transfected using an iterative sub-pooling and re-screening process, eventually yielding a single clones that encodes the putative receptor.

[0683] As an alternative approach for receptor identification, the labeled polypeptides can be photoaffinity linked with cell membrane or extract preparations that express the receptor molecule. Cross-linked material is resolved by PAGE analysis and exposed to X-ray film. The labeled complex containing the receptors of the polypeptides can be excised, resolved into peptide fragments, and subjected to protein microsequencing. The amino acid sequence obtained from microsequencing would be used to design a set of degenerate oligonucleotide probes to screen a cDNA library to identify the genes encoding the putative receptors.

[0684] Moreover, the techniques of gene-shuffling, motif-shuffling, exon-shuffling, and/or codon-shuffling (collectively referred to as “DNA shuffling”) may be employed to modulate the activities of the polypeptide of the present invention thereby effectively generating agonists and antagonists of the polypeptide of the present invention. See generally, U.S. Pat. Nos. 5,605,793, 5,811,238, 5,830,721, 5,834,252, and 5,837,458, and Patten, P. A., et al., Curr. Opinion Biotechnol. 8:724-33 (1997); Harayama, S. Trends Biotechnol. 16(2):76-82 (1998); Hansson, L. O., et al., J. Mol. Biol. 287:265-76 (1999); and Lorenzo, M. M. and Blasco, R. Biotechniques 24(2):308-13 (1998); each of these patents and publications are hereby incorporated by reference). In one embodiment, alteration of polynucleotides and corresponding polypeptides may be achieved by DNA shuffling. DNA shuffling involves the assembly of two or more DNA segments into a desired molecule by homologous, or site-specific, recombination. In another embodiment, polynucleotides and corresponding polypeptides may be altered by being subjected to random mutagenesis by error-prone PCR, random nucleotide insertion or other methods prior to recombination. In another embodiment, one or more components, motifs, sections, parts, domains, fragments, etc., of the polypeptide of the present invention may be recombined with one or more components, motifs, sections, parts, domains, fragments, etc. of one or more heterologous molecules. In preferred embodiments, the heterologous molecules are family members. In further preferred embodiments, the heterologous molecule is a growth factor such as, for example, platelet-derived growth factor (PDGF), insulin-like growth factor (IGF-1), transforming growth factor (TGF)-alpha, epidermal growth factor (EGF), fibroblast growth factor (FGF), TGF-beta, bone morphogenetic protein (BMP)-2, BMP-4, BMP-5, BMP-6, BMP-7, activins A and B, decapentaplegic(dpp), 60A, OP-2, dorsalin, growth differentiation factors (GDFs), nodal, MIS, inhibin-alpha, TGF-beta1, TGF-beta2, TGF-beta3, TGF-beta5, and glial-derived neurotrophic factor (GDNF).

[0685] Other preferred fragments are biologically active fragments of the polypeptide of the present invention. Biologically active fragments are those exhibiting activity similar, but not necessarily identical, to an activity of the polypeptide of the present invention. The biological activity of the fragments may include an improved desired activity, or a decreased undesirable activity.

[0686] Additionally, this invention provides a method of screening compounds to identify those which modulate the action of the polypeptide of the present invention. An example of such an assay comprises combining a mammalian fibroblast cell, a the polypeptide of the present invention, the compound to be screened and ³[H] thymidine under cell culture conditions where the fibroblast cell would normally proliferate. A control assay may be performed in the absence of the compound to be screened and compared to the amount of fibroblast proliferation in the presence of the compound to determine if the compound stimulates proliferation by determining the uptake of ³[H] thymidine in each case. The amount of fibroblast cell proliferation is measured by liquid scintillation chromatography which measures the incorporation of ³[H] thymidine. Both agonist and antagonist compounds may be identified by this procedure.

[0687] In another method, a mammalian cell or membrane preparation expressing a receptor for a polypeptide of the present invention is incubated with a labeled polypeptide of the present invention in the presence of the compound. The ability of the compound to enhance or block this interaction could then be measured. Alternatively, the response of a known second messenger system following interaction of a compound to be screened and the receptor is measured and the ability of the compound to bind to the receptor and elicit a second messenger response is measured to determine if the compound is a potential agonist or antagonist. Such second messenger systems include but are not limited to, cAMP guanylate cyclase, ion channels or phosphoinositide hydrolysis.

[0688] All of these above assays can be used as diagnostic or prognostic markers. The molecules discovered using these assays can be used to treat disease or to bring about a particular result in a patient (e.g., blood vessel growth) by activating or inhibiting the polypeptide/molecule. Moreover, the assays can discover agents which may inhibit or enhance the production of the polypeptides of the invention from suitably manipulated cells or tissues.

[0689] Therefore, the invention includes a method of identifying compounds which bind to a polypeptide of the invention comprising the steps of: (a) incubating a candidate binding compound with a polypeptide of the present invention; and (b) determining if binding has occurred. Moreover, the invention includes a method of identifying agonists/antagonists comprising the steps of: (a) incubating a candidate compound with a polypeptide of the present invention, (b) assaying a biological activity, and (b) determining if a biological activity of the polypeptide has been altered.

Targeted Delivery

[0690] In another embodiment, the invention provides a method of delivering compositions to targeted cells expressing a receptor for a polypeptide of the invention, or cells expressing a cell bound form of a polypeptide of the invention.

[0691] As discussed herein, polypeptides or antibodies of the invention may be associated with heterologous polypeptides, heterologous nucleic acids, toxins, or prodrugs via hydrophobic, hydrophilic, ionic and/or covalent interactions. In one embodiment, the invention provides a method for the specific delivery of compositions of the invention to cells by administering polypeptides of the invention (including antibodies) that are associated with heterologous polypeptides or nucleic acids. In one example, the invention provides a method for delivering a therapeutic protein into the targeted cell. In another example, the invention provides a method for delivering a single stranded nucleic acid (e.g., antisense or ribozymes) or double stranded nucleic acid (e.g., DNA that can integrate into the cell's genome or replicate episomally and that can be transcribed) into the targeted cell.

[0692] In another embodiment, the invention provides a method for the specific destruction of cells (e.g., the destruction of tumor cells) by administering polypeptides of the invention (e.g., polypeptides of the invention or antibodies of the invention) in association with toxins or cytotoxic prodrugs.

[0693] By “toxin” is meant compounds that bind and activate endogenous cytotoxic effector systems, radioisotopes, holotoxins, modified toxins, catalytic subunits of toxins, or any molecules or enzymes not normally present in or on the surface of a cell that under defined conditions cause the cell's death. Toxins that may be used according to the methods of the invention include, but are not limited to, radioisotopes known in the art, compounds such as, for example, antibodies (or complement fixing containing portions thereof) that bind an inherent or induced endogenous cytotoxic effector system, thymidine kinase, endonuclease, RNAse, alpha toxin, ricin, abrin, Pseudomonas exotoxin A, diphtheria toxin, saporin, momordin, gelonin, pokeweed antiviral protein, alpha-sarcin and cholera toxin. By “cytotoxic prodrug” is meant a non-toxic compound that is converted by an enzyme, normally present in the cell, into a cytotoxic compound. Cytotoxic prodrugs that may be used according to the methods of the invention include, but are not limited to, glutamyl derivatives of benzoic acid mustard alkylating agent, phosphate derivatives of etoposide or mitomycin C, cytosine arabinoside, daunorubisin, and phenoxyacetamide derivatives of doxorubicin.

Drug Screening

[0694] Further contemplated is the use of the polypeptides of the present invention, or the polynucleotides encoding these polypeptides, to screen for molecules which modify the activities of the polypeptides of the present invention. Such a method would include contacting the polypeptide of the present invention with a selected compound(s) suspected of having antagonist or agonist activity, and assaying the activity of these polypeptides following binding.

[0695] This invention is particularly useful for screening therapeutic compounds by using the polypeptides of the present invention, or binding fragments thereof, in any of a variety of drug screening techniques. The polypeptide or fragment employed in such a test may be affixed to a solid support, expressed on a cell surface, free in solution, or located intracellularly. One method of drug screening utilizes eukaryotic or prokaryotic host cells which are stably transformed with recombinant nucleic acids expressing the polypeptide or fragment. Drugs are screened against such transformed cells in competitive binding assays. One may measure, for example, the formulation of complexes between the agent being tested and a polypeptide of the present invention.

[0696] Thus, the present invention provides methods of screening for drugs or any other agents which affect activities mediated by the polypeptides of the present invention. These methods comprise contacting such an agent with a polypeptide of the present invention or a fragment thereof and assaying for the presence of a complex between the agent and the polypeptide or a fragment thereof, by methods well known in the art. In such a competitive binding assay, the agents to screen are typically labeled. Following incubation, free agent is separated from that present in bound form, and the amount of free or uncomplexed label is a measure of the ability of a particular agent to bind to the polypeptides of the present invention.

[0697] Another technique for drug screening provides high throughput screening for compounds having suitable binding affinity to the polypeptides of the present invention, and is described in great detail in European Patent Application 84/03564, published on Sep. 13, 1984, which is incorporated herein by reference herein. Briefly stated, large numbers of different small peptide test compounds are synthesized on a solid substrate, such as plastic pins or some other surface. The peptide test compounds are reacted with polypeptides of the present invention and washed. Bound polypeptides are then detected by methods well known in the art. Purified polypeptides are coated directly onto plates for use in the aforementioned drug screening techniques. In addition, non-neutralizing antibodies may be used to capture the peptide and immobilize it on the solid support.

[0698] This invention also contemplates the use of competitive drug screening assays in which neutralizing antibodies capable of binding polypeptides of the present invention specifically compete with a test compound for binding to the polypeptides or fragments thereof. In this manner, the antibodies are used to detect the presence of any peptide which shares one or more antigenic epitopes with a polypeptide of the invention.

Antisense And Ribozyme (Antagonists)

[0699] In specific embodiments, antagonists according to the present invention are nucleic acids corresponding to the sequences contained in SEQ ID NO:X, or the complementary strand thereof, and/or to cDNA sequences contained in cDNA ATCC Deposit No:Z identified for example, in Table 1A and/or 1B. In one embodiment, antisense sequence is generated internally, by the organism, in another embodiment, the antisense sequence is separately administered (see, for example, O'Connor, J., Neurochem. 56:560 (1991). Oligodeoxynucleotides as Antisense Inhibitors of Gene Expression, CRC Press, Boca Raton, Fla. (1988). Antisense technology can be used to control gene expression through antisense DNA or RNA, or through triple-helix formation. Antisense techniques are discussed for example, in Okano, J., Neurochem 56:560 (1991); Oligodeoxynucleotides as Antisense Inhibitors of Gene Expression, CRC Press, Boca Raton, Fla. (1988). Triple helix formation is discussed in, for instance, Lee et al., Nucleic Acids Research 6:3073 (1979); Cooney et al., Science 241:456 (1988), and Dervan et al., Science 251:1300 (1991). The methods are based on binding of a polynucleotide to a complementary DNA or RNA.

[0700] For example, the use of c-myc and c-myb antisense RNA constructs to inhibit the growth of the non-lymphocytic leukemia cell line HL-60 and other cell lines was previously described. (Wickstrom et al. (1988); Anfossi et al. (1989)). These experiments were performed in vitro by incubating cells with the oligoribonucleotide. A similar procedure for in vivo use is described in WO 91/15580. Briefly, a pair of oligonucleotides for a given antisense RNA is produced as follows: A sequence complimentary to the first 15 bases of the open reading frame is flanked by an EcoR1 site on the 5 end and a HindIII site on the 3 end. Next, the pair of oligonucleotides is heated at 90° C. for one minute and then annealed in 2× ligation buffer (20 mM TRIS HCl pH 7.5, 10 mM MgCl2, 10MM dithiothreitol (DTT) and 0.2 mM ATP) and then ligated to the EcoR1/Hind III site of the retroviral vector PMV7 (WO 91/15580).

[0701] For example, the 5′ coding portion of a polynucleotide that encodes the polypeptide of the present invention may be used to design an antisense RNA oligonucleotide of from about 10 to 40 base pairs in length. A DNA oligonucleotide is designed to be complementary to a region of the gene involved in transcription thereby preventing transcription and the production of the receptor. The antisense RNA oligonucleotide hybridizes to the mRNA in vivo and blocks translation of the mRNA molecule into receptor polypeptide.

[0702] In one embodiment, the antisense nucleic acid of the invention is produced intracellularly by transcription from an exogenous sequence. For example, a vector or a portion thereof, is transcribed, producing an antisense nucleic acid (RNA) of the invention. Such a vector would contain a sequence encoding the antisense nucleic acid. Such a vector can remain episomal or become chromosomally integrated, as long as it can be transcribed to produce the desired antisense RNA. Such vectors can be constructed by recombinant DNA technology methods standard in the art. Vectors can be plasmid, viral, or others known in the art, used for replication and expression in vertebrate cells. Expression of the sequence encoding the polypeptide of the present invention or fragments thereof, can be by any promoter known in the art to act in vertebrate, preferably human cells. Such promoters can be inducible or constitutive. Such promoters include, but are not limited to, the SV40 early promoter region (Bernoist and Chambon, Nature 29:304-310 (1981), the promoter contained in the 3′ long terminal repeat of Rous sarcoma virus (Yanamoto et al., Cell 22:787-797 (1980), the herpes thymidine promoter (Wagner et al., Proc. Natl. Acad. Sci. U.S.A. 78:1441-1445 (1981), the regulatory sequences of the metallothionein gene (Brinster, et al., Nature 296:39-42 (1982)), etc.

[0703] The antisense nucleic acids of the invention comprise a sequence complementary to at least a portion of an RNA transcript of a gene of the present invention. However, absolute complementarity, although preferred, is not required. A sequence “complementary to at least a portion of an RNA,” referred to herein, means a sequence having sufficient complementarity to be able to hybridize with the RNA, forming a stable duplex; in the case of double stranded antisense nucleic acids, a single strand of the duplex DNA may thus be tested, or triplex formation may be assayed. The ability to hybridize will depend on both the degree of complementarity and the length of the antisense nucleic acid. Generally, the larger the hybridizing nucleic acid, the more base mismatches with a RNA it may contain and still form a stable duplex (or triplex as the case may be). One skilled in the art can ascertain a tolerable degree of mismatch by use of standard procedures to determine the melting point of the hybridized complex.

[0704] Oligonucleotides that are complementary to the 5′ end of the message, e.g., the 5′ untranslated sequence up to and including the AUG initiation codon, should work most efficiently at inhibiting translation. However, sequences complementary to the 3′ untranslated sequences of mRNAs have been shown to be effective at inhibiting translation of mRNAs as well. See generally, Wagner, R., 1994, Nature 372:333-335. Thus, oligonucleotides complementary to either the 5′- or 3′-non-translated, non-coding regions of polynucleotide sequences described herein could be used in an antisense approach to inhibit translation of endogenous mRNA. Oligonucleotides complementary to the 5′ untranslated region of the mRNA should include the complement of the AUG start codon. Antisense oligonucleotides complementary to mRNA coding regions are less efficient inhibitors of translation but could be used in accordance with the invention. Whether designed to hybridize to the 5′-, 3′- or coding region of mRNA of the present invention, antisense nucleic acids should be at least six nucleotides in length, and are preferably oligonucleotides ranging from 6 to about 50 nucleotides in length. In specific aspects the oligonucleotide is at least 10 nucleotides, at least 17 nucleotides, at least 25 nucleotides or at least 50 nucleotides.

[0705] The polynucleotides of the invention can be DNA or RNA or chimeric mixtures or derivatives or modified versions thereof, single-stranded or double-stranded. The oligonucleotide can be modified at the base moiety, sugar moiety, or phosphate backbone, for example, to improve stability of the molecule, hybridization, etc. The oligonucleotide may include other appended groups such as peptides (e.g., for targeting host cell receptors in vivo), or agents facilitating transport across the cell membrane (see, e.g., Letsinger et al., 1989, Proc. Natl. Acad. Sci. U.S.A. 86:6553-6556; Lemaitre et al., 1987, Proc. Natl. Acad. Sci. 84:648-652; PCT Publication No. WO88/09810, published Dec. 15, 1988) or the blood-brain barrier (see, e.g., PCT Publication No. WO89/10134, published Apr. 25, 1988), hybridization-triggered cleavage agents. (See, e.g., Krol et al., 1988, BioTechniques 6:958-976) or intercalating agents. (See, e.g., Zon, 1988, Pharm. Res. 5:539-549). To this end, the oligonucleotide may be conjugated to another molecule, e.g., a peptide, hybridization triggered cross-linking agent, transport agent, hybridization-triggered cleavage agent, etc.

[0706] The antisense oligonucleotide may comprise at least one modified base moiety which is selected from the group including, but not limited to, 5-fluorouracil, 5-bromouracil, 5-chlorouracil, 5-iodouracil, hypoxanthine, xantine, 4-acetylcytosine, 5-(carboxyhydroxylmethyl) uracil, 5-carboxymethylaminomethyl-2-thiouridine, 5-carboxymethylaminomethyluracil, dihydrouracil, beta-D-galactosylqueosine, inosine, N6-isopentenyladenine, 1-methylguanine, 1-methylinosine, 2,2-dimethylguanine, 2-methyladenine, 2-methylguanine, 3-methylcytosine, 5-methylcytosine, N6-adenine, 7-methylguanine, 5-methylaminomethyluracil, 5-methoxyaminomethyl-2-thiouracil, beta-D-mannosylqueosine, 5′-methoxycarboxymethyluracil, 5-methoxyuracil, 2-methylthio-N-6-isopentenyladenine, uracil-5-oxyacetic acid (v), wybutoxosine, pseudouracil, queosine, 2-thiocytosine, 5-methyl-2-thiouracil, 2-thiouracil, 4-thiouracil, 5-methyluracil, uracil-5-oxyacetic acid methylester, uracil-5-oxyacetic acid (v), 5-methyl-2-thiouracil, 3-(3-amino-3-N-2-carboxypropyl) uracil, (acp3)w, and 2,6-diaminopurine.

[0707] The antisense oligonucleotide may also comprise at least one modified sugar moiety selected from the group including, but not limited to, arabinose, 2-fluoroarabinose, xylulose, and hexose.

[0708] In yet another embodiment, the antisense oligonucleotide comprises at least one modified phosphate backbone selected from the group including, but not limited to, a phosphorothioate, a phosphorodithioate, a phosphoramidothioate, a phosphoramidate, a phosphordiamidate, a methylphosphonate, an alkyl phosphotriester, and a formacetal or analog thereof.

[0709] In yet another embodiment, the antisense oligonucleotide is an a-anomeric oligonucleotide. An a-anomeric oligonucleotide forms specific double-stranded hybrids with complementary RNA in which, contrary to the usual b-units, the strands run parallel to each other (Gautier et al., 1987, Nucl. Acids Res. 15:6625-6641). The oligonucleotide is a 2′-0-methylribonucleotide (Inoue et al., 1987, Nucl. Acids Res. 15:6131-6148), or a chimeric RNA-DNA analogue (Inoue et al., 1987, FEBS Lett. 215:327-330).

[0710] Polynucleotides of the invention may be synthesized by standard methods known in the art, e.g. by use of an automated DNA synthesizer (such as are commercially available from Biosearch, Applied Biosystems, etc.). As examples, phosphorothioate oligonucleotides may be synthesized by the method of Stein et al. (1988, Nucl. Acids Res. 16:3209), methylphosphonate oligonucleotides can be prepared by use of controlled pore glass polymer supports (Sarin et al., 1988, Proc. Natl. Acad. Sci. U.S.A. 85:7448-7451), etc.

[0711] While antisense nucleotides complementary to the coding region sequence could be used, those complementary to the transcribed untranslated region are most preferred.

[0712] Potential antagonists according to the invention also include catalytic RNA, or a ribozyme (See, e.g., PCT International Publication WO 90/11364, published Oct. 4, 1990; Sarver et al, Science 247:1222-1225 (1990). While ribozymes that cleave mRNA at site specific recognition sequences can be used to destroy mRNAs, the use of hammerhead ribozymes is preferred. Hammerhead ribozymes cleave mRNAs at locations dictated by flanling regions that form complementary base pairs with the target mRNA. The sole requirement is that the target mRNA have the following sequence of two bases: 5′-UG-3′. The construction and production of hammerhead ribozymes is well known in the art and is described more fully in Haseloff and Gerlach, Nature 334:585-591 (1988). There are numerous potential hammerhead ribozyme cleavage sites within the nucleotide sequence of SEQ ID NO:X. Preferably, the ribozyme is engineered so that the cleavage recognition site is located near the 5′ end of the mRNA; i.e., to increase efficiency and minimize the intracellular accumulation of non-functional mRNA transcripts.

[0713] As in the antisense approach, the ribozymes of the invention can be composed of modified oligonucleotides (e.g., for improved stability, targeting, etc.) and should be delivered to cells which express in vivo. DNA constructs encoding the ribozyme may be introduced into the cell in the same manner as described above for the introduction of antisense encoding DNA. A preferred method of delivery involves using a DNA construct “encoding” the ribozyme under the control of a strong constitutive promoter, such as, for example, pol III or pol II promoter, so that transfected cells will produce sufficient quantities of the ribozyme to destroy endogenous messages and inhibit translation. Since ribozymes unlike antisense molecules, are catalytic, a lower intracellular concentration is required for efficiency.

[0714] Antagonist/agonist compounds may be employed to inhibit the cell growth and proliferation effects of the polypeptides of the present invention on neoplastic cells and tissues, i.e. stimulation of angiogenesis of tumors, and, therefore, retard or prevent abnormal cellular growth and proliferation, for example, in tumor formation or growth.

[0715] The antagonist/agonist may also be employed to prevent hyper-vascular diseases, and prevent the proliferation of epithelial lens cells after extracapsular cataract surgery. Prevention of the mitogenic activity of the polypeptides of the present invention may also be desirous in cases such as restenosis after balloon angioplasty.

[0716] The antagonist/agonist may also be employed to prevent the growth of scar tissue during wound healing.

[0717] The antagonist/agonist may also be employed to treat the diseases described herein.

[0718] Thus, the invention provides a method of treating disorders or diseases, including but not limited to the disorders or diseases listed throughout this application, associated with overexpression of a polynucleotide of the present invention by administering to a patient (a) an antisense molecule directed to the polynucleotide of the present invention, and/or (b) a ribozyme directed to the polynucleotide of the present invention.

Binding Peptides and Other Molecules

[0719] The invention also encompasses screening methods for identifying polypeptides and nonpolypeptides that bind polypeptides of the invention, and the binding molecules identified thereby. These binding molecules are useful, for example, as agonists and antagonists of the polypeptides of the invention. Such agonists and antagonists can be used, in accordance with the invention, in the therapeutic embodiments described in detail, below.

[0720] This method comprises the steps of:
[0721] contacting polypeptides of the invention with a plurality of molecules; and
[0722] identifying a molecule that binds the polypeptides of the invention.

[0723] The step of contacting the polypeptides of the invention with the plurality of molecules may be effected in a number of ways. For example, one may contemplate immobilizing the polypeptides on a solid support and bringing a solution of the plurality of molecules in contact with the immobilized polypeptides. Such a procedure would be akin to an affinity chromatographic process, with the affinity matrix being comprised of the immobilized polypeptides of the invention. The molecules having a selective affinity for the polypeptides can then be purified by affinity selection. The nature of the solid support, process for attachment of the polypeptides to the solid support, solvent, and conditions of the affinity isolation or selection are largely conventional and well known to those of ordinary skill in the art.

[0724] Alternatively, one may also separate a plurality of polypeptides into substantially separate fractions comprising a subset of or individual polypeptides. For instance, one can separate the plurality of polypeptides by gel electrophoresis, column chromatography, or like method known to those of ordinary skill for the separation of polypeptides. The individual polypeptides can also be produced by a transformed host cell in such a way as to be expressed on or about its outer surface (e.g., a recombinant phage). Individual isolates can then be “probed” by the polypeptides of the invention, optionally in the presence of an inducer should one be required for expression, to determine if any selective affinity interaction takes place between the polypeptides and the individual clone. Prior to contacting the polypeptides with each fraction comprising individual polypeptides, the polypeptides could first be transferred to a solid support for additional convenience. Such a solid support may simply be a piece of filter membrane, such as one made of nitrocellulose or nylon. In this manner, positive clones could be identified from a collection of transformed host cells of an expression library, which harbor a DNA construct encoding a polypeptide having a selective affinity for polypeptides of the invention. Furthermore, the amino acid sequence of the polypeptide having a selective affinity for the polypeptides of the invention can be determined directly by conventional means or the coding sequence of the DNA encoding the polypeptide can frequently be determined more conveniently. The primary sequence can then be deduced from the corresponding DNA sequence. If the amino acid sequence is to be determined from the polypeptide itself, one may use microsequencing techniques. The sequencing technique may include mass spectroscopy.

[0725] In certain situations, it may be desirable to wash away any unbound polypeptides from a mixture of the polypeptides of the invention and the plurality of polypeptides prior to attempting to determine or to detect the presence of a selective affinity interaction. Such a wash step may be particularly desirable when the polypeptides of the invention or the plurality of polypeptides are bound to a solid support.

[0726] The plurality of molecules provided according to this method may be provided by way of diversity libraries, such as random or combinatorial peptide or nonpeptide libraries which can be screened for molecules that specifically bind polypeptides of the invention. Many libraries are known in the art that can be used, e.g., chemically synthesized libraries, recombinant (e.g., phage display libraries), and in vitro translation-based libraries. Examples of chemically synthesized libraries are described in Fodor et al., 1991, Science 251:767-773; Houghten et al., 1991, Nature 354:84-86; Lam et al., 1991, Nature 354:82-84; Medynski, 1994, Bio/Technology 12:709-710; Gallop et al., 1994, J. Medicinal Chemistry 37(9):1233-1251; Ohlmeyer et al., 1993, Proc. Natl. Acad. Sci. USA 90:10922-10926; Erb et al., 1994, Proc. Natl. Acad. Sci. USA 91:11422-11426; Houghten et al., 1992, Biotechniques 13:412; Jayawickreme et al., 1994, Proc. Natl. Acad. Sci. USA 91:1614-1618; Salmon et al., 1993, Proc. Natl. Acad. Sci. USA 90:11708-11712; PCT Publication No. WO 93/20242; and Brenner and Lerner, 1992, Proc. Natl. Acad. Sci. USA 89:5381-5383.

[0727] Examples of phage display libraries are described in Scott and Smith, 1990, Science 249:386-390; Devlin et al., 1990, Science, 249:404-406; Christian, R. B., et al., 1992, J. Mol. Biol. 227:711-718); Lenstra, 1992, J. Immunol. Meth. 152:149-157; Kay et al., 1993′, Gene 128:59-65; and PCT Publication No. WO 94/18318 dated Aug. 18, 1994.

[0728] In vitro translation-based libraries include but are not limited to those described in PCT Publication No. WO 91/05058 dated Apr. 18, 1991; and Mattheakis et al., 1994, Proc. Natl. Acad. Sci. USA 91:9022-9026.

[0729] By way of examples of nonpeptide libraries, a benzodiazepine library (see e.g., Bunin et al., 1994, Proc. Natl. Acad. Sci. USA 91:4708-4712) can be adapted for use. Peptoid libraries (Simon et al., 1992, Proc. Natl. Acad. Sci. USA 89:9367-9371) can also be used. Another example of a library that can be used, in which the amide functionalities in peptides have been permethylated to generate a chemically transformed combinatorial library, is described by Ostresh et al. (1994, Proc. Natl. Acad. Sci. USA 91:11138-11142).

[0730] The variety of non-peptide libraries that are useful in the present invention is great. For example, Ecker and Crooke, 1995, Bio/Technology 13:351-360 list benzodiazepines, hydantoins, piperazinediones, biphenyls, sugar analogs, beta-mercaptoketones, arylacetic acids, acylpiperidines, benzopyrans, cubanes, xanthines, aminimides, and oxazolones as among the chemical species that form the basis of various libraries.

[0731] Non-peptide libraries can be classified broadly into two types: decorated monomers and oligomers. Decorated monomer libraries employ a relatively simple scaffold structure upon which a variety functional groups is added. Often the scaffold will be a molecule with a known useful pharmacological activity. For example, the scaffold might be the benzodiazepine structure.

[0732] Non-peptide oligomer libraries utilize a large number of monomers that are assembled together in ways that create new shapes that depend on the order of the monomers. Among the monomer units that have been used are carbamates, pyrrolinones, and morpholinos. Peptoids, peptide-like oligomers in which the side chain is attached to the alpha amino group rather than the alpha carbon, form the basis of another version of non-peptide oligomer libraries. The first non-peptide oligomer libraries utilized a single type of monomer and thus contained a repeating backbone. Recent libraries have utilized more than one monomer, giving the libraries added flexibility.

[0733] Screening the libraries can be accomplished by any of a variety of commonly known methods. See, e.g., the following references, which disclose screening of peptide libraries: Parmley and Smith, 1989, Adv. Exp. Med. Biol. 251:215-218; Scott and Smith, 1990, Science 249:386-390; Fowlkes et al., 1992; BioTechniques 13:422-427; Oldenburg et al., 1992, Proc. Natl. Acad. Sci. USA 89:5393-5397; Yu et al., 1994, Cell 76:933-945; Staudt et al., 1988, Science 241:577-580; Bock et al., 1992, Nature 355:564-566; Tuerk et al., 1992, Proc. Natl. Acad. Sci. USA 89:6988-6992; Ellington et al., 1992, Nature 355:850-852; U.S. Pat. No. 5,096,815, U.S. Pat. No. 5,223,409, and U.S. Pat. No. 5,198,346, all to Ladner et al.; Rebar and Pabo, 1993, Science 263:671-673; and CT Publication No. WO 94/18318.

[0734] In a specific embodiment, screening to identify a molecule that binds polypeptides of the invention can be carried out by contacting the library members with polypeptides of the invention immobilized on a solid phase and harvesting those library members that bind to the polypeptides of the invention. Examples of such screening methods, termed “panning” techniques are described by way of example in Parmley and Smith, 1988, Gene 73:305-318; Fowlkes et al., 1992, BioTechniques 13:422-427; PCT Publication No. WO 94/18318; and in references cited herein.

[0735] In another embodiment, the two-hybrid system for selecting interacting proteins in yeast (Fields and Song, 1989, Nature 340:245-246; Chien et al., 1991, Proc. Natl. Acad. Sci. USA 88:9578-9582) can be used to identify molecules that specifically bind to polypeptides of the invention.

[0736] Where the binding molecule is a polypeptide, the polypeptide can be conveniently selected from any peptide library, including random peptide libraries, combinatorial peptide libraries, or biased peptide libraries. The term “biased” is used herein to mean that the method of generating the library is manipulated so as to restrict one or more parameters that govern the diversity of the resulting collection of molecules, in this case peptides.

[0737] Thus, a truly random peptide library would generate a collection of peptides in which the probability of finding a particular amino acid at a given position of the peptide is the same for all 20 amino acids. A bias can be introduced into the library, however, by specifying, for example, that a lysine occur every fifth amino acid or that positions 4, 8, and 9 of a decapeptide library be fixed to include only arginine. Clearly, many types of biases can be contemplated, and the present invention is not restricted to any particular bias. Furthermore, the present invention contemplates specific types of peptide libraries, such as phage displayed peptide libraries and those that utilize a DNA construct comprising a lambda phage vector with a DNA insert.

[0738] As mentioned above, in the case of a binding molecule that is a polypeptide, the polypeptide may have about 6 to less than about 60 amino acid residues, preferably about 6 to about 10 amino acid residues, and most preferably, about 6 to about 22 amino acids. In another embodiment, a binding polypeptide has in the range of 15-100 amino acids, or 20-50 amino acids.

[0739] The selected binding polypeptide can be obtained by chemical synthesis or recombinant expression.

Other Activities

[0740] A polypeptide, polynucleotide, agonist, or antagonist of the present invention, as a result of the ability to stimulate vascular endothelial cell growth, may be employed in treatment for stimulating re-vascularization of ischemic tissues due to various disease conditions such as thrombosis, arteriosclerosis, and other cardiovascular conditions. The polypeptide, polynucleotide, agonist, or antagonist of the present invention may also be employed to stimulate angiogenesis and limb regeneration, as discussed above.

[0741] A polypeptide, polynucleotide, agonist, or antagonist of the present invention may also be employed for treating wounds due to injuries, burns, post-operative tissue repair, and ulcers since they are mitogenic to various cells of different origins, such as fibroblast cells and skeletal muscle cells, and therefore, facilitate the repair or replacement of damaged or diseased tissue.

[0742] A polypeptide, polynucleotide, agonist, or antagonist of the present invention may also be employed stimulate neuronal growth and to treat and prevent neuronal damage which occurs in certain neuronal disorders or neuro-degenerative conditions such as Alzheimer's disease, Parkinson's disease, and AIDS-related complex. A polypeptide, polynucleotide, agonist, or antagonist of the present invention may have the ability to stimulate chondrocyte growth, therefore, they may be employed to enhance bone and periodontal regeneration and aid in tissue transplants or bone grafts.

[0743] A polypeptide, polynucleotide, agonist, or antagonist of the present invention may be also be employed to prevent skin aging due to sunburn by stimulating keratinocyte growth.

[0744] A polypeptide, polynucleotide, agonist, or antagonist of the present invention may also be employed for preventing hair loss, since FGF family members activate hair-forming cells and promotes melanocyte growth. Along the same lines, a polypeptide, polynucleotide, agonist, or antagonist of the present invention may be employed to stimulate growth and differentiation of hematopoietic cells and bone marrow cells when used in combination with other cytokines.

[0745] A polypeptide, polynucleotide, agonist, or antagonist of the present invention may also be employed to maintain organs before transplantation or for supporting cell culture of primary tissues. A polypeptide, polynucleotide, agonist, or antagonist of the present invention may also be employed for inducing tissue of mesodermal origin to differentiate in early embryos.

[0746] A polypeptide, polynucleotide, agonist, or antagonist of the present invention may also increase or decrease the differentiation or proliferation of embryonic stem cells, besides, as discussed above, hematopoietic lineage.

[0747] A polypeptide, polynucleotide, agonist, or antagonist of the present invention may also be used to modulate mammalian characteristics, such as body height, weight, hair color, eye color, skin, percentage of adipose tissue, pigmentation, size, and shape (e.g., cosmetic surgery). Similarly, a polypeptide, polynucleotide, agonist, or antagonist of the present invention may be used to modulate mammalian metabolism affecting catabolism, anabolism, processing, utilization, and storage of energy.

[0748] A polypeptide, polynucleotide, agonist, or antagonist of the present invention may be used to change a mammal's mental state or physical state by influencing biorhythms, caricadic rhythms, depression (including depressive disorders), tendency for violence, tolerance for pain, reproductive capabilities (preferably by Activin or Inhibin-like activity), hormonal or endocrine levels, appetite, libido, memory, stress, or other cognitive qualities.

[0749] A polypeptide, polynucleotide, agonist, or antagonist of the present invention may also be used as a food additive or preservative, such as to increase or decrease storage capabilities, fat content, lipid, protein, carbohydrate, vitamins, minerals, cofactors or other nutritional components.

[0750] The above-recited applications have uses in a wide variety of hosts. Such hosts include, but are not limited to, human, murine, rabbit, goat, guinea pig, camel, horse, mouse, rat, hamster, pig, micro-pig, chicken, goat, cow, sheep, dog, cat, non-human primate, and human. In specific embodiments, the host is a mouse, rabbit, goat, guinea pig, chicken, rat, hamster, pig, sheep, dog or cat. In preferred embodiments, the host is a mammal. In most preferred embodiments, the host is a human.

### OTHER PREFERRED EMBODIMENTS

[0751] Other preferred embodiments of the claimed invention include an isolated nucleic acid molecule comprising a nucleotide sequence which is at least 95% identical to a sequence of at least about 50 contiguous nucleotides in the nucleotide sequence of SEQ ID NO:X or the complementary strand thereto, the nucleotide sequence as defined in column 5 of Table 1B or columns 8 and 9 of Table 2 or the complementary strand thereto, and/or cDNA contained in ATCC Deposit No:Z.

[0752] Also preferred is a nucleic acid molecule wherein said sequence of contiguous nucleotides is included in the nucleotide sequence of the portion of SEQ ID NO:X as defined in column 5, “ORF (From-To)”, in Table 1B.1.

[0753] Also preferred is a nucleic acid molecule wherein said sequence of contiguous nucleotides is included in the nucleotide sequence of the portion of SEQ ID NO:X as defined in columns 8 and 9, “NT From” and “NT To” respectively, in Table 2.

[0754] Also preferred is an isolated nucleic acid molecule comprising a nucleotide sequence which is at least 95% identical to a sequence of at least about 150 contiguous nucleotides in the nucleotide sequence of SEQ ID NO:X or the complementary strand thereto, the nucleotide sequence as defined in column 5 of Table 1B.1 or columns 8 and 9 of Table 2 or the complementary strand thereto, and/or cDNA contained in ATCC Deposit No:Z.

[0755] Further preferred is an isolated nucleic acid molecule comprising a nucleotide sequence which is at least 95% identical to a sequence of at least about 500 contiguous nucleotides in the nucleotide sequence of SEQ ID NO:X or the complementary strand thereto, the nucleotide sequence as defined in column 5 of Table 1B.1 or columns 8 and 9 of Table 2 or the complementary strand thereto, and/or cDNA contained in ATCC Deposit No:Z.

[0756] A further preferred embodiment is a nucleic acid molecule comprising a nucleotide sequence which is at least 95% identical to the nucleotide sequence of the portion of SEQ ID NO:X defined in column 5, “ORF (From-To)”, in Table 1B.1.

[0757] A further preferred embodiment is a nucleic acid molecule comprising a nucleotide sequence which is at least 95% identical to the nucleotide sequence of the portion of SEQ ID NO:X defined in columns 8 and 9, “NT From” and “NT To”, respectively, in Table 2.

[0758] A further preferred embodiment is an isolated nucleic acid molecule comprising a nucleotide sequence which is at least 95% identical to the complete nucleotide sequence of SEQ ID NO:X or the complementary strand thereto, the nucleotide sequence as defined in column 5 of Table 1B.1 or columns 8 and 9 of Table 2 or the complementary strand thereto, and/or cDNA contained in ATCC Deposit No:Z.

[0759] Also preferred is an isolated nucleic acid molecule which hybridizes under stringent hybridization conditions to a nucleic acid molecule comprising a nucleotide sequence of SEQ ID NO:X or the complementary strand thereto, the nucleotide sequence as defined in column 5 of Table 1B.1 or columns 8 and 9 of Table 2 or the complementary strand thereto, and/or cDNA contained in ATCC Deposit No:Z, wherein said nucleic acid molecule which hybridizes does not hybridize under stringent hybridization conditions to a nucleic acid molecule having a nucleotide sequence consisting of only A residues or of only T residues.

[0760] Also preferred is a composition of matter comprising a DNA molecule which comprises the cDNA contained in ATCC Deposit No:Z.

[0761] Also preferred is an isolated nucleic acid molecule comprising a nucleotide sequence which is at least 95% identical to a sequence of at least 50 contiguous nucleotides of the cDNA sequence contained in ATCC Deposit No:Z.

[0762] Also preferred is an isolated nucleic acid molecule, wherein said sequence of at least 50 contiguous nucleotides is included in the nucleotide sequence of an open reading frame sequence encoded by cDNA contained in ATCC Deposit No:Z.

[0763] Also preferred is an isolated nucleic acid molecule comprising a nucleotide sequence which is at least 95% identical to sequence of at least 150 contiguous nucleotides in the nucleotide sequence encoded by cDNA contained in ATCC Deposit No:Z.

[0764] A further preferred embodiment is an isolated nucleic acid molecule comprising a nucleotide sequence which is at least 95% identical to sequence of at least 500 contiguous nucleotides in the nucleotide sequence encoded by cDNA contained in ATCC Deposit No:Z.

[0765] A further preferred embodiment is an isolated nucleic acid molecule comprising a nucleotide sequence which is at least 95% identical to the complete nucleotide sequence encoded by cDNA contained in ATCC Deposit No:Z.

[0766] A further preferred embodiment is a method for detecting in a biological sample a nucleic acid molecule comprising a nucleotide sequence which is at least 95% identical to a sequence of at least 50 contiguous nucleotides in a sequence selected from the group consisting of: a nucleotide sequence of SEQ ID NO:X or the complementary strand thereto; the nucleotide sequence as defined in column 5 of Table 1B.1 or columns 8 and 9 of Table 2 or the complementary strand thereto; and a nucleotide sequence encoded by cDNA contained in ATCC Deposit No:Z; which method comprises a step of comparing a nucleotide sequence of at least one nucleic acid molecule in said sample with a sequence selected from said group and determining whether the sequence of said nucleic acid molecule in said sample is at least 95% identical to said selected sequence.

[0767] Also preferred is the above method wherein said step of comparing sequences comprises determining the extent of nucleic acid hybridization between nucleic acid molecules in said sample and a nucleic acid molecule comprising said sequence selected from said group. Similarly, also preferred is the above method wherein said step of comparing sequences is performed by comparing the nucleotide sequence determined from a nucleic acid molecule in said sample with said sequence selected from said group. The nucleic acid molecules can comprise DNA molecules or RNA molecules.

[0768] A further preferred embodiment is a method for identifying the species, tissue or cell type of a biological sample which method comprises a step of detecting nucleic acid molecules in said sample, if any, comprising a nucleotide sequence that is at least 95% identical to a sequence of at least 50 contiguous nucleotides in a sequence selected from the group consisting of: a nucleotide sequence of SEQ ID NO:X or the complementary strand thereto; the nucleotide sequence as defined in column 5 of Table 1B.1 or columns 8 and 9 of Table 2 or the complementary strand thereto; and a nucleotide sequence of the cDNA contained in ATCC Deposit No:Z.

[0769] The method for identifying the species, tissue or cell type of a biological sample can comprise a step of detecting nucleic acid molecules comprising a nucleotide sequence in a panel of at least two nucleotide sequences, wherein at least one sequence in said panel is at least 95% identical to a sequence of at least 50 contiguous nucleotides in a sequence selected from said group.

[0770] Also preferred is a method for diagnosing in a subject a pathological condition associated with abnormal structure or expression of a nucleotide sequence of SEQ ID NO:X or the complementary strand thereto; the nucleotide sequence as defined in column 5 of Table 1B.1 or columns 8 and 9 of Table 2 or the complementary strand thereto; or the cDNA contained in ATCC Deposit No:Z which encodes a protein, wherein the method comprises a step of detecting in a biological sample obtained from said subject nucleic acid molecules, if any, comprising a nucleotide sequence that is at least 95% identical to a sequence of at least 50 contiguous nucleotides in a sequence selected from the group consisting of: a nucleotide sequence of SEQ ID NO:X or the complementary strand thereto; the nucleotide sequence as defined in column 5 of Table 1B.1 or columns 8 and 9 of Table 2 or the complementary strand thereto; and a nucleotide sequence of cDNA contained in ATCC Deposit No:Z.

[0771] The method for diagnosing a pathological condition can comprise a step of detecting nucleic acid molecules comprising a nucleotide sequence in a panel of at least two nucleotide sequences, wherein at least one sequence in said panel is at least 95% identical to a sequence of at least 50 contiguous nucleotides in a sequence selected from said group.

[0772] Also preferred is a composition of matter comprising isolated nucleic acid molecules wherein the nucleotide sequences of said nucleic acid molecules comprise a panel of at least two nucleotide sequences, wherein at least one sequence in said panel is at least 95% identical to a sequence of at least 50 contiguous nucleotides in a sequence selected from the group consisting of: a nucleotide sequence of SEQ ID NO:X or the complementary strand thereto; the nucleotide sequence as defined in column 5 of Table 1B.1 or columns 8 and 9 of Table 2 or the complementary strand thereto; and a nucleotide sequence encoded by cDNA contained in ATCC Deposit No:Z. The nucleic acid molecules can comprise DNA molecules or RNA molecules.

[0773] Also preferred is a composition of matter comprising isolated nucleic acid molecules wherein the nucleotide sequences of said nucleic acid molecules comprise a DNA microarray or “chip” of at least 1, 2, 3, 4, 5, 6, 7, 8, 9, 10, 15, 20, 25, 30, 40, 50, 100, 150, 200, 250, 300, 500, 1000, 2000, 3000, or 4000 nucleotide sequences, wherein at least one sequence in said DNA microarray or “chip” is at least 95% identical to a sequence of at least 50 contiguous nucleotides in a sequence selected from the group consisting of: a nucleotide sequence of SEQ ID NO:X wherein X is any integer as defined in Table 1A and/or 1B; and a nucleotide sequence encoded by a human cDNA clone identified by a cDNA “Clone ID” in Table 1A and/or 1B.

[0774] Also preferred is an isolated polypeptide comprising an amino acid sequence at least 90% identical to a sequence of at least about 10 contiguous amino acids in the polypeptide sequence of SEQ ID NO:Y; a polypeptide encoded by SEQ ID NO:X or the complementary strand thereto; the polypeptide encoded by the nucleotide sequence as defined in columns 8 and 9 of Table 2; and/or a polypeptide encoded by cDNA contained in ATCC Deposit No:Z.

[0775] Also preferred is an isolated polypeptide comprising an amino acid sequence at least 95% identical to a sequence of at least about 30 contiguous amino acids in the amino acid sequence of SEQ ID NO:Y; a polypeptide encoded by SEQ ID NO:X or the complementary strand thereto; the polypeptide encoded by the nucleotide sequence as defined in columns 8 and 9 of Table 2; and/or a polypeptide encoded by cDNA contained in ATCC Deposit No:Z.

[0776] Further preferred is an isolated polypeptide comprising an amino acid sequence at least 95% identical to a sequence of at least about 100 contiguous amino acids in the amino acid sequence of SEQ ID NO:Y; a polypeptide encoded by SEQ ID NO:X or the complementary strand thereto; the polypeptide encoded by the nucleotide sequence as defined in columns 8 and 9 of Table 2; and/or a polypeptide encoded by cDNA contained in ATCC Deposit No:Z.

[0777] Further preferred is an isolated polypeptide comprising an amino acid sequence at least 95% identical to the complete amino acid sequence of SEQ ID NO:Y; a polypeptide encoded by SEQ ID NO:X or the complementary strand thereto; the polypeptide encoded by the nucleotide sequence as defined in columns 8 and 9 of Table 2; and/or a polypeptide encoded by cDNA contained in ATCC Deposit No:Z.

[0778] Further preferred is an isolated polypeptide comprising an amino acid sequence at least 90% identical to a sequence of at least about 10 contiguous amino acids in the complete amino acid sequence of a polypeptide encoded by contained in ATCC Deposit No:Z

[0779] Also preferred is a polypeptide wherein said sequence of contiguous amino acids is included in the amino acid sequence of a portion of said polypeptide encoded by cDNA contained in ATCC Deposit No:Z; a polypeptide encoded by SEQ ID NO:X or the complementary strand thereto; the polypeptide encoded by the nucleotide sequence as defined in columns 8 and 9 of Table 2; and/or the polypeptide sequence of SEQ ID NO:Y.

[0780] Also preferred is an isolated polypeptide comprising an amino acid sequence at least 95% identical to a sequence of at least about 30 contiguous amino acids in the amino acid sequence of a polypeptide encoded by the cDNA contained in ATCC Deposit No:Z.

[0781] Also preferred is an isolated polypeptide comprising an amino acid sequence at least 95% identical to a sequence of at least about 100 contiguous amino acids in the amino acid sequence of a polypeptide encoded by cDNA contained in ATCC Deposit No:Z.

[0782] Also preferred is an isolated polypeptide comprising an amino acid sequence at least 95% identical to the amino acid sequence of a polypeptide encoded by the cDNA contained in ATCC Deposit No:Z.

[0783] Further preferred is an isolated antibody which binds specifically to a polypeptide comprising an amino acid sequence that is at least 90% identical to a sequence of at least 10 contiguous amino acids in a sequence selected from the group consisting of: a polypeptide sequence of SEQ ID NO:Y; a polypeptide encoded by SEQ ID NO:X or the complementary strand thereto; the polypeptide encoded by the nucleotide sequence as defined in columns 8 and 9 of Table 2; and a polypeptide encoded by the cDNA contained in ATCC Deposit No:Z.

[0784] Further preferred is a method for detecting in a biological sample a polypeptide comprising an amino acid sequence which is at least 90% identical to a sequence of at least 10 contiguous amino acids in a sequence selected from the group consisting of: a polypeptide sequence of SEQ ID NO:Y; a polypeptide encoded by SEQ ID NO:X or the complementary strand thereto; the polypeptide encoded by the nucleotide sequence as defined in columns 8 and 9 of Table 2; and a polypeptide encoded by the cDNA contained in ATCC Deposit No:Z; which method comprises a step of comparing an amino acid sequence of at least one polypeptide molecule in said sample with a sequence selected from said group and determining whether the sequence of said polypeptide molecule in said sample is at least 90% identical to said sequence of at least 10 contiguous amino acids.

[0785] Also preferred is the above method wherein said step of comparing an amino acid sequence of at least one polypeptide molecule in said sample with a sequence selected from said group comprises determining the extent of specific binding of polypeptides in said sample to an antibody which binds specifically to a polypeptide comprising an amino acid sequence that is at least 90% identical to a sequence of at least 10 contiguous amino acids in a sequence selected from the group consisting of: a polypeptide sequence of SEQ ID NO:Y; a polypeptide encoded by SEQ ID NO:X or the complementary strand thereto; the polypeptide encoded by the nucleotide sequence as defined in columns 8 and 9 of Table 2; and a polypeptide encoded by the cDNA contained in ATCC Deposit No:Z.

[0786] Also preferred is the above method wherein said step of comparing sequences is performed by comparing the amino acid sequence determined from a polypeptide molecule in said sample with said sequence selected from said group.

[0787] Also preferred is a method for identifying the species, tissue or cell type of a biological sample which method comprises a step of detecting polypeptide molecules in said sample, if any, comprising an amino acid sequence that is at least 90% identical to a sequence of at least 10 contiguous amino acids in a sequence selected from the group consisting of: polypeptide sequence of SEQ ID NO:Y; a polypeptide encoded by SEQ ID NO:X or the complementary strand thereto; the polypeptide encoded by the nucleotide sequence as defined in columns 8 and 9 of Table 2; and a polypeptide encoded by the cDNA contained in ATCC Deposit No:Z.

[0788] Also preferred is the above method for identifying the species, tissue or cell type of a biological sample, which method comprises a step of detecting polypeptide molecules comprising an amino acid sequence in a panel of at least two amino acid sequences, wherein at least one sequence in said panel is at least 90% identical to a sequence of at least 10 contiguous amino acids in a sequence selected from the above group.

[0789] Also preferred is a method for diagnosing in a subject a pathological condition associated with abnormal structure or expression of a nucleic acid sequence identified in Table 1A, 1B or Table 2 encoding a polypeptide, which method comprises a step of detecting in a biological sample obtained from said subject polypeptide molecules comprising an amino acid sequence in a panel of at least two amino acid sequences, wherein at least one sequence in said panel is at least 90% identical to a sequence of at least 10 contiguous amino acids in a sequence selected from the group consisting of: polypeptide sequence of SEQ ID NO:Y; a polypeptide encoded by SEQ ID NO:X or the complementary strand thereto; the polypeptide encoded by the nucleotide sequence as defined in columns 8 and 9 of Table 2; and a polypeptide encoded by the cDNA contained in ATCC Deposit No:Z.

[0790] In any of these methods, the step of detecting said polypeptide molecules includes using an antibody.

[0791] Also preferred is an isolated nucleic acid molecule comprising a nucleotide sequence which is at least 95% identical to a nucleotide sequence encoding a polypeptide wherein said polypeptide comprises an amino acid sequence that is at least 90% identical to a sequence of at least 10 contiguous amino acids in a sequence selected from the group consisting of: polypeptide sequence of SEQ ID NO:Y; a polypeptide encoded by SEQ ID NO:X or the complementary strand thereto; the polypeptide encoded by the nucleotide sequence as defined in columns 8 and 9 of Table 2; and a polypeptide encoded by the cDNA contained in ATCC Deposit No:Z.

[0792] Also preferred is an isolated nucleic acid molecule, wherein said nucleotide sequence encoding a polypeptide has been optimized for expression of said polypeptide in a prokaryotic host.

[0793] Also preferred is a polypeptide molecule, wherein said polypeptide comprises an amino acid sequence selected from the group consisting of: polypeptide sequence of SEQ ID NO:Y; a polypeptide encoded by SEQ ID NO:X or the complementary strand thereto; the polypeptide encoded by the nucleotide sequence as defined in columns 8 and 9 of Table 2; and a polypeptide encoded by the cDNA contained in ATCC Deposit No:Z.

[0794] Further preferred is a method of making a recombinant vector comprising inserting any of the above isolated nucleic acid molecule into a vector. Also preferred is the recombinant vector produced by this method. Also preferred is a method of making a recombinant host cell comprising introducing the vector into a host cell, as well as the recombinant host cell produced by this method.

[0795] Also preferred is a method of making an isolated polypeptide comprising culturing this recombinant host cell under conditions such that said polypeptide is expressed and recovering said polypeptide. Also preferred is this method of making an isolated polypeptide, wherein said recombinant host cell is a eukaryotic cell and said polypeptide is a human protein comprising an amino acid sequence selected from the group consisting of: polypeptide sequence of SEQ ID NO:Y; a polypeptide encoded by SEQ ID NO:X or the complementary strand thereto; the polypeptide encoded by the nucleotide sequence as defined in columns 8 and 9 of Table 2; and a polypeptide encoded by the cDNA contained in ATCC Deposit No:Z. The isolated polypeptide produced by this method is also preferred.

[0796] Also preferred is a method of treatment of an individual in need of an increased level of a protein activity, which method comprises administering to such an individual a Therapeutic comprising an amount of an isolated polypeptide, polynucleotide, immunogenic fragment or analogue thereof, binding agent, antibody, or antigen binding fragment of the claimed invention effective to increase the level of said protein activity in said individual.

[0797] Also preferred is a method of treatment of an individual in need of a decreased level of a protein activity, which method comprised administering to such an individual a Therapeutic comprising an amount of an isolated polypeptide, polynucleotide, immunogenic fragment or analogue thereof, binding agent, antibody, or antigen binding fragment of the claimed invention effective to decrease the level of said protein activity in said individual.

[0798] Also preferred is a method of treatment of an individual in need of a specific delivery of toxic compositions to diseased cells (e.g., tumors, leukemias or lymphomas), which method comprises administering to such an individual a Therapeutic comprising an amount of an isolated polypeptide of the invention, including, but not limited to a binding agent, or antibody of the claimed invention that are associated with toxin or cytotoxic prodrugs.

[0799] Having generally described the invention, the same will be more readily understood by reference to the following examples, which are provided by way of illustration and are not intended as limiting.

Description of Table 6

[0800] Table 6 summarizes some of the ATCC Deposits, Deposit dates, and ATCC designation numbers of deposits made with the ATCC in connection with the present application. These deposits were made in addition to those described in the Table 1A.

TABLE 6

| ATCC Deposits | Deposit Date | ATCC Designation Number |
|---|---|---|
| LP01, LP02, LP03, LP04, | May-20-97 | 209059, 209060, 209061, |
| LP05, LP06, LP07, LP08, | | 209062, 209063, 209064, |
| LP09, LP10, LP11, | | 209065, 209066, 209067, |
| | | 209068, 209069 |
| LP12 | Jan-12-98 | 209579 |
| LP13 | Jan-12-98 | 209578 |
| LP14 | Jul-16-98 | 203067 |
| LP15 | Jul-16-98 | 203068 |
| LP16 | Feb-1-99 | 203609 |
| LP17 | Feb-1-99 | 203610 |
| LP20 | Nov-17-98 | 203485 |
| LP21 | Jun-18-99 | PTA-252 |
| LP22 | Jun-18-99 | PTA-253 |
| LP23 | Dec-22-99 | PTA-1081 |

### EXAMPLES

### Example 1

### Isolation of a Selected cDNA Clone from the Deposited Sample

[0801] Each ATCC Deposit No:Z is contained in a plasmid vector. Table 7 identifies the vectors used to construct the cDNA library from which each clone was isolated. In many cases, the vector used to construct the library is a phage vector from which a plasmid has been excised. The following correlates the related plasmid for each phage vector used in constructing the cDNA library. For example, where a particular clone is identified in Table 7 as being isolated in the vector “Lambda Zap,” the corresponding deposited clone is in “pBluescript.”

| Vector Used to | Corresponding |
|---|---|
| Construct Library | Deposited Plasmid |
| Lambda Zap | pBluescript (pBS) |
| Uni-Zap XR | pBluescript (pBS) |
| Zap Express | pBK |
| lafmid BA | plafmid BA |
| pSport1 | pSport1 |
| pCMVSport 2.0 | pCMVSport 2.0 |
| pCMVSport 3.0 | pCMVSport 3.0 |
| pCR ® 2.1 | pCR ® 2.1 |

[0802] Vectors Lambda Zap (U.S. Pat. Nos. 5,128,256 and 5,286,636), Uni-Zap XR (U.S. Pat. Nos. 5,128,256 and 5,286,636), Zap Express (U.S. Pat. Nos. 5,128,256 and 5,286,636), pBluescript (pBS) (Short, J. M. et al., Nucleic Acids Res. 16:7583-7600 (1988); Alting-Mees, M. A. and Short, J. M., Nucleic Acids Res. 17:9494 (1989)) and pBK (Alting-Mees, M. A. et al., Strategies 5:58-61 (1992)) are commercially available from Stratagene Cloning Systems, Inc., 11011 N. Torrey Pines Road, La Jolla, Calif., 92037. pBS contains an ampicillin resistance gene and pBK contains a neomycin resistance gene. Both can be transformed into E. coli strain XL-1 Blue, also available from Stratagene. pBS comes in 4 forms SK+, SK−, KS+ and KS. The S and K refers to the orientation of the polylinker to the T7 and T3 primer sequences which flank the polylinker region (“S” is for SacI and “K” is for KpnI which are the first sites on each respective end of the linker). “+” or “−” refer to the orientation of the f1 origin of replication (“ori”), such that in one orientation, single stranded rescue initiated from the f1 ori generates sense strand DNA and in the other, antisense.

[0803] Vectors pSport1, pCMVSport 2.0 and pCMVSport 3.0, were obtained from Life Technologies, Inc., P.O. Box 6009, Gaithersburg, Md. 20897. All Sport vectors contain an ampicillin resistance gene and may be transformed into E. coli strain DH10B, also available from Life Technologies. (See, for instance, Gruber, C. E., et al., Focus 15:59 (1993)). Vector lafmid BA (Bento Soares, Columbia University, NY) contains an ampicillin resistance gene and can be transformed into E. coli strain XL-1 Blue. Vector pCR®2.1, which is available from Invitrogen, 1600 Faraday Avenue, Carlsbad, Calif. 92008, contains an ampicillin resistance gene and may be transformed into E. coli strain DH10B, available from Life Technologies. (See, for instance, Clark, J. M., Nuc. Acids Res. 16:9677-9686 (1988) and Mead, D. et al., Bio/Technology 9: (1991)). Preferably, a polynucleotide of the present invention does not comprise the phage vector sequences identified for the particular clone in Table 7, as well as the corresponding plasmid vector sequences designated above.

[0804] The deposited material in the sample assigned the ATCC Deposit Number cited by reference to Table 1A, Table 2, Table 6 and Table 7 for any given cDNA clone also may contain one or more additional plasmids, each comprising a cDNA clone different from that given clone. Thus, deposits sharing the same ATCC Deposit Number contain at least a plasmid for each ATCC Deposit No:Z.

TABLE 7

| | | | ATCC |
|---|---|---|---|
| Libraries owned by Catalog | Catalog Description | Vector | Deposit |
| HUKA HUKB HUKC HUKD | Human Uterine Cancer | Lambda ZAP II | LP01 |
| HUKE HUKF HUKG | | | |
| HCNA HCNB | Human Colon | Lambda Zap II | LP01 |
| HFFA | Human Fetal Brain, random | Lambda Zap II | LP01 |
| | primed | | |
| HTWA | Resting T-Cell | Lambda ZAP II | LP01 |
| HBQA | Early Stage Human Brain, | Lambda ZAP II | LP01 |
| | random primed | | |
| HLMB HLMF HLMG HLMH | breast lymph node CDNA | Lambda ZAP II | LP01 |
| HLMI HLMJ HLMM HLMN | library | | |
| HCQA HCQB | human colon cancer | Lamda ZAP II | LP01 |
| HMEA HMEC HMED HMEE | Human Microvascular | Lambda ZAP II | LP01 |
| HMEF HMEG HMEI HMEJ | Endothelial Cells, fract. A | | |
| HMEK HMEL | | | |
| HUSA HUSC | Human Umbilical Vein | Lambda ZAP II | LP01 |
| | Endothelial Cells, fract. A | | |
| HLQA HLQB | Hepatocellular Tumor | Lambda ZAP II | LP01 |
| HHGA HHGB HHGC HHGD | Hemangiopericytoma | Lambda ZAP II | LP01 |
| HSDM | Human Striatum Depression, re- | Lambda ZAP II | LP01 |
| | rescue | | |
| HUSH | H Umbilical Vein Endothelial | Lambda ZAP II | LP01 |
| | Cells, frac A, re-excision | | |
| HSGS | Salivary gland, subtracted | Lambda ZAP II | LP01 |
| HFXA HFXB HFXC HFXD | Brain frontal cortex | Lambda ZAP II | LP01 |
| HFXE HFXF HFXG HFXH | | | |
| HPQA HPQB HPQC | PERM TF274 | Lambda ZAP II | LP01 |
| HFXJ HFXK | Brain Frontal Cortex, re-excision | Lambda ZAP II | LP01 |
| HCWA HCWB HCWC HCWD | CD34 positive cells (Cord | ZAP Express | LP02 |
| HCWE HCWF HCWG HCWH | Blood) | | |
| HCWI HCWJ HCWK | | | |
| HCUA HCUB HCUC | CD34 depleted Buffy Coat | ZAP Express | LP02 |
| | (Cord Blood) | | |
| HRSM | A-14 cell line | ZAP Express | LP02 |
| HRSA | A1-CELL LINE | ZAP Express | LP02 |
| HCUD HCUE HCUF HCUG | CD34 depleted Buffy Coat | ZAP Express | LP02 |
| HCUH HCUI | (Cord Blood), re-excision | | |
| HBXE HBXF HBXG | H. Whole Brain #2, re-excision | ZAP Express | LP02 |
| HRLM | L8 cell line | ZAP Express | LP02 |
| HBXA HBXB HBXC HBXD | Human Whole Brain #2 - Oligo | ZAP Express | LP02 |
| | dT >1.5 Kb | | |
| HUDA HUDB HUDC | Testes | ZAP Express | LP02 |
| HHTM HHTN HHTO | H. hypothalamus, frac A; re- | ZAP Express | LP02 |
| | excision | | |
| HHTL | H. hypothalamus, frac A | ZAP Express | LP02 |
| HASA HASD | Human Adult Spleen | Uni-ZAP XR | LP03 |
| HFKC HFKD HFKE HFKF | Human Fetal Kidney | Uni-ZAP XR | LP03 |
| HFKG | | | |
| HE8A HE8B HE8C HE8D | Human 8 Week Whole Embryo | Uni-ZAP XR | LP03 |
| HE8E HE8F HE8M HE8N | | | |
| HGBA HGBD HGBE HGBF | Human Gall Bladder | Uni-ZAP XR | LP03 |
| HGBG HGBH HGBI | | | |
| HLHA HLHB HLHC HLHD | Human Fetal Lung III | Uni-ZAP XR | LP03 |
| HLHE HLHF HLHG HLHH | | | |
| HLHQ | | | |
| HPMA HPMB HPMC HPMD | Human Placenta | Uni-ZAP XR | LP03 |
| HPME HPMF HPMG HPMH | | | |
| HPRA HPRB HPRC HPRD | Human Prostate | Uni-ZAP XR | LP03 |
| HSIA HSIC HSID HSIE | Human Adult Small Intestine | Uni-ZAP XR | LP03 |
| HTEA HTEB HTEC HTED | Human Testes | Uni-ZAP XR | LP03 |
| HTEE HTEF HTEG HTEH | | | |
| HTEI HTEJ HTEK | | | |
| HTPA HTPB HTPC HTPD | Human Pancreas Tumor | Uni-ZAP XR | LP03 |
| HTPE | | | |
| HTTA HTTB HTTC HTTD | Human Testes Tumor | Uni-ZAP XR | LP03 |
| HTTE HTTF | | | |
| HAPA HAPB HAPC HAPM | Human Adult Pulmonary | Uni-ZAP XR | LP03 |
| HETA HETB HETC HETD | Human Endometrial Tumor | Uni-ZAP XR | LP03 |
| HETE HETF HETG HETH | | | |
| HETI | | | |
| HHFB HHFC HHFD HHFE | Human Fetal Heart | Uni-ZAP XR | LP03 |
| HHFF HHFG HHFH HHFI | | | |
| HHPB HHPC HHPD HHPE | Human Hippocampus | Uni-ZAP XR | LP03 |
| HHPF HHPG HHPH | | | |
| HCE1 HCE2 HCE3 HCE4 | Human Cerebellum | Uni-ZAP XR | LP03 |
| HCE5 HCEB HCEC HCED | | | |
| HCEE HCEF HCEG | | | |
| HUVB HUVC HUVD HUVE | Human Umbilical Vein, Endo. | Uni-ZAP XR | LP03 |
| | remake | | |
| HSTA HSTB HSTC HSTD | Human Skin Tumor | Uni-ZAP XR | LP03 |
| HTAA HTAB HTAC HTAD | Human Activated T-Cells | Uni-ZAP XR | LP03 |
| HTAE | | | |
| HFEA HFEB HFEC | Human Fetal Epithelium (Skin) | Uni-ZAP XR | LP03 |
| HJPA HJPB HJPC HJPD | HUMAN JURKAT | Uni-ZAP XR | LP03 |
| | MEMBRANE BOUND | | |
| | POLYSOMES | | |
| HESA | Human epithelioid sarcoma | Uni-Zap XR | LP03 |
| HLTA HLTB HLTC HLTD | Human T-Cell Lymphoma | Uni-ZAP XR | LP03 |
| HLTE HLTF | | | |
| HFTA HFTB HFTC HFTD | Human Fetal Dura Mater | Uni-ZAP XR | LP03 |
| HRDA HRDB HRDC HRDD | Human Rhabdomyosarcoma | Uni-ZAP XR | LP03 |
| HRDE HRDF | | | |
| HCAA HCAB HCAC | Cem cells cyclohexamide treated | Uni-ZAP XR | LP03 |
| HRGA HRGB HRGC HRGD | Raji Cells, cyclohexamide | Uni-ZAP XR | LP03 |
| | treated | | |
| HSUA HSUB HSUC HSUM | Supt Cells, cyclohexamide | Uni-ZAP XR | LP03 |
| | treated | | |
| HT4A HT4C HT4D | Activated T-Cells, 12 hrs. | Uni-ZAP XR | LP03 |
| HE9A HE9B HB9C HE9D | Nine Week Old Early Stage | Uni-ZAP XR | LP03 |
| HE9E HE9F HE9G HE9H | Human | | |
| HE9M HE9N | | | |
| HATA HATB HATC HATD | Human Adrenal Gland Tumor | Uni-ZAP XR | LP03 |
| HATE | | | |
| HT5A | Activated T-Cells, 24 hrs. | Uni-ZAP XR | LP03 |
| HFGA HFGM | Human Fetal Brain | Uni-ZAP XR | LP03 |
| HNEA HNEB HNEC HNED | Human Neutrophil | Uni-ZAP XR | LP03 |
| HNEE | | | |
| HBGB HBGD | Human Primary Breast Cancer | Uni-ZAP XR | LP03 |
| HBNA HBNB | Human Normal Breast | Uni-ZAP XR | LP03 |
| HCAS | Cem Cells, cyclohexamide | Uni-ZAP XR | LP03 |
| | treated, subtra | | |
| HHPS | Human Hippocampus, | pBS | LP03 |
| | subtracted | | |
| HKCS HKCU | Human Colon Cancer, | pBS | LP03 |
| | subtracted | | |
| HRGS | Raji cells, cyclohexamide | pBS | LP03 |
| | treated, subtracted | | |
| HSUT | Supt cells, cyclohexamide | pBS | LP03 |
| | treated, differentially expressed | | |
| HT4S | Activated T-Cells, 12 hrs, | Uni-ZAP XR | LP03 |
| | subtracted | | |
| HCDA HCDB HCDC HCDD | Human Chondrosarcoma | Uni-ZAP XR | LP03 |
| HCDE | | | |
| HOAA HOAB HOAC | Human Osteosarcoma | Uni-ZAP XR | LP03 |
| HTLA HTLB HTLC HTLD | Human adult testis, large inserts | Uni-ZAP XR | LP03 |
| HTLE HTLF | | | |
| HLMA HLMC HLMD | Breast Lymph node cDNA | Uni-ZAP XR | LP03 |
| | library | | |
| H6EA H6EB H6EC | HL-60, PMA 4H | Uni-ZAP XR | LP03 |
| HTXA HTXB HTXC HTXD | Activated T-Cell | Uni-ZAP XR | LP03 |
| HTXE HTXF HTXG HTXH | (12 hs)/Thiouridine labelledEco | | |
| HNFA HNFB HNFC HNFD | Human Neutrophil, Activated | Uni-ZAP XR | LP03 |
| HNFE HNFF HNFG HNFH | | | |
| HNFJ | | | |
| HTOB HTOC | HUMAN TONSILS, | Uni-ZAP XR | LP03 |
| | FRACTION 2 | | |
| HMGB | Human OB MG63 control | Uni-ZAP XR | LP03 |
| | fraction I | | |
| HOPB | Human OB HOS control fraction I | Uni-ZAP XR | LP03 |
| HORB | Human OB HOS treated (10 nM | Uni-ZAP XR | LP03 |
| | E2) fraction I | | |
| HSVA HSVB HSVC | Human Chronic Synovitis | Uni-ZAP XR | LP03 |
| HROA | HUMAN STOMACH | Uni-ZAP XR | LP03 |
| HBJA HBJB HBJC HBJD HBJE | HUMAN B CELL | Uni-ZAP XR | LP03 |
| HBJF HBJG HBJH HBJI HBJJ | LYMPHOMA | | |
| HBJK | | | |
| HCRA HCRB HCRC | human corpus colosum | Uni-ZAP XR | LP03 |
| HODA HODB HODC HODD | human ovarian cancer | Uni-ZAP XR | LP03 |
| HDSA | Dermatofibrosarcoma | Uni-ZAP XR | LP03 |
| | Protuberance | | |
| HMWA HMWB HMWC | Bone Marrow Cell Line | Uni-ZAP XR | LP03 |
| HMWD HMWE HMWF | (RS4; 11) | | |
| HMWG HMWH HMWI HMWJ | | | |
| HSOA | stomach cancer (human) | Uni-ZAP XR | LP03 |
| HERA | SKIN | Uni-ZAP XR | LP03 |
| HMDA | Brain-medulloblastoma | Uni-ZAP XR | LP03 |
| HGLA HGLB HGLD | Glioblastoma | Uni-ZAP XR | LP03 |
| HEAA | H. Atrophic Endometrium | Uni-ZAP XR | LP03 |
| HBCA HBCB | H. Lymph node breast Cancer | Uni-ZAP XR | LP03 |
| HPWT | Human Prostate BPH, re- | Uni-ZAP XR | LP03 |
| | excision | | |
| HFVG HFVH HFVI | Fetal Liver, subtraction II | pBS | LP03 |
| HNFI | Human Neutrophils, Activated, | pBS | LP03 |
| | re-excision | | |
| HBMB HBMC HBMD | Human Bone Marrow, re- | pBS | LP03 |
| | excision | | |
| HKML HKMM HKMN | H. Kidney Medulla, re-excision | pBS | LP03 |
| HKIX HKIY | H. Kidney Cortex, subtracted | pBS | LP03 |
| HADT | H. Amygdala Depression, | pBS | LP03 |
| | subtracted | | |
| H6AS | Hl-60, untreated, subtracted | Uni-ZAP XR | LP03 |
| H6ES | HL-60, PMA 4H, subtracted | Uni-ZAP XR | LP03 |
| H6BS | HL-60, RA 4h, Subtracted | Uni-ZAP XR | LP03 |
| H6CS | HL-60, PMA 1d, subtracted | Uni-ZAP XR | LP03 |
| HTXJ HTXK | Activated T- | Uni-ZAP XR | LP03 |
| | cell(12 h)/Thiouridine-re- | | |
| | excision | | |
| HMSA HMSB HMSC HMSD | Monocyte activated | Uni-ZAP XR | LP03 |
| HMSE HMSF HMSG HMSH | | | |
| HMSI HMSJ HMSK | | | |
| HAGA HAGB HAGC HAGD | Human Amygdala | Uni-ZAP XR | LP03 |
| HAGE HAGF | | | |
| HSRA HSRB HSRE | STROMAL - | Uni-ZAP XR | LP03 |
| | OSTEOCLASTOMA | | |
| HSRD HSRF HSRG HSRH | Human Osteoclastoma Stromal | Uni-ZAP XR | LP03 |
| | Cells - unamplified | | |
| HSQA HSQB HSQC HSQD | Stromal cell TF274 | Uni-ZAP XR | LP03 |
| HSQE HSQF HSQG | | | |
| HSKA HSKB HSKC HSKD | Smooth muscle, serum treated | Uni-ZAP XR | LP03 |
| HSKE HSKF HSKZ | | | |
| HSLA HSLB HSLC HSLD | Smooth muscle, control | Uni-ZAP XR | LP03 |
| HSLE HSLF HSLG | | | |
| HSDA HSDD HSDE HSDF | Spinal cord | Uni-ZAP XR | LP03 |
| HSDG HSDH | | | |
| HPWS | Prostate-BPH subtracted II | pBS | LP03 |
| HSKW HSKX HSKY | Smooth Muscle - HASTE | pBS | LP03 |
| | normalized | | |
| HFPB HFPC HFPD | H. Frontal cortex, epileptic; re- | Uni-ZAP XR | LP03 |
| | excision | | |
| HSDI HSDJ HSDK | Spinal Cord, re-excision | Uni-ZAP XR | LP03 |
| HSKN HSKO | Smooth Muscle Serum Treated, | pBS | LP03 |
| | Norm | | |
| HSKG HSKH HSKI | Smooth muscle, serum | pBS | LP03 |
| | induced, re-exc | | |
| HFCA HFCB HFCC HFCD | Human Fetal Brain | Uni-ZAP XR | LP04 |
| HFCE HFCF | | | |
| HPTA HPTB HPTD | Human Pituitary | Uni-ZAP XR | LP04 |
| HTHB HTHC HTHD | Human Thymus | Uni-ZAP XR | LP04 |
| HE6B HE6C HE6D HE6E HE6F | Human Whole Six Week Old | Uni-ZAP XR | LP04 |
| HE6G HE6S | Embryo | | |
| HSSA HSSB HSSC HSSD | Human Synovial Sarcoma | Uni-ZAP XR | LP04 |
| HSSE HSSF HSSG HSSH HSSI | | | |
| HSSJ HSSK | | | |
| HE7T | 7 Week Old Early Stage Human, | Uni-ZAP XR | LP04 |
| | subtracted | | |
| HEPA HEPB HEPC | Human Epididymus | Uni-ZAP XR | LP04 |
| HSNA HSNB HSNC HSNM | Human Synovium | Uni-ZAP XR | LP04 |
| HSNN | | | |
| HPFB HPFC HPFD HPFE | Human Prostate Cancer, Stage C | Uni-ZAP XR | LP04 |
| | fraction | | |
| HE2A HE2D HE2E HE2H HB2I | 12 Week Old Early Stage | Uni-ZAP XR | LP04 |
| HE2M HE2N HE2O | Human | | |
| HB2B HE2C HE2F HE2G HE2P | 12 Week Old Early Stage | Uni-ZAP XR | LP04 |
| HE2Q | Human, II | | |
| HPTS HPTT HPTU | Human Pituitary, subtracted | Uni-ZAP XR | LP04 |
| HAUA HAUB HAUC | Amniotic Cells - TNF induced | Uni-ZAP XR | LP04 |
| HAQA HAQB HAQC HAQD | Amniotic Cells - Primary | Uni-ZAP XR | LP04 |
| | Culture | | |
| HWTA HWTB HWTC | wilm's tumor | Uni-ZAP XR | LP04 |
| HBSD | Bone Cancer, re-excision | Uni-ZAP XR | LP04 |
| HSGB | Salivary gland, re-excision | Uni-ZAP XR | LP04 |
| HSJA HSJB HSJC | Smooth muscle-ILb induced | Uni-ZAP XR | LP04 |
| HSXA HSKB HSXC HSXD | Human Substantia Nigra | Uni-ZAP XR | LP04 |
| HSHA HSHB HSHC | Smooth muscle, IL1b induced | Uni-ZAP XR | LP04 |
| HOUA HOUB HOUC HOUD | Adipocytes | Uni-ZAP XR | LP04 |
| HOUE | | | |
| HPWA HPWB HPWC HPWD | Prostate BPH | Uni-ZAP XR | LP04 |
| HPWE | | | |
| HELA HELB HELC HELD | Endothelial cells-control | Uni-ZAP XR | LP04 |
| HELE HELF HELG HELH | | | |
| HEMA HEMB HEMC HEMD | Endothelial-induced | Uni-ZAP XR | LP04 |
| HEME HEMF HEMG HEMH | | | |
| HBIA HBIB HBIC | Human Brain, Striatum | Uni-ZAP XR | LP04 |
| HHSA HHSB HHSC HHSD | Human | Uni-ZAP XR | LP04 |
| HHSE | Hypothalmus, Schizophrenia | | |
| HNGA HNGB HNGC HNGD | neutrophils control | Uni-ZAP XR | LP04 |
| HNGE HNGF HNGG HNGH | | | |
| HNGI HNGJ | | | |
| HNHA HNHB HNHC HNHD | Neutrophils IL-1 and LPS | Uni-ZAP XR | LP04 |
| HNHE HNHF HNHG HNHH | induced | | |
| HNHI HNHJ | | | |
| HSDB HSDC | STRIATUM DEPRESSION | Uni-ZAP XR | LP04 |
| HHPT | Hypothalamus | Uni-ZAP XR | LP04 |
| HSAT HSAU HSAV HSAW | Anergic T-cell | Uni-ZAP XR | LP04 |
| HSAX USAY HSAZ | | | |
| HBMS HBMT HBMU HBMV | Bone marrow | Uni-ZAP XR | LP04 |
| HBMW HBMX | | | |
| HOEA HOEB HOEC HOED | Osteoblasts | Uni-ZAP XR | LP04 |
| HOEE HOEF HOEJ | | | |
| HAIA HAIB HAIC HAID HAIE | Epithelial-TNFa and INF | Uni-ZAP XR | LP04 |
| HAIF | induced | | |
| HTGA HTGB HTGC HTGD | Apoptotic T-cell | Uni-ZAP XR | LP04 |
| HMCA HMCB HMCC HMCD | Macrophage-oxLDL | Uni-ZAP XR | LP04 |
| HMCE | | | |
| HMAA HMAB HMAC HMAD | Macrophage (GM-CSF treated) | Uni-ZAP XR | LP04 |
| HMAE HMAF HMAG | | | |
| HPHA | Normal Prostate | Uni-ZAP XR | LP04 |
| HPIA HPIB HPIC | LNCAP prostate cell line | Uni-ZAP XR | LP04 |
| HPJA HPJB HPJC | PC3 Prostate cell line | Uni-ZAP XR | LP04 |
| HOSE HOSF HOSG | Human Osteoclastoma, re- | Uni-ZAP XR | LP04 |
| | excision | | |
| HTGE HTGF | Apoptotic T-cell, re-excision | Uni-ZAP XR | LP04 |
| HMAJ HMAK | H Macrophage (GM-CSF | Uni-ZAP XR | LP04 |
| | treated), re-excision | | |
| HACB HACC HACD | Human Adipose Tissue, re- | Uni-ZAP XR | LP04 |
| | excision | | |
| HFPA | H. Frontal Cortex, Epileptic | Uni-ZAP XR | LP04 |
| HFAA HFAB HFAC HFAD | Alzheimer's, spongy change | Uni-ZAP XR | LP04 |
| HFAE | | | |
| HFAM | Frontal Lobe, Dementia | Uni-ZAP XR | LP04 |
| HMIA HMIB HMIC | Human Manic Depression | Uni-ZAP XR | LP04 |
| | Tissue | | |
| HTSA HTSE HTSF HTSG | Human Thymus | pBS | LP05 |
| HTSH | | | |
| HPBA HPBB HPBC HPBD | Human Pineal Gland | pBS | LP05 |
| HPBE | | | |
| HSAA HSAB HSAC | HSA 172 Cells | pBS | LP05 |
| HSBA HSBB HSBC HSBM | HSC172 cells | pBS | LP05 |
| HJAA HJAB HJAC HJAD | Jurkat T-cell G1 phase | pBS | LP05 |
| HJBA HJBB HJBC HJBD | Jurkat T-Cell, S phase | pBS | LP05 |
| HAFA HAFB | Aorta endothelial cells + TNF-a | pBS | LP05 |
| HAWA HAWB HAWC | Human White Adipose | pBS | LP05 |
| HTNA HTNB | Human Thyroid | pBS | LP05 |
| HONA | Normal Ovary, Premenopausal | pBS | LP05 |
| HARA HARB | Human Adult Retina | pBS | LP05 |
| HLJA HLJB | Human Lung | pCMVSport 1 | LP06 |
| HOFM HOFN HOFO | H. Ovarian Tumor, II, OV5232 | pCMVSport 2.0 | LP07 |
| HOGA HOGB HOGC | OV 10-3-95 | pCMVSport 2.0 | LP07 |
| HCGL | CD34+cells, II | pCMVSport 2.0 | LP07 |
| HDLA | Hodgkin's Lymphoma I | pCMVSport 2.0 | LP07 |
| HDTA HDTB HDTC HDTD | Hodgkin's Lymphoma II | pCMVSport 2.0 | LP07 |
| HDTE | | | |
| HKAA HKAB HKAC HKAD | Keratinocyte | pCMVSport 2.0 | LP07 |
| HKAE HKAF HKAG HKAH | | | |
| HCIM | CAFFINDER, Crohn's Disease, | pCMVSport 2.0 | LP07 |
| | lib 2 | | |
| HKAL | Keratinocyte, lib 2 | pCMVSport 2.0 | LP07 |
| HKAT | Keratinocyte, lib 3 | pCMVSport 2.0 | LP07 |
| HNDA | Nasal polyps | pCMVSport 2.0 | LP07 |
| HDRA | H. Primary Dendritic Cells, lib 3 | pCMVSport 2.0 | LP07 |
| HOHA HOHB HOHC | Human Osteoblasts II | pCMVSport 2.0 | LP07 |
| HLDA HLDB HLDC | Liver, Hepatoma | pCMVSport 3.0 | LP08 |
| HLDN HLDO HLDP | Human Liver, normal | pCMVSport 3.0 | LP08 |
| HMTA | pBMC stimulated w/ poly I/C | pCMVSport 3.0 | LP08 |
| HNTA | NTERA2, control | pCMVSport 3.0 | LP08 |
| HDPA HDPB HDPC HDPD | Primary Dendritic Cells, lib 1 | pCMVSport 3.0 | LP08 |
| HDPF HDPG HDPH HDPI | | | |
| HDPJ HDPK | | | |
| HDPM HDPN HDPO HDPP | Primary Dendritic cells, frac 2 | pCMVSport 3.0 | LP08 |
| HMUA HMUB HMUC | Myoloid Progenitor Cell Line | pCMVSport 3.0 | LP08 |
| HHEA HHEB HHEC HHED | T Cell helper I | pCMVSport 3.0 | LP08 |
| HHEM HHEN HHEO HHEP | T cell helper II | pCMVSport 3.0 | LP08 |
| HEQA HEQB HEQC | Human endometrial stromal cells | pCMVSport 3.0 | LP08 |
| HJMA HJMB | Human endometrial stromal | pCMVSport 3.0 | LP08 |
| | cells-treated with progesterone | | |
| HSWA HSWB HSWC | Human endometrial stromal | pCMVSport 3.0 | LP08 |
| | cells-treated with estradiol | | |
| HSYA HSYB HSYC | Human Thymus Stromal Cells | pCMVSport 3.0 | LP08 |
| HLWA HLWB HLWC | Human Placenta | pCMVSport 3.0 | LP08 |
| HRAA HRAB HRAC | Rejected Kidney, lib 4 | pCMVSport 3.0 | LP08 |
| HMTM | PCR, pBMC I/C treated | PCRII | LP09 |
| HMJA | H. Meniingima, M6 | pSport 1 | LP10 |
| HMKA HMKB HMKC HMKD | H. Meningima, M1 | pSport 1 | LP10 |
| HMKE | | | |
| HUSG HUSI | Human umbilical vein | pSport 1 | LP10 |
| | endothelial cells, IL-4 induced | | |
| HUSX HUSY | Human Umbilical Vein | pSport 1 | LP10 |
| | Endothelial Cells, uninduced | | |
| HOFA | Ovarian Tumor I, OV5232 | pSport 1 | LP10 |
| HCFA HCFB HCFC HCFD | T-Cell PHA 16 hrs | pSport 1 | LP10 |
| HCFL HCFM HCFN HCFO | T-Cell PHA 24 hrs | pSport 1 | LP10 |
| HADA HADC HADD HADE | Human Adipose | pSport 1 | LP10 |
| HADF HADG | | | |
| HOVA HOVB HOVC | Human Ovary | pSport 1 | LP10 |
| HTWB HTWC HTWD HTWE | Resting T-Cell Library, II | pSport 1 | LP10 |
| HTWF | | | |
| HMMA | Spleen metastic melanoma | pSport 1 | LP10 |
| HLYA HLYB HLYC HLYD | Spleen, Chronic lymphocytic | pSport 1 | LP10 |
| HLYE | leukemia | | |
| HCGA | CD34+ cell, I | pSport 1 | LP10 |
| HEOM HEON | Human Eosinophils | pSport 1 | LP10 |
| HTDA | Human Tonsil, Lib 3 | pSport 1 | LP10 |
| HSPA | Salivary Gland, Lib 2 | pSport 1 | LP10 |
| HCHA HCHB HCHC | Breast Cancer cell line, MDA 36 | pSport 1 | LP10 |
| HCHM HCHN | Breast Cancer Cell line, | pSport 1 | LP10 |
| | angiogenic | | |
| HCIA | Crohn's Disease | pSport 1 | LP10 |
| HDAA HDAB HDAC | HEL cell line | pSport 1 | LP10 |
| HABA | Human Astrocyte | pSport 1 | LP10 |
| HUFA HUFB HUFC | Ulcerative Colitis | pSport 1 | LP10 |
| HNTM | NTERA2 + retinoic acid, 14 | pSport 1 | LP10 |
| | days | | |
| HDQA | Primary Dendritic | pSport 1 | LP10 |
| | cells, CapFinder2, frac 1 | | |
| HDQM | Primary Dendritic Cells, | pSport 1 | LP10 |
| | CapFinder, frac 2 | | |
| HLDX | Human Liver, normal, CapFinder | pSport 1 | LP10 |
| HULA HULB HULC | Human Dermal Endothelial | pSport 1 | LP10 |
| | Cells, untreated | | |
| HUMA | Human Dermal Endothelial | pSport 1 | LP10 |
| | cells, treated | | |
| HCJA | Human Stromal Endometrial | pSport 1 | LP10 |
| | fibroblasts, untreated | | |
| HCJM | Human Stromal endometrial | pSport 1 | LP10 |
| | fibroblasts, treated w/ estradiol | | |
| HEDA | Human Stromal endometrial | pSport 1 | LP10 |
| | fibroblasts, treated with | | |
| | progesterone | | |
| HFNA | Human ovary tumor cell | pSport 1 | LP10 |
| | OV350721 | | |
| HKGA HKGB HKGC HKGD | Merkel Cells | pSport 1 | LP10 |
| HISA HISB HISC | Pancreas Islet Cell Tumor | pSport 1 | LP10 |
| HLSA | Skin, burned | pSport 1 | LP10 |
| HBZA | Prostate, BPH, Lib 2 | pSport 1 | LP10 |
| HBZS | Prostate BPH, Lib 2, subtracted | pSport 1 | LP10 |
| HFIA HFIB HFIC | Synovial Fibroblasts (control) | pSport 1 | LP10 |
| HFIH HFII HFIJ | Synovial hypoxia | pSport 1 | LP10 |
| HFIT HFIU HFIV | Synovial IL-1/TNF stimulated | pSport 1 | LP10 |
| HGCA | Messangial cell, frac 1 | pSport 1 | LP10 |
| HMVA HMVB HMVC | Bone Marrow Stromal Cell, | pSport 1 | LP10 |
| | untreated | | |
| HFIX HFIY HFIZ | Synovial Fibroblasts (Il1/TNF), | pSport 1 | LP10 |
| | subt | | |
| HFOX HFOY HFOZ | Synovial hypoxia-RSF | pSport 1 | LP10 |
| | subtracted | | |
| HMQA HMQB HMQC HMQD | Human Activated Monocytes | Uni-ZAP XR | LP11 |
| HLIA HLIB HLIC | Human Liver | pCMVSport 1 | LP012 |
| HHBA HHBB HHBC HHBD | Human Heart | pCMVSport 1 | LP012 |
| HHBE | | | |
| HBBA HBBB | Human Brain | pCMVSport 1 | LP012 |
| HLJA HLJB HLJC HLJD HLJE | Human Lung | pCMVSport 1 | LP012 |
| HOGA HOGB HOGC | Ovarian Tumor | pCMVSport 2.0 | LP012 |
| HTJM | Human Tonsils, Lib 2 | pCMVSport 2.0 | LP012 |
| HAMF HAMG | KMH2 | pCMVSport 3.0 | LP012 |
| HAJA HAJB HAJC | L428 | pCMVSport 3.0 | LP012 |
| HWBA HWBB HWBC HWBD | Dendritic cells, pooled | pCMVSport 3.0 | LP012 |
| HWBE | | | |
| HWAA HWAB HWAC HWAD | Human Bone Marrow, treated | pCMVSport 3.0 | LP012 |
| HWAE | | | |
| HYAA HYAB HYAC | B Cell lymphoma | pCMVSport 3.0 | LP012 |
| HWHG HWHH HWHI | Healing groin wound, 6.5 hours | pCMVSport 3.0 | LP012 |
| | post incision | | |
| HWHP HWHQ HWHR | Healing groin wound; 7.5 hours | pCMVSport 3.0 | LP012 |
| | post incision | | |
| HARM | Healing groin wound - zero hr | pCMVSport 3.0 | LP012 |
| | post-incision (control) | | |
| HBIM | Olfactory epithelium; | pCMVSport 3.0 | LP012 |
| | nasalcavity | | |
| HWDA | Healing Abdomen wound; | pCMVSport 3.0 | LP012 |
| | 70&90 min post incision | | |
| HWEA | Healing Abdomen Wound; 15 | pCMVSport 3.0 | LP012 |
| | days post incision | | |
| HWJA | Healing Abdomen | pCMVSport 3.0 | LP012 |
| | Wound; 21&29 days | | |
| HNAL | Human Tongue, frac 2 | pSport 1 | LP012 |
| HMJA | H. Meniingima, M6 | pSport 1 | LP012 |
| HMKA HMKB HMKC HMKD | H. Meningima, M1 | pSport 1 | LP012 |
| HMKE | | | |
| HOFA | Ovarian Tumor I, OV5232 | pSport 1 | LP012 |
| HCFA HCFB HCFC HCFD | T-Cell PHA 16 hrs | pSport 1 | LP012 |
| HCFL HCFM HCFN HCFO | T-Cell PHA 24 hrs | pSport 1 | LP012 |
| HMMA HMMB HMMC | Spleen metastic melanoma | pSport 1 | LP012 |
| HTDA | Human Tonsil, Lib 3 | pSport 1 | LP0L2 |
| HDBA | Human Fetal Thymus | pSport 1 | LP012 |
| HDUA | Pericardium | pSport 1 | LP012 |
| HBZA | Prostate, BPH, Lib 2 | pSport 1 | LP012 |
| HWCA | Larynx tumor | pSport 1 | LP012 |
| HWKA | Normal lung | pSport 1 | LP012 |
| HSMB | Bone marrow stroma, treated | pSport 1 | LP012 |
| HBHM | Normal trachea | pSport 1 | LP012 |
| HLFC | Human Larynx | pSport 1 | LP012 |
| HLRB | Siebben Polyposis | pSport 1 | LP012 |
| HNIA | Mammary Gland | pSport 1 | LP012 |
| HNJB | Palate carcinoma | pSport 1 | LP012 |
| HNKA | Palate normal | pSport 1 | LP012 |
| HMZA | Pharynx carcinoma | pSport 1 | LP012 |
| HABG | Cheek Carcinoma | pSport 1 | LP012 |
| HMZM | Pharynx Carcinoma | pSport 1 | LP012 |
| HDRM | Larynx Carcinoma | pSport 1 | LP012 |
| HVAA | Pancreas normal PCA4 No | pSport 1 | LP012 |
| HICA | Tongue carcinoma | pSport 1 | LP012 |
| HUKA HUKB HUKC HUKD | Human Uterine Cancer | Lambda ZAP II | LP013 |
| HUKE | | | |
| HFFA | Human Fetal Brain, random | Lambda ZAP II | LP013 |
| | primed | | |
| HTUA | Activated T-cell labeled with 4- | Lambda ZAP II | LP013 |
| | thioluri | | |
| HBQA | Early Stage Human Brain, | Lambda ZAP II | LP013 |
| | random primed | | |
| HMEB | Human microvascular | Lambda ZAP II | LP013 |
| | Endothelial cells, fract. B | | |
| HUSH | Human Umbilical Vein | Lambda ZAP II | LP013 |
| | Endothelial cells, fract. A, re- | | |
| | excision | | |
| HLQC HLQD | Hepatocellular tumor, re- | Lambda ZAP II | LP013 |
| | excision | | |
| HTWJ HTWK HTWL | Resting T-cell, re-excision | Lambda ZAP II | LP013 |
| HF6S | Human Whole 6 week Old | pBluescript | LP013 |
| | Embryo (II), subt | | |
| HHPS | Human Hippocampus, | pBluescript | LP013 |
| | subtracted | | |
| HL1S | LNCAP, differential expression | pBluescript | LP013 |
| HLHS HLHT | Early Stage Human Lung, | pBluescript | LP013 |
| | Subtracted | | |
| HSUS | Supt cells, cyclohexamide | pBluescript | LP013 |
| | treated, subtracted | | |
| HSUT | Supt cells, cyclohexamide | pBluescript | LP013 |
| | treated, differentially expressed | | |
| HSDS | H. Striatum Depression, | pBluescript | LP013 |
| | subtracted | | |
| HPTZ | Human Pituitary, Subtracted VII | pBluescript | LP013 |
| HSDX | H. Striatum Depression, subt II | pBluescript | LP013 |
| HSDZ | H. Striatum Depression, subt | pBluescript | LP013 |
| HPBA HPBB HPBC HPBD | Human Pineal Gland | pBluescript SK− | LP013 |
| HPBE | | | |
| HRTA | Colorectal Tumor | pBluescript SK− | LP013 |
| HSBA HSBB HSBC HSBM | HSC172 cells | pBluescript SK− | LP013 |
| HJAA HJAB HJAC HJAD | Jurkat T-cell G1 phase | pBluescript SK− | LP013 |
| HJBA HJBB HJBC HJBD | Jurkat T-cell, S1 phase | pBluescript SK− | LP013 |
| HTNA HTNB | Human Thyroid | pBluescript SK− | LP013 |
| HAHA HAHB | Human Adult Heart | Uni-ZAP XR | LP013 |
| HE6A | Whole 6 week Old Embryo | Uni-ZAP XR | LP013 |
| HFCA HFCB HFCC HFCD | Human Fetal Brain | Uni-ZAP XR | LP013 |
| HFCE | | | |
| HFKC HFKD HFKE HFKF | Human Fetal Kidney | Uni-ZAP XR | LP013 |
| HFKG | | | |
| HGBA HGBD HGBE HGBF | Human Gall Bladder | Uni-ZAP XR | LP013 |
| HGBG | | | |
| HPRA HPRB HPRC HPRD | Human Prostate | Uni-ZAP XR | LP013 |
| HTEA HTEB HTEC HTED | Human Testes | Uni-ZAP XR | LP013 |
| HTEE | | | |
| HTTA HTTB HTTC HTTD | Human Testes Tumor | Uni-ZAP XR | LP013 |
| HTTE | | | |
| HYBA HYBB | Human Fetal Bone | Uni-ZAP XR | LP013 |
| HFLA | Human Fetal Liver | Uni-ZAP XR | LP013 |
| HHFB HHFC HHFD HHFE | Human Fetal Heart | Uni-ZAP XR | LP013 |
| HHFF | | | |
| HUVB HUVC HUVD HUVE | Human Umbilical Vein, End. | Uni-ZAP XR | LP013 |
| | remake | | |
| HTHB HTHC HTHD | Human Thymus | Uni-ZAP XR | LP013 |
| HSTA HSTB HSTC HSTD | Human Skin Tumor | Uni-ZAP XR | LP013 |
| HTAA HTAB HTAC HTAD | Human Activated T-cells | Uni-ZAP XR | LP013 |
| HTAE | | | |
| HFEA HFEB HFEC | Human Fetal Epithelium (skin) | Uni-ZAP XR | LP013 |
| HJPA HJPB HJPC HJPD | Human Jurkat Membrane Bound | Uni-ZAP XR | LP013 |
| | Polysomes | | |
| HESA | Human Epithelioid Sarcoma | Uni-ZAP XR | LP013 |
| HALS | Human Adult Liver, Subtracted | Uni-ZAP XR | LP013 |
| HFTA HFTB HFTC HFTD | Human Fetal Dura Mater | Uni-ZAP XR | LP013 |
| HCAA HCAB HCAC | Cem cells, cyclohexamide | Uni-ZAP XR | LP013 |
| | treated | | |
| HRGA HRGB HRGC HRGD | Raji Cells, cyclohexamide | Uni-ZAP XR | LP013 |
| | treated | | |
| HE9A HE9B HE9C HE9D | Nine Week Old Early Stage | Uni-ZAP XR | LP013 |
| HE9E | Human | | |
| HSFA | Human Fibrosarcoma | Uni-ZAP XR | LP013 |
| HATA HATB HATC HATD | Human Adrenal Gland Tumor | Uni-ZAP XR | LP013 |
| HATE | | | |
| HTRA | Human Trachea Tumor | Uni-ZAP XR | LP013 |
| HE2A HE2D HE2E HE2H HE2I | 12 Week Old Early Stage | Uni-ZAP XR | LP013 |
| | Human | | |
| HE2B HE2C HE2F HE2G HE2P | 12 Week Old Early Stage | Uni-ZAP XR | LP013 |
| | Human, II | | |
| HNEA HNEB HNEC HNED | Human Neutrophil | Uni-ZAP XR | LP013 |
| HNEE | | | |
| HBGA | Human Primary Breast Cancer | Uni-ZAP XR | LP013 |
| HPTS HPTT HPTU | Human Pituitary, subtracted | Uni-ZAP XR | LP013 |
| HMQA HMQB HMQC HMQD | Human Activated Monocytes | Uni-ZAP XR | LP013 |
| HOAA HOAB HOAC | Human Osteosarcoma | Uni-ZAP XR | LP013 |
| HTOA HTOD HTOE HTOF | human tonsils | Uni-ZAP XR | LP013 |
| HTOG | | | |
| HMGB | Human OB MG63 control | Uni-ZAP XR | LP013 |
| | fraction I | | |
| HOPB | Human OB HOS control fraction I | Uni-ZAP XR | LP013 |
| HOQB | Human OB HOS treated (1 nM | Uni-ZAP XR | LP013 |
| | E2) fraction I | | |
| HAUA HAUB HAUC | Amniotic Cells - TNF induced | Uni-ZAP XR | LP013 |
| HAQA HAQB HAQC HAQD | Amniotic Cells - Primary | Uni-ZAP XR | LP013 |
| | Culture | | |
| HROA HROC | HUMAN STOMACH | Uni-ZAP XR | LP013 |
| HBJA HBJB HBJC HBJD HBJE | HUMAN B CELL | Uni-ZAP XR | LP013 |
| | LYMPHOMA | | |
| HODA HODB HODC HODD | human ovarian cancer | Uni-ZAP XR | LP013 |
| HCPA | Corpus Callosum | Uni-ZAP XR | LP013 |
| HSOA | stomach cancer (human) | Uni-ZAP XR | LP013 |
| HERA | SKIN | Uni-ZAP XR | LP013 |
| HMDA | Brain-medulloblastoma | Uni-ZAP XR | LP013 |
| HGLA HGLB HGLD | Glioblastoma | Uni-ZAP XR | LP013 |
| HWTA HWTB HWTC | wilm's tumor | Uni-ZAP XR | LP013 |
| HEAA | H. Atrophic Endometrium | Uni-ZAP XR | LP013 |
| HAPN HAPO HAPP HAPQ | Human Adult Pulmonary; re- | Uni-ZAP XR | LP013 |
| HAPR | excision | | |
| HLTG HLTH | Human T-cell lymphoma; re- | Uni-ZAP XR | LP013 |
| | excision | | |
| HAHC HAHD HAHE | Human Adult Heart; re-excision | Uni-ZAP XR | LP013 |
| HAGA HAGB HAGC HAGD | Human Amygdala | Uni-ZAP XR | LP013 |
| HAGE | | | |
| HSJA HSJB HSJC | Smooth muscle-ILb induced | Uni-ZAP XR | LP013 |
| HSHA HSHB HSHC | Smooth muscle, IL1b induced | Uni-ZAP XR | LP013 |
| HPWA HPWB HPWC HPWD | Prostate BPH | Uni-ZAP XR | LP013 |
| HPWE | | | |
| HPIA HPIB HPIC | LNCAP prostate cell line | Uni-ZAP XR | LP013 |
| HPJA HPJB HPJC | PC3 Prostate cell line | Uni-ZAP XR | LP013 |
| HBTA | Bone Marrow Stroma, | Uni-ZAP XR | LP013 |
| | TNF&LPS ind | | |
| HMCF HMCG HMCH HMCI | Macrophage-oxLDL; re-excision | Uni-ZAP XR | LP013 |
| HMCJ | | | |
| HAGG HAGH HAGI | Human Amygdala; re-excision | Uni-ZAP XR | LP013 |
| HACA | H. Adipose Tissue | Uni-ZAP XR | LP013 |
| HKFB | K562 + PMA (36 hrs), re- | ZAP Express | LP013 |
| | excision | | |
| HCWT HCWU HCWV | CD34 positive cells (cord | ZAP Express | LP013 |
| | blood), re-ex | | |
| HBWA | Whole brain | ZAP Express | LP013 |
| HBXA HBXB HBXC HBXD | Human Whole Brain #2 - Oligo | ZAP Express | LP013 |
| | dT >1.5 Kb | | |
| HAVM | Temporal cortex-Alzheizmer | pT-Adv | LP014 |
| HAVT | Hippocampus, Alzheimer | pT-Adv | LP014 |
| | Subtracted | | |
| HHAS | CHME Cell Line | Uni-ZAP XR | LP014 |
| HAJR | Larynx normal | pSport 1 | LP014 |
| HWLE HWLF HWLG HWLH | Colon Normal | pSport 1 | LP014 |
| HCRM HCRN HCRO | Colon Carcinoma | pSport 1 | LP014 |
| HWLI HWLJ HWLK | Colon Normal | pSport 1 | LP014 |
| HWLQ HWLR HWLS HWLT | Colon Tumor | pSport 1 | LP014 |
| HBFM | Gastrocnemius Muscle | pSport 1 | LP014 |
| HBOD HBOE | Quadriceps Muscle | pSport 1 | LP014 |
| HBKD HBKE | Soleus Muscle | pSport 1 | LP014 |
| HCCM | Pancreatic Langerhans | pSport 1 | LP014 |
| HWGA | Larynx carcinoma | pSport 1 | LP014 |
| HWGM HWGN | Larynx carcinoma | pSport 1 | LP014 |
| HWLA HWLB HWLC | Normal colon | pSport 1 | LP014 |
| HWLM HWLN | Colon Tumor | pSport 1 | LP014 |
| HVAM HVAN HVAO | Pancreas Tumor | pSport 1 | LP014 |
| HWGQ | Larynx carcinoma | pSport 1 | LP014 |
| HAQM HAQN | Salivary Gland | pSport 1 | LP014 |
| HASM | Stomach; normal | pSport 1 | LP014 |
| HBCM | Uterus; normal | pSport 1 | LP014 |
| HCDM | Testis; normal | pSport 1 | LP014 |
| HDJM | Brain; normal | pSport 1 | LP014 |
| HEFM | Adrenal Gland, normal | pSport 1 | LP014 |
| HBAA | Rectum normal | pSport 1 | LP014 |
| HFDM | Rectum tumour | pSport 1 | LP014 |
| HGAM | Colon, normal | pSport 1 | LP014 |
| HHMM | Colon, tumour | pSport 1 | LP014 |
| HCLB HCLC | Human Lung Cancer | Lambda Zap II | LP015 |
| HRLA | L1 Cell line | ZAP Express | LP015 |
| HHAM | Hypothalamus, Alzheimer's | pCMVSport 3.0 | LP015 |
| HKBA | Ku 812F Basophils Line | pSport 1 | LP015 |
| HS2S | Saos2, Dexamethosome Treated | pSport 1 | LP016 |
| HA5A | Lung Carcinoma A549 | pSport 1 | LP016 |
| | TNFalpha activated | | |
| HTFM | TF-1 Cell Line GM-CSF Treated | pSport 1 | LP016 |
| HYAS | Thyroid Tumour | pSport 1 | LP016 |
| HUTS | Larynx Normal | pSport 1 | LP016 |
| HXOA | Larynx Tumor | pSport 1 | LP016 |
| HEAH | Ea.hy.926 cell line | pSport 1 | LP016 |
| HINA | Adenocarcinoma Human | pSport 1 | LP016 |
| HRMA | Lung Mesothelium | pSport 1 | LP016 |
| HLCL | Human Pre-Differentiated | Uni-Zap XR | LP017 |
| | Adipocytes | | |
| HS2A | Saos2 Cells | pSport 1 | LP020 |
| HS2I | Saos2 Cells; Vitamin D3 Treated | pSport 1 | LP020 |
| HUCM | CHME Cell Line, untreated | pSport 1 | LP020 |
| HEPN | Aryepiglottis Normal | pSport 1 | LP020 |
| HPSN | Sinus Piniformis Tumour | pSport 1 | LP020 |
| HNSA | Stomach Normal | pSport 1 | LP020 |
| HNSM | Stomach Tumour | pSport 1 | LP020 |
| HNLA | Liver Normal Met5No | pSport 1 | LP020 |
| HUTA | Liver Tumour Met 5 Tu | pSport 1 | LP020 |
| HOCN | Colon Normal | pSport 1 | LP020 |
| HOCT | Colon Tumor | pSport 1 | LP020 |
| HTNT | Tongue Tumour | pSport 1 | LP020 |
| HLXN | Larynx Normal | pSport 1 | LP020 |
| HLXT | Larynx Tumour | pSport 1 | LP020 |
| HTYN | Thymus | pSport 1 | LP020 |
| HPLN | Placenta | pSport 1 | LP020 |
| HTNG | Tongue Normal | pSport 1 | LP020 |
| HZAA | Thyroid Normal (SDCA2 No) | pSport 1 | LP020 |
| HWES | Thyroid Thyroiditis | pSport 1 | LP020 |
| HFHD | Ficolled Human Stromal Cells, | pTrip1Ex2 | LP021 |
| | 5Fu treated | | |
| HFHM, HFHN | Ficolled Human Stromal Cells, | pTrip1Ex2 | LP021 |
| | Untreated | | |
| HPCI | Hep G2 Cells, lambda library | lambda Zap-CMV | LP021 |
| | | XR | |
| HBCA, HBCB, HBCC | H. Lymph node breast Cancer | Uni-ZAP XR | LP021 |
| HCOK | Chondrocytes | pSPORT 1 | LP022 |
| HDCA, HDCB, HDCC | Dendritic Cells From CD34 | pSPORT 1 | LP022 |
| | Cells | | |
| HDMA, HDMB | CD40 activated monocyte | pSPORT 1 | LP022 |
| | dendritic cells | | |
| HDDM, HDDN, HDDO | LPS activated derived dendritic | pSPORT 1 | LP022 |
| | cells | | |
| HPCR | Hep G2 Cells, PCR library | lambda Zap-CMV | LP022 |
| | | XR | |
| HAAA, HAAB, HAAC | Lung, Cancer (4005313A3): | pSPORT 1 | LP022 |
| | Invasive Poorly Differentiated | | |
| | Lung Adenocarcinoma | | |
| HIPA, HIPB, HIPC | Lung, Cancer (4005163 B7): | pSPORT 1 | LP022 |
| | Invasive, Poorly Diff. | | |
| | Adenocarcinoma, Metastatic | | |
| HOOH, HOOI | Ovary, Cancer: (4004562 B6) | pSPORT 1 | LP022 |
| | Papillary Serous Cystic | | |
| | Neoplasm, Low Malignant Pot | | |
| HIDA | Lung, Normal: (4005313 B1) | pSPORT 1 | LP022 |
| HUJA, HUJB, HUJC, HUJD, HUJE | B-Cells | pCMVSport 3.0 | LP022 |
| HNOA, HNOB, HNOC, HNOD | Ovary, Normal: (9805C040R) | pSPORT 1 | LP022 |
| HNLM | Lung, Normal: (4005313 B1) | pSPORT 1 | LP022 |
| HSCL | Stromal Cells | pSPORT 1 | LP022 |
| HAAX | Lung, Cancer: (4005313 A3) | pSPORT 1 | LP022 |
| | Invasive Poorly-differentiated | | |
| | Metastatic lung adenocarcinoma | | |
| HUUA, HUUB, HUUC, HUUD | B-cells (unstimulated) | pTrip1Ex2 | LP022 |
| HWWA, HWWB, HWWC, HWWD | B-cells (stimulated) | pSPORT 1 | LP022 |
| HWWE, HWWF, HWWG | | | |
| HCCC | Colon, Cancer: (9808C064R) | CMVSport 3.0 | LP023 |
| HPDO HPDP HPDQ HPDR | Ovary, Cancer (9809C332): | pSport 1 | LP023 |
| HPD | Poorly differentiated | | |
| | adenocarcinoma | | |
| HPCO HPCP HPCQ HPCT | Ovary, Cancer (15395A1F): | pSport 1 | LP023 |
| | Grade II Papillary Carcinoma | | |
| HOCM HOCO HOCP HOCQ | Ovary, Cancer: (15799A1F) | pSport 1 | LP023 |
| | Poorly differentiated carcinoma | | |
| HCBM HCBN HCBO | Breast, Cancer (4004943 A5) | pSport 1 | LP023 |
| HNBT HNBU HNBV | Breast, Normal: (4005522B2) | pSport 1 | LP023 |
| HBCP HBCQ | Breast, Cancer: (4005522 A2) | pSport 1 | LP023 |
| HBCJ | Breast, Cancer: (9806C012R) | pSport 1 | LP023 |
| HSAM HSAN | Stromal cells 3.88 | pSport 1 | LP023 |
| HVCA HVCB HVCC HVCD | Ovary, Cancer: (4004332 A2) | pSport 1 | LP023 |
| HSCK HSEN HSEO | Stromal cells (HBM3.18) | pSport 1 | LP023 |
| HSCP HSCQ | stromal cell clone 2.5 | pSport 1 | LP023 |
| HUXA | Breast Cancer: (4005385 A2) | pSport 1 | LP023 |
| HCOM HCON HCOO HCOP | Ovary, Cancer (4004650 A3): | pSport 1 | LP023 |
| HCOQ | Well-Differentiated | | |
| | Micropapillary Serous | | |
| | Carcinoma | | |
| HBNM | Breast, Cancer: (9802C020E) | pSport 1 | LP023 |
| HVVA HVVB HVVC HVVD | Human Bone Marrow, treated | pSport 1 | LP023 |
| HVVE | | | |

[0805] Two nonlimiting examples are provided below for isolating a particular clone from the deposited sample of plasmid cDNAs cited for that clone in Table 7. First, a plasmid is directly isolated by screening the clones using a polynucleotide probe corresponding to the nucleotide sequence of SEQ ID NO:X.

[0806] Particularly, a specific polynucleotide with 30-40 nucleotides is synthesized using an Applied Biosystems DNA synthesizer according to the sequence reported. The oligonucleotide is labeled, for instance, with ³²P-γ-ATP using T4 polynucleotide kinase and purified according to routine methods. (E.g., Maniatis et al., Molecular Cloning: A Laboratory Manual, Cold Spring Harbor Press, Cold Spring, N.Y. (1982)). The plasmid mixture is transformed into a suitable host, as indicated above (such as XL-1 Blue (Stratagene)) using techniques known to those of skill in the art, such as those provided by the vector supplier or in related publications or patents cited above. The transformants are plated on 1.5% agar plates (containing the appropriate selection agent, e.g., ampicillin) to a density of about 150 transformants (colonies) per plate. These plates are screened using Nylon membranes according to routine methods for bacterial colony screening (e.g., Sambrook et al., Molecular Cloning: A Laboratory Manual, 2nd Edit., (1989), Cold Spring Harbor Laboratory Press, pages 1.93 to 1.104), or other techniques known to those of skill in the art.

[0807] Alternatively, two primers of 17-20 nucleotides derived from both ends of the nucleotide sequence of SEQ ID NO:X are synthesized and used to amplify the desired cDNA using the deposited cDNA plasmid as a template. The polymerase chain reaction is carried out under routine conditions, for instance, in 25 μl of reaction mixture with 0.5 ug of the above cDNA template. A convenient reaction mixture is 1.5-5 mM MgCl₂, 0.01% (w/v) gelatin, 20 μM each of dATP, dCTP, dGTP, dTTP, 25 pmol of each primer and 0.25 Unit of Taq polymerase. Thirty five cycles of PCR (denaturation at 94° C. for 1 min; annealing at 55° C. for 1 min; elongation at 72° C. for 1 min) are performed with a Perkin-Elmer Cetus automated thermal cycler. The amplified product is analyzed by agarose gel electrophoresis and the DNA band with expected molecular weight is excised and purified. The PCR product is verified to be the selected sequence by subcloning and sequencing the DNA product.

[0808] Several methods are available for the identification of the 5′ or 3′ non-coding portions of a gene which may not be present in the deposited clone. These methods include but are not limited to, filter probing, clone enrichment using specific probes, and protocols similar or identical to 5′ and 3′ “RACE” protocols which are well known in the art For instance, a method similar to 5′ RACE is available for generating the missing 5′ end of a desired full-length transcript (Fromont-Racine et al., Nucleic Acids Res. 21(7):1683-1684 (1993)).

[0809] Briefly, a specific RNA oligonucleotide is ligated to the 5′ ends of a population of RNA presumably containing full-length gene RNA transcripts. A primer set containing a primer specific to the ligated RNA oligonucleotide and a primer specific to a known sequence of the gene of interest is used to PCR amplify the 5′ portion of the desired full-length gene. This amplified product may then be sequenced and used to generate the full length gene.

[0810] This above method starts with total RNA isolated from the desired source, although poly-A+ RNA can be used. The RNA preparation can then be treated with phosphatase if necessary to eliminate 5′ phosphate groups on degraded or damaged RNA which may interfere with the later RNA ligase step. The phosphatase should then be inactivated and the RNA treated with tobacco acid pyrophosphatase in order to remove the cap structure present at the 5′ ends of messenger RNAs. This reaction leaves a 5′ phosphate group at the 5′ end of the cap cleaved RNA which can then be ligated to an RNA oligonucleotide using T4 RNA ligase.

[0811] This modified RNA preparation is used as a template for first strand cDNA synthesis using a gene specific oligonucleotide. The first strand synthesis reaction is used as a template for PCR amplification of the desired 5′ end using a primer specific to the ligated RNA oligonucleotide and a primer specific to the]nown sequence of the gene of interest. The resultant product is then sequenced and analyzed to confirm that the 5′ end sequence belongs to the desired gene.

### Example 2

### Isolation of Genomic Clones Corresponding to a Polynucleotide

[0812] A human genomic P1 library (Genomic Systems, Inc.) is screened by PCR using primers selected for the sequence corresponding to SEQ ID NO:X according to the method described in Example 1. (See also, Sambrook.)

### Example 3

### Tissue Specific Expression Analysis

[0813] The Human Genome Sciences, Inc. (HGS) database is derived from sequencing tissue and/or disease specific cDNA libraries. Libraries generated from a particular tissue are selected and the specific tissue expression pattern of EST groups or assembled contigs within these libraries is determined by comparison of the expression patterns of those groups or contigs within the entire database. ESTs and assembled contigs which show tissue specific expression are selected.

[0814] The original clone from which the specific EST sequence was generated, or in the case of an assembled contig, the clone from which the 5′ most EST sequence was generated, is obtained from the catalogued library of clones and the insert amplified by PCR using methods known in the art. The PCR product is denatured and then transferred in 96 or 384 well format to a nylon membrane (Schleicher and Scheull) generating an array filter of tissue specific clones. Housekeeping genes, maize genes, and known tissue specific genes are included on the filters. These targets can be used in signal normalization and to validate assay sensitivity. Additional targets are included to monitor probe length and specificity of hybridization.

[0815] Radioactively labeled hybridization probes are generated by first strand cDNA synthesis per the manufacturer's instructions (Life Technologies) from mRNA/RNA samples prepared from the specific tissue being analyzed (e.g., prostate, prostate cancer, ovarian, ovarian cancer, etc.). The hybridization probes are purified by gel exclusion chromatography, quantitated, and hybridized with the array filters in hybridization bottles at 65° C. overnight. The filters are washed under stringent conditions and signals are captured using a Fuji phosphorimager.

[0816] Data is extracted using AIS software and following background subtraction, signal normalization is performed. This includes a normalization of filter-wide expression levels between different experimental runs. Genes that are differentially expressed in the tissue of interest are identified.

### Example 4

### Chromosomal Mapping of the Polynucleotides

[0817] An oligonucleotide primer set is designed according to the sequence at the 5′ end of SEQ ID NO:X. This primer preferably spans about 100 nucleotides. This primer set is then used in a polymerase chain reaction under the following set of conditions: 30 seconds, 95° C.; 1 minute, 56° C.; 1 minute, 70° C. This cycle is repeated 32 times followed by one 5 minute cycle at 70° C. Human, mouse, and hamster DNA is used as template in addition to a somatic cell hybrid panel containing individual chromosomes or chromosome fragments (Bios, Inc). The reactions are analyzed on either 8% polyacrylamide gels or 3.5% agarose gels. Chromosome mapping is determined by the presence of an approximately 100 bp PCR fragment in the particular somatic cell hybrid.

### Example 5

### Bacterial Expression of a Polypeptide

[0818] A polynucleotide encoding a polypeptide of the present invention is amplified using PCR oligonucleotide primers corresponding to the 5′ and 3′ ends of the DNA sequence, as outlined in Example 1, to synthesize insertion fragments. The primers used to amplify the cDNA insert should preferably contain restriction sites, such as BamHI and XbaI, at the 5′ end of the primers in order to clone the amplified product into the expression vector. For example, BamHI and XbaI correspond to the restriction enzyme sites on the bacterial expression vector pQE-9. (Qiagen, Inc., Chatsworth, Calif.). This plasmid vector encodes antibiotic resistance (Amp^{r}), a bacterial origin of replication (ori), an IPTG-regulatable promoter/operator (P/0), a ribosome binding site (RBS), a 6-histidine tag (6-His), and restriction enzyme cloning sites.

[0819] The pQE-9 vector is digested with BamHI and XbaI and the amplified fragment is ligated into the pQE-9 vector maintaining the reading frame initiated at the bacterial RBS. The ligation mixture is then used to transform the E. coli strain M15/rep4 (Qiagen, Inc.) which contains multiple copies of the plasmid pREP4, which expresses the lacI repressor and also confers kanamycin resistance (Kan^{r}). Transformants are identified by their ability to grow on LB plates and ampicillin/kanamycin resistant colonies are selected. Plasmid DNA is isolated and confirmed by restriction analysis.

[0820] Clones containing the desired constructs are grown overnight (O/N) in liquid culture in LB media supplemented with both Amp (100 ug/ml) and Kan (25 ug/ml). The O/N culture is used to inoculate a large culture at a ratio of 1:100 to 1:250. The cells are grown to an optical density 600 (O.D.⁶⁰⁰) of between 0.4 and 0.6. IPTG (Isopropyl-B-D-thiogalacto pyranoside) is then added to a final concentration of 1 mM. IPTG induces by inactivating the lacI repressor, clearing the P/O leading to increased gene expression.

[0821] Cells are grown for an extra 3 to 4 hours. Cells are then harvested by centrifugation (20 mins at 6000×g). The cell pellet is solubilized in the chaotropic agent 6 Molar Guanidine HCl by stirring for 3-4 hours at 4° C. The cell debris is removed by centrifugation, and the supernatant containing the polypeptide is loaded onto a nickel-nitrilo-tri-acetic acid (“Ni-NTA”) affinity resin column (available from QIAGEN, Inc., supra). Proteins with a 6×His tag bind to the Ni-NTA resin with high affinity and can be purified in a simple one-step procedure (for details see: The QIAexpressionist (1995) QIAGEN, Inc., supra).

[0822] Briefly, the supernatant is loaded onto the column in 6 M guanidine-HCl, pH 8. The column is first washed with 10 volumes of 6 M guanidine-HCl, pH 8, then washed with 10 volumes of 6 M guanidine-HCl pH 6, and finally the polypeptide is eluted with 6 M guanidine-HCl, pH 5.

[0823] The purified protein is then renatured by dialyzing it against phosphate-buffered saline (PBS) or 50 mM Na-acetate, pH 6 buffer plus 200 mM NaCl. Alternatively, the protein can be successfully refolded while immobilized on the Ni-NTA column. The recommended conditions are as follows: renature using a linear 6M-1M urea gradient in 500 mM NaCl, 20% glycerol, 20 mM Tris/HCl pH 7.4, containing protease inhibitors. The renaturation should be performed over a period of 1.5 hours or more. After renaturation the proteins are eluted by the addition of 250 mM immidazole. Immidazole is removed by a final dialyzing step against PBS or 50 mM sodium acetate pH 6 buffer plus 200 mM NaCl. The purified protein is stored at 4° C. or frozen at −80° C.

[0824] In addition to the above expression vector, the present invention further includes an expression vector, called pHB4a (ATCC Accession Number 209645, deposited on Feb. 25, 1998) which contains phage operator and promoter elements operatively linked to a polynucleotide of the present invention, called pHE4a. (ATCC Accession Number 209645, deposited on Feb. 25, 1998.) This vector contains: 1) a neomycinphosphotransferase gene as a selection marker, 2) an E. coli origin of replication, 3) a T5 phage promoter sequence, 4) two lac operator sequences, 5) a Shine-Delgarno sequence, and 6) the lactose operon repressor gene (lacIq). The origin of replication (oriC) is derived from pUC19 (LTI, Gaithersburg, Md.). The promoter and operator sequences are made synthetically.

[0825] DNA can be inserted into the pHE4a by restricting the vector with NdeI and XbAI, BamHI, XhoI, or Asp718, running the restricted product on a gel, and isolating the larger fragment (the stuffer fragment should be about 310 base pairs). The DNA insert is generated according to the PCR protocol described in Example 1, using PCR primers having restriction sites for NdeI (5′ primer) and XbaI, BamHI, XhoI, or Asp718 (3′ primer). The PCR insert is gel purified and restricted with compatible enzymes. The insert and vector are ligated according to standard protocols.

[0826] The engineered vector could easily be substituted in the above protocol to express protein in a bacterial system.

### Example 6

### Purification of a Polypeptide from an Inclusion Body

[0827] The following alternative method can be used to purify a polypeptide expressed in E coli when it is present in the form of inclusion bodies. Unless otherwise specified, all of the following steps are conducted at 4-10° C.

[0828] Upon completion of the production phase of the E. coli fermentation, the cell culture is cooled to 4-10° C. and the cells harvested by continuous centrifugation at 15,000 rpm (Heraeus Sepatech). On the basis of the expected yield of protein per unit weight of cell paste and the amount of purified protein required, an appropriate amount of cell paste, by weight, is suspended in a buffer solution containing 100 mM Tris, 50 mM EDTA, pH 7.4. The cells are dispersed to a homogeneous suspension using a high shear mixer.

[0829] The cells are then lysed by passing the solution through a microfluidizer (Microfuidics, Corp. or APV Gaulin, Inc.) twice at 4000-6000 psi. The homogenate is then mixed with NaCl solution to a final concentration of 0.5 M NaCl, followed by centrifugation at 7000×g for 15 min. The resultant pellet is washed again using 0.5M NaCl, 100 mM Tris, 50 mM EDTA, pH 7.4.

[0830] The resulting washed inclusion bodies are solubilized with 1.5 M guanidine hydrochloride (GuHCl) for 2-4 hours. After 7000×g centrifugation for 15 min., the pellet is discarded and the polypeptide containing supernatant is incubated at 4° C. overnight to allow further GuHCl extraction.

[0831] Following high speed centrifugation (30,000×g) to remove insoluble particles, the GuHCl solubilized protein is refolded by quickly mixing the GuHCl extract with 20 volumes of buffer containing 50 mM sodium pH 4.5, 150 mM NaCl, 2 mM EDTA by vigorous stirring. The refolded diluted protein solution is kept at 4° C. without mixing for 12 hours prior to further purification steps.

[0832] To clarify the refolded polypeptide solution, a previously prepared tangential filtration unit equipped with 0.16 μm membrane filter with appropriate surface area (e.g., Filtron), equilibrated with 40 mM sodium acetate, pH 6.0 is employed. The filtered sample is loaded onto a cation exchange resin (e.g., Poros HS-50, Perseptive Biosystems). The column is washed with 40 mM sodium acetate, pH 6.0 and eluted with 250 mM, 500 mM, 1000 mM, and 1500 mM NaCl in the same buffer, in a stepwise manner. The absorbance at 280 nm of the effluent is continuously monitored. Fractions are collected and further analyzed by SDS-PAGE.

[0833] Fractions containing the polypeptide are then pooled and mixed with 4 volumes of water. The diluted sample is then loaded onto a previously prepared set of tandem columns of strong anion (Poros HQ-50, Perseptive Biosystems) and weak anion (Poros CM-20, Perseptive Biosystems) exchange resins. The columns are equilibrated with 40 mM sodium acetate, pH 6.0. Both columns are washed with 40 mM sodium acetate, pH 6.0, 200 mM NaCl. The CM-20 column is then eluted using a 10 column volume linear gradient ranging from 0.2 M NaCl, 50 mM sodium acetate, pH 6.0 to 1.0 M NaCl, 50 mM sodium acetate, pH 6.5. Fractions are collected under constant A₂₈₀ monitoring of the effluent. Fractions containing the polypeptide (determined, for instance, by 16% SDS-PAGE) are then pooled.

[0834] The resultant polypeptide should exhibit greater than 95% purity after the above refolding and purification steps. No major contaminant bands should be observed from Commassie blue stained 16% SDS-PAGE gel when 5 μg of purified protein is loaded. The purified protein can also be tested for endotoxin/LPS contamination, and typically the LPS content is less than 0.1 ng/ml according to LAL assays.

### Example 7

### Cloning and Expression of a Polypeptide in a Baculovirus Expression System

[0835] In this example, the plasmid shuttle vector pA2 is used to insert a polynucleotide into a baculovirus to express a polypeptide. This expression vector contains the strong polyhedrin promoter of the Autographa californica nuclear polyhedrosis virus (AcMNPV) followed by convenient restriction sites such as BamHI, Xba I and Asp718. The polyadenylation site of the simian virus 40 (“SV40”) is used for efficient polyadenylation. For easy selection of recombinant virus, the plasmid contains the beta-galactosidase gene from E. coli under control of a weak Drosophila promoter in the same orientation, followed by the polyadenylation signal of the polyhedrin gene. The inserted genes are flanked on both sides by viral sequences for cell-mediated homologous recombination with wild-type viral DNA to generate a viable virus that express the cloned polynucleotide.

[0836] Many other baculovirus vectors can be used in place of the vector above, such as pAc373, pVL941, and pAcIM1, as one skilled in the art would readily appreciate, as long as the construct provides appropriately located signals for transcription, translation, secretion and the like, including a signal peptide and an in-frame AUG as required. Such vectors are described, for instance, in Luckow et al., Virology 170:31-39 (1989).

[0837] Specifically, the cDNA sequence contained in the deposited clone, including the AUG initiation codon, is amplified using the PCR protocol described in Example 1. If a naturally occurring signal sequence is used to produce the polypeptide of the present invention, the pA2 vector does not need a second signal peptide. Alternatively, the vector can be modified (pA2 GP) to include a baculovirus leader sequence, using the standard methods described in Summers et al., “A Manual of Methods for Baculovirus Vectors and Insect Cell Culture Procedures,” Texas Agricultural Experimental Station Bulletin No. 1555 (1987).

[0838] The amplified fragment is isolated from a 1% agarose gel using a commercially available kit (“Geneclean,” BIO 101 Inc., La Jolla, Calif.). The fragment then is digested with appropriate restriction enzymes and again purified on a 1% agarose gel.

[0839] The plasmid is digested with the corresponding restriction enzymes and optionally, can be dephosphorylated using calf intestinal phosphatase, using routine procedures known in the art. The DNA is then isolated from a 1% agarose gel using a commercially available kit (“Geneclean” BIO 101 Inc., La Jolla, Calif.).

[0840] The fragment and the dephosphorylated plasmid are ligated together with T4 DNA ligase. E. coli HB101 or other suitable E. coli hosts such as XL-1 Blue (Stratagene Cloning Systems, La Jolla, Calif.) cells are transformed with the ligation mixture and spread on culture plates. Bacteria containing the plasmid are identified by digesting DNA from individual colonies and analyzing the digestion product by gel electrophoresis. The sequence of the cloned fragment is confirmed by DNA sequencing.

[0841] Five μg of a plasmid containing the polynucleotide is co-transfected with 1.0 μg of a commercially available linearized baculovirus DNA (“BaculoGold™ baculovirus DNA, Pharmingen, San Diego, Calif.), using the lipofection method described by Felgner et al., Proc. Natl. Acad. Sci. USA 84:7413-7417 (1987). One μg of BaculoGold™ virus DNA and 5 μg of the plasmid are mixed in a sterile well of a microtiter plate containing 50 μl of serum-free Grace's medium (Life Technologies Inc., Gaithersburg, Md.). Afterwards, 10 μl Lipofectin plus 90 μl Grace's medium are added, mixed and incubated for 15 minutes at room temperature. Then the transfection mixture is added drop-wise to Sf9 insect cells (ATCC CRL 1711) seeded in a 35 mm tissue culture plate with 1 ml Grace's medium without serum. The plate is then incubated for 5 hours at 27° C. The transfection solution is then removed from the plate and 1 ml of Grace's insect medium supplemented with 10% fetal calf serum is added. Cultivation is then continued at 27° C. for four days.

[0842] After four days the supernatant is collected and a plaque assay is performed, as described by Summers and Smith, spra. An agarose gel with “Blue Gal” (Life Technologies Inc., Gaithersburg) is used to allow easy identification and isolation of gal-expressing clones, which produce blue-stained plaques. (A detailed description of a “plaque assay” of this type can also be found in the user's guide for insect cell culture and baculovirology distributed by Life Technologies Inc., Gaithersburg, page 9-10.) After appropriate incubation, blue stained plaques are picked with the tip of a micropipettor (e.g., Eppendorf). The agar containing the recombinant viruses is then resuspended in a microcentrifuge tube containing 200 μl of Grace's medium and the suspension containing the recombinant baculovirus is used to infect Sf9 cells seeded in 35 mm dishes. Four days later the supernatants of these culture dishes are harvested and then they are stored at 4° C.

[0843] To verify the expression of the polypeptide, Sf9 cells are grown in Grace's medium supplemented with 10% heat-inactivated FBS. The cells are infected with the recombinant baculovirus containing the polynucleotide at a multiplicity of infection (“MOI”) of about 2. If radiolabeled proteins are desired, 6 hours later the medium is removed and is replaced with SF900 μl medium minus methionine and cysteine (available from Life Technologies Inc., Rockville, Md.). After 42 hours, 5 μCi of ³⁵S-methionine and 5 μCi ³⁵S-cysteine (available from Amersham) are added. The cells are further incubated for 16 hours and then are harvested by centrifugation. The proteins in the supernatant as well as the intracellular proteins are analyzed by SDS-PAGE followed by autoradiography (if radiolabeled).

[0844] Microsequencing of the amino acid sequence of the amino terminus of purified protein may be used to determine the amino terminal sequence of the produced protein.

### Example 8

### Expression of a Polypeptide in Mammalian Cells

[0845] The polypeptide of the present invention can be expressed in a mammalian cell. A typical mammalian expression vector contains a promoter element, which mediates the initiation of transcription of mRNA, a protein coding sequence, and signals required for the termination of transcription and polyadenylation of the transcript. Additional elements include enhancers, Kozak sequences and intervening sequences flanked by donor and acceptor sites for RNA splicing. Highly efficient transcription is achieved with the early and late promoters from SV40, the long terminal repeats (LTRs) from Retroviruses, e.g., RSV, HTLVI, HIVI and the early promoter of the cytomegalovirus (CMV). However, cellular elements can also be used (e.g., the human actin promoter).

[0846] Suitable expression vectors for use in practicing the present invention include, for example, vectors such as pSVL and pMSG (Pharmacia, Uppsala, Sweden), pRSVcat (ATCC 37152), pSV2dhfr (ATCC 37146), pBCl₂MI (ATCC 67109), pCMVSport 2.0, and pCMVSport 3.0. Mammalian host cells that could be used include, human Hela, 293, H9 and Jurkat cells, mouse NIH3T3 and C127 cells, Cos 1, Cos 7 and CVI, quail QC1-3 cells, mouse L cells and Chinese hamster ovary (CHO) cells.

[0847] Alternatively, the polypeptide can be expressed in stable cell lines containing the polynucleotide integrated into a chromosome. The co-transfection with a selectable marker such as DHFR, gpt, neomycin, or hygromycin allows the identification and isolation of the transfected cells.

[0848] The transfected gene can also be amplified to express large amounts of the encoded protein. The DHFR (dihydrofolate reductase) marker is useful in developing cell lines that carry several hundred or even several thousand copies of the gene of interest. (See, e.g., Alt, F. W., et al., J. Biol. Chem. 253:1357-1370 (1978); Hamlin, J. L. and Ma, C., Biochem. et Biophys. Acta, 1097:107-143 (1990); Page, M. J. and Sydenham, M. A., Biotechnology 9:64-68 (1991)). Another useful selection marker is the enzyme glutamine synthase (GS) (Murphy et al., Biochem J. 227:277-279 (1991); Bebbington et al., Bio/Technology 10:169-175 (1992). Using these markers, the mammalian cells are grown in selective medium and the cells with the highest resistance are selected. These cell lines contain the amplified gene(s) integrated into a chromosome. Chinese hamster ovary (CHO) and NSO cells are often used for the production of proteins.

[0849] Derivatives of the plasmid pSV2-dhfr (ATCC Accession No. 37146), the expression vectors pC4 (ATCC Accession No. 209646) and pC6 (ATCC Accession No. 209647) contain the strong promoter (LTR) of the Rous Sarcoma Virus (Cullen et al., Molecular and Cellular Biology, 438-447 (March, 1985)) plus a fragment of the CMV-enhancer (Boshart et al., Cell 41:521-530 (1985)). Multiple cloning sites, e.g., with the restriction enzyme cleavage sites BamHI, XbaI and Asp718, facilitate the cloning of the gene of interest. The vectors also contain the 3′ intron, the polyadenylation and termination signal of the rat preproinsulin gene, and the mouse DHFR gene under control of the SV40 early promoter.

[0850] Specifically, the plasmid pC6, for example, is digested with appropriate restriction enzymes and then dephosphorylated using calf intestinal phosphates by procedures known in the art. The vector is then isolated from a 1% agarose gel.

[0851] A polynucleotide of the present invention is amplified according to the protocol outlined in Example 1. If a naturally occurring signal sequence is used to produce the polypeptide of the present invention, the vector does not need a second signal peptide. Alternatively, if a naturally occurring signal sequence is not used, the vector can be modified to include a heterologous signal sequence. (See, e.g., International Publication No. WO 96/34891.)

[0852] The amplified fragment is isolated from a 1% agarose gel using a commercially available kit (“Geneclean,” BIO 101 Inc., La Jolla, Calif.). The fragment then is digested with appropriate restriction enzymes and again purified on a 1% agarose gel.

[0853] The amplified fragment is then digested with the same restriction enzyme and purified on a 1% agarose gel. The isolated fragment and the dephosphorylated vector are then ligated with T4 DNA ligase. E. coli HB101 or XL-1 Blue cells are then transformed and bacteria are identified that contain the fragment inserted into plasmid pC6 using, for instance, restriction enzyme analysis.

[0854] Chinese hamster ovary cells lacking an active DHFR gene is used for transfection. Five μg of the expression plasmid pC6 or pC4 is cotransfected with 0.5 μg of the plasmid pSVneo using lipofectin (Felgner et al., supra). The plasmid pSV2-neo contains a dominant selectable marker, the neo gene from Tn5 encoding an enzyme that confers resistance to a group of antibiotics including G418. The cells are seeded in alpha minus MEM supplemented with 1 mg/ml G418. After 2 days, the cells are trypsinized and seeded in hybridoma cloning plates (Greiner, Germany) in alpha minus MEM supplemented with 10, 25, or 50 ng/ml of methotrexate plus 1 mg/ml G418. After about 10-14 days single clones are trypsinized and then seeded in 6-well petri dishes or 10 ml flasks using different concentrations of methotrexate (50 nM, 100 nM, 200 nM, 400 nM, 800 nM). Clones growing at the highest concentrations of methotrexate are then transferred to new 6-well plates containing even higher concentrations of methotrexate (1 μM, 2 μM, 5 μM, 10 mM, 20 mM). The same procedure is repeated until clones are obtained which grow at a concentration of 100-200 μM. Expression of the desired gene product is analyzed, for instance, by SDS-PAGE and Western blot or by reversed phase HPLC analysis.

### Example 9

### Protein Fusions

[0855] The polypeptides of the present invention are preferably fused to other proteins. These fusion proteins can be used for a variety of applications. For example, fusion of the present polypeptides to His-tag, HA-tag, protein A, IgG domains, and maltose binding protein facilitates purification. (See Example 5; see also EP A 394,827; Traunecker, et al., Nature 331:84-86 (1988)). Similarly, fusion to IgG-1, IgG-3, and albumin increases the halflife time in vivo. Nuclear localization signals fused to the polypeptides of the present invention can target the protein to a specific subcellular localization, while covalent heterodimer or homodimers can increase or decrease the activity of a fusion protein. Fusion proteins can also create chimeric molecules having more than one function. Finally, fusion proteins can increase solubility and/or stability of the fused protein compared to the non-fused protein. All of the types of fusion proteins described above can be made by modifying the following protocol, which outlines the fusion of a polypeptide to an IgG molecule, or the protocol described in Example 5.

[0856] Briefly, the human Fc portion of the IgG molecule can be PCR amplified, using primers that span the 5′ and 3′ ends of the sequence described below. These primers also should have convenient restriction enzyme sites that will facilitate cloning into an expression vector, preferably a mammalian expression vector.

[0857] For example, if pC4 (ATCC Accession No. 209646) is used, the human Fc portion can be ligated into the BamHI cloning site. Note that the 3′ BamHI site should be destroyed. Next, the vector containing the human Fc portion is re-restricted with BamHI, linearizing the vector, and a polynucleotide of the present invention, isolated by the PCR protocol described in Example 1, is ligated into this BamHI site. Note that the polynucleotide is cloned without a stop codon, otherwise a fusion protein will not be produced.

[0858] If the naturally occurring signal sequence is used to produce the polypeptide of the present invention, pC4 does not need a second signal peptide. Alternatively, if the naturally occurring signal sequence is not used, the vector can be modified to include a heterologous signal sequence. (See, e.g., International Publication No. WO 96/34891.)

| | | |
|---|---|---|
| Human IgG Fc region: | GGGATCCGGAGCCCAAATCTTCTGACAAAACTCACACATGCCCACCGTGCCCAGCAC | (SEQ ID NO: 1) |
| | CTGAATTCGAGGGTGCACCGTCAGTCTTCCTCTTCCCCCCAAAACCCAAGGACACCCT | |
| | CATGATCTCCCGGACTCCTGAGGTCACATGCGTGGTGGTGGACGTAAGCCACGAAGA | |
| | CCCTGAGGTCAAGTTCAACTGGTACGTGGACGGCGTGGAGGTGCATAATGCCAAGAC | |
| | AAAGCCGCGGGAGGAGCAGTACAACAGCACGTACCGTGTGGTCAGCGTCCTCACCGT | |
| | CCTGCACCAGGACTGGCTGAATGGCAAGGAGTACAAGTGCAAGGTCTCCAACAAAGC | |
| | CCTCCCAACCCCCATCGAGAAAACCATCTCCAAAGCCAAAGGGCAGCCCCGAGAACC | |
| | ACAGGTGTACACCCTGCCCCCATCCCGGGATGAGCTGACCAAGAACCAGGTCAGCCT | |
| | GACCTGCCTGGTCAAAGGCTTCTATCCAAGCGACATCGCCGTGGAGTGGGAGAGCAA | |
| | TGGGCAGCCGGAGAACAACTACAAGACCACGCCTCCCGTGCTGGACTCCGACGGCTC | |
| | CTTCTTCCTCTACAGCAAGCTCACCGTGGACAAGAGCAGGTGGCAGCAGGGGAACGT | |
| | CTTCTCATGCTCCGTGATGCATGAGGCTCTGCACAACCACTACACGCAGAAGAGCCTC | |
| | TCCCTGTCTCCGGGTAAATGAGTGCGACGGCCGCGACTCTAGAGGAT | |

### Example 10

### Production of an Antibody from a Polypeptide

a) Hybridoma Technology

[0859] The antibodies of the present invention can be prepared by a variety of methods. (See, Current Protocols, Chapter 2.) As one example of such methods, cells expressing a polypeptide of the present invention are administered to an animal to induce the production of sera containing polyclonal antibodies. In a preferred method, a preparation of a polypeptide of the present invention is prepared and purified to render it substantially free of natural contaminants. Such a preparation is then introduced into an animal in order to produce polyclonal antisera of greater specific activity.

[0860] Monoclonal antibodies specific for a polypeptide of the present invention are prepared using hybridoma technology (Kohler et al., Nature 256:495 (1975); Kohler et al., Eur. J. Immunol. 6:511 (1976); Kohler et al., Eur. J. Immunol. 6:292 (1976); Hammerling et al., in: Monoclonal Antibodies and T-Cell Hybridomas, Elsevier, N.Y., pp. 563-681 (1981)). In general, an animal (preferably a mouse) is immunized with a polypeptide of the present invention or, more preferably, with a secreted polypeptide-expressing cell. Such polypeptide-expressing cells are cultured in any suitable tissue culture medium, preferably in Barle's modified Eagle's medium supplemented with 10% fetal bovine serum (inactivated at about 56° C.), and supplemented with about 10 g/l of nonessential amino acids, about 1,000 U/ml of penicillin, and about 100 μg/ml of streptomycin.

[0861] The splenocytes of such mice are extracted and fused with a suitable myeloma cell line. Any suitable myeloma cell line may be employed in accordance with the present invention; however, it is preferable to employ the parent myeloma cell line (SP20), available from the ATCC. After fusion, the resulting hybridoma cells are selectively maintained in HAT medium, and then cloned by limiting dilution as described by Wands et al. (Gastroenterology 80:225-232 (1981)). The hybridoma cells obtained through such a selection are then assayed to identify clones which secrete antibodies capable of binding the polypeptide of the present invention.

[0862] Alternatively, additional antibodies capable of binding to a polypeptide of the present invention can be produced in a two-step procedure using anti-idiotypic antibodies. Such a method makes use of the fact that antibodies are themselves antigens, and therefore, it is possible to obtain an antibody which binds to a second antibody. In accordance with this method, protein specific antibodies are used to immunize an animal, preferably a mouse. The splenocytes of such an animal are then used to produce hybridoma cells, and the hybridoma cells are screened to identify clones which produce an antibody whose ability to bind to the polypeptide-specific antibody can be blocked by said polypeptide. Such antibodies comprise anti-idiotypic antibodies to the polypeptide-specific antibody and are used to immunize an animal to induce formation of further polypeptide-specific antibodies.

[0863] For in vivo use of antibodies in humans, an antibody is “humanized”. Such antibodies can be produced using genetic constructs derived from hybridoma cells producing the monoclonal antibodies described above. Methods for producing chimeric and humanized antibodies are known in the art and are discussed herein. (See, for review, Morrison, Science 229:1202 (1985); Oi et al., BioTechniques 4:214 (1986); Cabilly et al., U.S. Pat. No. 4,816,567; Taniguchi et al., EP 171496; Morrison et al., EP 173494; Neuberger et al., WO 8601533; Robinson et al., International Publication No. WO 8702671; Boulianne et al., Nature 312:643 (1984); Neuberger et al., Nature 314:268 (1985)).

B) Isolation of Antibody Fragments Directed Against a Polypeptide of the Present Invention from a Library of scFvs

[0864] Naturally occurring V-genes isolated from human PBLs are constructed into a library of antibody fragments which contain reactivities against a polypeptide of the present invention to which the donor may or may not have been exposed (see e.g., U.S. Pat. No. 5,885,793 incorporated herein by reference in its entirety).

[0865] Rescue of the Library. A library of scFvs is constructed from the RNA of human PBLs as described in International Publication No. WO 92/01047. To rescue phage displaying antibody fragments, approximately 10⁹ E. coli harboring the phagemid are used to inoculate 50 ml of 2×TY containing 1% glucose and 100 μg/ml of ampicillin (2×TY-AMP-GLU) and grown to an O.D. of 0.8 with shaking. Five ml of this culture is used to inoculate 50 ml of 2×TY-AMP-GLU, 2×108 TU of delta gene 3 helper (M13 delta gene III, see International Publication No. WO 92/01047) are added and the culture incubated at 37° C. for 45 minutes without shaking and then at 37° C. for 45 minutes with shaking. The culture is centrifuged at 4000 r.p.m. for 10 min. and the pellet resuspended in 2 liters of 2×TY containing 100 μg/ml ampicillin and 50 ug/ml kanamycin and grown overnight. Phage are prepared as described in International Publication No. WO 92/01047.

[0866] M13 delta gene III is prepared as follows: M13 delta gene III helper phage does not encode gene III protein, hence the phage(mid) displaying antibody fragments have a greater avidity of binding to antigen. Infectious M13 delta gene III particles are made by growing the helper phage in cells harboring a pUC19 derivative supplying the wild type gene III protein during phage morphogenesis. The culture is incubated for 1 hour at 37° C. without shaking and then for a further hour at 37° C. with shaking. Cells are spun down (IEC-Centra 8,400 r.p.m. for 10 min), resuspended in 300 ml 2×TY broth containing 100 μg ampicillin/ml and 25 μg kanarnycin/ml (2×TY-AMP-KAN) and grown overnight, shaking at 37° C. Phage particles are purified and concentrated from the culture medium by two PEG-precipitations (Sambrook et al., 1990), resuspended in 2 ml PBS and passed through a 0.45 μm filter (Minisart NML; Sartorius) to give a final concentration of approximately 10¹³ transducing units/ml (ampicillin-resistant clones).

[0867] Panning of the Library. Immunotubes (Nunc) are coated overnight in PBS with 4 ml of either 100 μg/ml or 10 μg/ml of a polypeptide of the present invention. Tubes are blocked with 2% Marvel-PBS for 2 hours at 37° C. and then washed 3 times in PBS. Approximately 10¹³ TU of phage is applied to the tube and incubated for 30 minutes at room temperature tumbling on an over and under turntable and then left to stand for another 1.5 hours. Tubes are washed 10 times with PBS 0.1% Tween-20 and 10 times with PBS. Phage are eluted by adding 1 ml of 100 mM triethylamine and rotating 15 minutes on an under and over turntable after which the solution is immediately neutralized with 0.5 ml of 11.0M Tris-HCl, pH 7.4. Phage are then used to infect 10 ml of mid-log E. coli TG1 by incubating eluted phage with bacteria for 30 minutes at 37° C. The E. coli are then plated on TYE plates containing 1% glucose and 100 μg/ml ampicillin. The resulting bacterial library is then rescued with delta gene 3 helper phage as described above to prepare phage for a subsequent round of selection. This process is then repeated for a total of 4 rounds of affinity purification with tube-washing increased to 20 times with PBS, 0.1% Tween-20 and 20 times with PBS for rounds 3 and 4.

[0868] Characterization of Binders. Eluted phage from the 3rd and 4th rounds of selection are used to infect E. coli HB 2151 and soluble scFv is produced (Marks, et al., 1991) from single colonies for assay. ELISAs are performed with microtitre plates coated with either 10 pg/ml of the polypeptide of the present invention in 50 mM bicarbonate pH 9.6. Clones positive in ELISA are further characterized by PCR fingerprinting (see, e.g., International Publication No. WO 92/01047) and then by sequencing. These ELISA positive clones may also be further characterized by techniques known in the art, such as, for example, epitope mapping, binding affinity, receptor signal transduction, ability to block or competitively inhibit antibody/antigen binding, and competitive agonistic or antagonistic activity.

### Example 11

### Method of Determining Alterations in a Gene Corresponding to a Polynucleotide

[0869] RNA isolated from entire families or individual patients presenting with a hematopoietic or hematologic disease or disorder is isolated. cDNA is then generated from these RNA samples using protocols known in the art. (See, Sambrook.) The cDNA is then used as a template for PCR, employing primers surrounding regions of interest in SEQ ID NO:X; and/or the nucleotide sequence of the cDNA contained in ATCC Deposit No:Z. Suggested PCR conditions consist of 35 cycles at 95 degrees C. for 30 seconds; 60-120 seconds at 52-58 degrees C.; and 60-120 seconds at 70 degrees C., using buffer solutions described in Sidransky et al., Science 252:706 (1991).

[0870] PCR products are then sequenced using primers labeled at their 5′ end with T4 polynucleotide kinase, employing SequiTherm Polymerase (Epicentre Technologies). The intron-exon boundaries of selected exons is also determined and genomic PCR products analyzed to confirm the results. PCR products harboring suspected mutations are then cloned and sequenced to validate the results of the direct sequencing.

[0871] PCR products are cloned into T-tailed vectors as described in Holton et al., Nucleic Acids Research, 19:1156 (1991) and sequenced with T7 polymerase (United States Biochemical). Affected individuals are identified by mutations not present in unaffected individuals.

[0872] Genomic rearrangements are also observed as a method of determining alterations in a gene corresponding to a polynucleotide. Genomic clones isolated according to Example 2 are nick-translated with digoxigenindeoxy-uridine 5′-triphosphate (Boehringer Manheim), and FISH performed as described in Johnson et al., Methods Cell Biol. 35:73-99 (1991). Hybridization with the labeled probe is carried out using a vast excess of human cot-1 DNA for specific hybridization to the corresponding genomic locus.

[0873] Chromosomes are counterstained with 4,6-diamino-2-phenylidole and propidium iodide, producing a combination of C- and R-bands. Aligned images for precise mapping are obtained using a triple-band filter set (Chroma Technology, Brattleboro, Vt.) in combination with a cooled charge-coupled device camera (Photometrics, Tucson, Ariz.) and variable excitation wavelength filters. (Johnson et al., Genet. Anal. Tech. Appl., 8:75 (1991)). Image collection, analysis and chromosomal fractional length measurements are performed using the ISee Graphical Program System (Inovision Corporation, Durham, N.C.) Chromosome alterations of the genomic region hybridized by the probe are identified as insertions, deletions, and translocations. These alterations are used as a diagnostic marker for an associated disease.

### Example 12

### Method of Detecting Abnormal Levels of a Polypeptide in a Biological Sample

[0874] A polypeptide of the present invention can be detected in a biological sample, and if an increased or decreased level of the polypeptide is detected, this polypeptide is a marker for a particular phenotype. Methods of detection are numerous, and thus, it is understood that one skilled in the art can modify the following assay to fit their particular needs.

[0875] For example, antibody-sandwich ELISAs are used to detect polypeptides in a sample, preferably a biological sample. Wells of a microtiter plate are coated with specific antibodies, at a final concentration of 0.2 to 10 ug/ml. The antibodies are either monoclonal or polyclonal and are produced by the method described in Example 10. The wells are blocked so that non-specific binding of the polypeptide to the well is reduced.

[0876] The coated wells are then incubated for >2 hours at RT with a sample containing the polypeptide. Preferably, serial dilutions of the sample should be used to validate results. The plates are then washed three times with deionized or distilled water to remove unbound polypeptide.

[0877] Next, 50 ul of specific antibody-alkaline phosphatase conjugate, at a concentration of 25-400 ng, is added and incubated for 2 hours at room temperature. The plates are again washed three times with deionized or distilled water to remove unbound conjugate.

[0878] Add 75 ul of 4-methylumbelliferyl phosphate (MUP) or p-nitrophenyl phosphate (NPP) substrate solution to each well and incubate 1 hour at room temperature. Measure the reaction by a microtiter plate reader. Prepare a standard curve, using serial dilutions of a control sample, and plot polypeptide concentration on the X-axis (log scale) and fluorescence or absorbance of the Y-axis (linear scale). Interpolate the concentration of the polypeptide in the sample using the standard curve.

### Example 13

### Formulation

[0879] The invention also provides methods of preventing, treating and/or ameliorating a hematopoietic and hematologic disease or disorder by administration to a subject of an effective amount of a Therapeutic. By therapeutic is meant polynucleotides or polypeptides of the invention (including fragments and variants), agonists or antagonists thereof, and/or antibodies thereto, in combination with a pharmaceutically acceptable carrier type (e.g., a sterile carrier).

[0880] The Therapeutic will be formulated and dosed in a fashion consistent with good medical practice, taking into account the clinical condition of the individual patient (especially the side effects of treatment with the Therapeutic alone), the site of delivery, the method of administration, the scheduling of administration, and other factors known to practitioners. The “effective amount” for purposes herein is thus determined by such considerations.

[0881] As a general proposition, the total pharmaceutically effective amount of the Therapeutic administered parenterally per dose will be in the range of about 1 ug/kg/day to 10 mg/kg/day of patient body weight, although, as noted above, this will be subject to therapeutic discretion. More preferably, this dose is at least 0.01 mg/kg/day, and most preferably for humans between about 0.01 and 1 mg/kg/day for the hormone. If given continuously, the Therapeutic is typically administered at a dose rate of about 1 ug/kg/hour to about 50 ug/kg/hour, either by 14 injections per day or by continuous subcutaneous infusions, for example, using a mini-pump. An intravenous bag solution may also be employed. The length of treatment needed to observe changes and the interval following treatment for responses to occur appears to vary depending on the desired effect.

[0882] Therapeutics can be are administered orally, rectally, parenterally, intracistemally, intravaginally, intraperitoneally, topically (as by powders, ointments, gels, drops or transdermal patch), bucally, or as an oral or nasal spray. “Pharmaceutically acceptable carrier” refers to a non-toxic solid, semisolid or liquid filler, diluent, encapsulating material or formulation auxiliary of any. The term “parenteral” as used herein refers to modes of administration which include intravenous, intramuscular, intraperitoneal, intrasternal, subcutaneous and intraarticular injection and infusion.

[0883] Therapeutics of the invention are also suitably administered by sustained-release systems. Suitable examples of sustained-release Therapeutics are administered orally, rectally, parenterally, intracistemally, intravaginally, intraperitoneally, topically (as by powders, ointments, gels, drops or transdermal patch), bucally, or as an oral or nasal spray. “Pharmaceutically acceptable carrier” refers to a non-toxic solid, semisolid or liquid filler, diluent, encapsulating material or formulation auxiliary of any type. The term “parenteral” as used herein refers to modes of administration which include intravenous, intramuscular, intraperitoneal, intrasternal, subcutaneous and intraarticular injection and infusion.

[0884] Therapeutics of the invention are also suitably administered by sustained-release systems. Suitable examples of sustained-release Therapeutics include suitable polymeric materials (such as, for example, semi-permeable polymer matrices in the form of shaped articles, e.g., films, or mirocapsules), suitable hydrophobic materials (for example as an emulsion in an acceptable oil) or ion exchange resins, and sparingly soluble derivatives (such as, for example, a sparingly soluble salt).

[0885] Sustained-release matrices include polylactides (U.S. Pat. No. 3,773,919, EP 58,481), copolymers of L-glutamic acid and gamma-ethyl-L-glutamate (Sidman et al., Biopolymers 22:547-556 (1983)), poly (2-hydroxyethyl methacrylate) (Langer et al., J. Biomed. Mater. Res. 15:167-277 (1981), and Langer, Chem. Tech. 12:98-105 (1982)), ethylene vinyl acetate (Langer et al., Id.) or poly-D-(−)-3-hydroxybutyric acid (EP 133,988).

[0886] In a preferred embodiment, polypeptide, polynucleotide, and antibody compositions of the invention are formulated in a biodegradable, polymeric drug delivery system, for example as described in U.S. Pat. Nos. 4,938,763; 5,278,201; 5,278,202; 5,324,519; 5,340,849; and 5,487,897 and in International Publication Numbers WO01/35929, WO00/24374, and WO00/06117 which are hereby incorporated by reference in their entirety. In specific preferred embodiments the polypeptide, polynucleotide, and antibody compositions of the invention are formulated using the ATRIGEL® Biodegradable System of Atrix Laboratories, Inc. (Fort Collins, Colo.).

[0887] Examples of biodegradable polymers which can be used in the formulation of polypeptide, polynucleotide, and antibody compositions, include but are not limited to, polylactides, polyglycolides, polycaprolactones, polyanhydrides, polyamides, polyurethanes, polyesteramides, polyorthoesters, polydioxanones, polyacetals, polyketals, polycarbonates, polyorthocarbonates, polyphosphazenes, polyhydroxybutyrates, polyhydroxyvalerates, polyalkylene oxalates, polyalkylene succinates, poly(malic acid), poly(amino acids), poly(methyl vinyl ether), poly(maleic anhydride), polyvinylpyrrolidone, polyethylene glycol, polyhydroxycellulose, chitin, chitosan, and copolymers, terpolymers, or combinations or mixtures of the above materials. The preferred polymers are those that have a lower degree of crystallization and are more hydrophobic. These polymers and copolymers are more soluble in the biocompatible solvents than the highly crystalline polymers such as polyglycolide and chitin which also have a high degree of hydrogen-bonding. Preferred materials with the desired solubility parameters are the polylactides, polycaprolactones, and copolymers of these with glycolide in which there are more amorphous regions to enhance solubility. In specific preferred embodiments, the biodegradable polymers which can be used in the formulation of polypeptide, polynucleotide, and antibody compositions are poly(lactide-co-glycolides). Polymer properties such as molecular weight, hydrophobicity, and lactide/glycolide ratio may be modified to obtain the desired polypeptide, polynucleotide, or antibody release profile (See, e.g., Ravivarapu et al., Journal of Pharmaceutical Sciences 89:732-741 (2000), which is hereby incorporated by reference in its entirety).

[0888] It is also preferred that the solvent for the biodegradable polymer be non-toxic, water miscible, and otherwise biocompatible. Examples of such solvents include, but are not limited to, N-methyl-2-pyrrolidone, 2-pyrrolidone, C2 to C6 alkanols, C1 to C15 alchohols, dils, triols, and tetraols such as ethanol, glycerine propylene glycol, butanol; C3 to C15 alkyl ketones such as acetone, diethyl ketone and methyl ethyl ketone; C3 to C15 esters such as methyl acetate, ethyl acetate, ethyl lactate; alkyl ketones such as methyl ethyl ketone, C1 to C15 amides such as dimethylformamide, dimethylacetamide and caprolactam; C3 to C20 ethers such as tetrahydrofuran, or solketal; tweens, triacetin, propylene carbonate, decylmethylsulfoxide, dimethyl sulfoxide, oleic acid, 1-dodecylazacycloheptan-2-one, Other preferred solvents are benzyl alchohol, benzyl benzoate, dipropylene glycol, tributyrin, ethyl oleate, glycerin, glycofural, isopropyl myristate, isopropyl palmitate, oleic acid, polyethylene glycol, propylene carbonate, and triethyl citrate. The most preferred solvents are N-methyl-2-pyrrolidone, 2-pyrrolidone, dimethyl sulfoxide, triacetin, and propylene carbonate because of the solvating ability and their compatibility.

[0889] Additionally, formulations comprising polypeptide, polynucleotide, and antibody compositions and a biodegradable polymer may also include release-rate modification agents and/or pore-forming agents. Examples of release-rate modification agents include, but are not limited to, fatty acids, triglycerides, other like hydrophobic compounds, organic solvents, plasticizing compounds and hydrophilic compounds. Suitable release rate modification agents include, for example, esters of mono-, di-, and tricarboxylic acids, such as 2-ethoxyethyl acetate, methyl acetate, ethyl acetate, diethyl phthalate, dimethyl phthalate, dibutyl phthalate, dimethyl adipate, dimethyl succinate, dimethyl oxalate, dimethyl citrate, triethyl citrate, acetyl tributyl citrate, acetyl triethyl citrate, glycerol triacetate, di(n-butyl) sebecate, and the like; polyhydroxy alcohols, such as propylene glycol, polyethylene glycol, glycerin, sorbitol, and the like; fatty acids; triesters of glycerol, such as triglycerides, epoxidized soybean oil, and other epoxidized vegetable oils; sterols, such as cholesterol; alcohols, such as C.sub.6-C.sub.12 alkanols, 2-ethoxyethanol. The release rate modification agent may be used singly or in combination with other such agents. Suitable combinations of release rate modification agents include, but are not limited to, glycerin/propylene glycol, sorbitol/glycerine, ethylene oxide/propylene oxide, butylene glycol/adipic acid, and the like. Preferred release rate modification agents include, but are not limited to, dimethyl citrate, triethyl citrate, ethyl heptanoate, glycerin, and hexanediol. Suitable pore-forming agents that may be used in the polymer composition include, but are not limited to, sugars such as sucrose and dextrose, salts such as sodium chloride and sodium carbonate, polymers such as hydroxylpropylcellulose, carboxymethylcellulose, polyethylene glycol, and polyvinylpyrrolidone. Solid crystals that will provide a defined pore size, such as salt or sugar, are preferred.

[0890] In specific preferred embodiments the polypeptide, polynucleotide, and antibody compositions of the invention are formulated using the BEMA™ BioErodible Mucoadhesive System, MCA™ MucoCutaneous Absorption System, SMP™ Solvent MicroParticle System, or BCP™ BioCompatible Polymer System of Atrix Laboratories, Inc. (Fort Collins, Colo.).

[0891] Sustained-release Therapeutics also include liposomally entrapped Therapeutics of the invention (see generally, Langer, Science 249:1527-1533 (1990); Treat et al., in Liposoines in tle Therapy of Infectious Disease and Cancer, Lopez-Berestein and Fidler (eds.), Liss, New York, pp. 317-327 and 353-365 (1989)). Liposomes containing the Therapeutic are prepared by methods known per se: DE 3,218,121; Epstein et al., Proc. Natl. Acad. Sci. (USA) 82:3688-3692 (1985); Hwang et al., Proc. Natl. Acad. Sci. (USA) 77:4030-4034 (1980); EP 52,322; EP 36,676; EP 88,046; EP 143,949; EP 142,641; Japanese Pat. Appl. 83-118008; U.S. Pat. Nos. 4,485,045 and 4,544,545; and EP 102,324. Ordinarily, the liposomes are of the small (about 200-800 Angstroms) unilamellar type in which the lipid content is greater than about 30 mol. percent cholesterol, the selected proportion being adjusted for the optimal Therapeutic.

[0892] In yet an additional embodiment, the Therapeutics of the invention are delivered by way of a pump (see Langer, supra; Sefton, CRC Crit. Ref. Biomed. Eng. 14:201 (1987); Buchwald et al., Surgery 88:507 (1980); Saudek et al., N. Engl. J. Med. 321:574 (1989)).

[0893] Other controlled release systems are discussed in the review by Langer (Science 249:1527-1533 (1990)).

[0894] For parenteral administration, in one embodunent, the Therapeutic is formulated generally by mixing it at the desired degree of purity, in a unit dosage injectable form (solution, suspension, or emulsion), with a pharmaceutically acceptable carrier, i.e., one that is non-toxic to recipients at the dosages and concentrations employed and is compatible with other ingredients of the formulation. For example, the formulation preferably does not include oxidizing agents and other compounds that are known to be deleterious to the Therapeutic.

[0895] Generally, the formulations are prepared by contacting the Therapeutic uniformly and intimately with liquid carriers or finely divided solid carriers or both. Then, if necessary, the product is shaped into the desired formulation. Preferably the carrier is a parenteral carrier, more preferably a solution that is isotonic with the blood of the recipient. Examples of such carrier vehicles include water, saline, Ringer's solution, and dextrose solution. Non-aqueous vehicles such as fixed oils and ethyl oleate are also useful herein, as well as liposomes.

[0896] The carrier suitably contains minor amounts of additives such as substances that enhance isotonicity and chemical stability. Such materials are non-toxic to recipients at the dosages and concentrations employed, and include buffers such as phosphate, citrate, succinate, acetic acid, and other organic acids or their salts; antioxidants such as ascorbic acid; low molecular weight (less than about ten residues) polypeptides, e.g., polyarginine or tripeptides; proteins, such as serum albumin, gelatin, or immunoglobulins; hydrophilic polymers such as polyvinylpyrrolidone; amino acids, such as glycine, glutamic acid, aspartic acid, or arginine; monosaccharides, disaccharides, and other carbohydrates including cellulose or its derivatives, glucose, manose, or dextrins; chelating agents such as EDTA; sugar alcohols such as mannitol or sorbitol; counterions such as sodium; and/or nonionic surfactants such as polysorbates, poloxamers, or PEG.

[0897] The Therapeutic is typically formulated in such vehicles at a concentration of about 0.1 mg/ml to 100 mg/ml, preferably 1-10 mg/ml, at a pH of about 3 to 8. It will be understood that the use of certain of the foregoing excipients, carriers, or stabilizers will result in the formation of polypeptide salts.

[0898] Any pharmaceutical used for therapeutic administration can be sterile. Sterility is readily accomplished by filtration through sterile filtration membranes (e.g., 0.2 micron membranes). Therapeutics generally are placed into a container having a sterile access port, for example, an intravenous solution bag or vial having a stopper pierceable by a hypodermic injection needle.

[0899] Therapeutics ordinarily will be stored in unit or multi-dose containers, for example, sealed ampoules or vials, as an aqueous solution or as a lyophilized formulation for reconstitution. As an example of a lyophilized formulation, 10-ml vials are filled with 5 ml of sterile-filtered 1% (w/v) aqueous Therapeutic solution, and the resulting mixture is lyophilized. The infusion solution is prepared by reconstituting the lyophilized Therapeutic using bacteriostatic Water-for-Injection.

[0900] The invention also provides a pharmaceutical pack or kit comprising one or more containers filled with one or more of the ingredients of the Therapeutics of the invention. Associated with such container(s) can be a notice in the form prescribed by a governmental agency regulating the manufacture, use or sale of pharmaceuticals or biological products, which notice reflects approval by the agency of manufacture, use or sale for human administration. In addition, the Therapeutics may be employed in conjunction with other therapeutic compounds.

[0901] The Therapeutics of the invention may be administered alone or in combination with adjuvants. Adjuvants that may be administered with the Therapeutics of the invention include, but are not limited to, alum, alum plus deoxycholate (ImmunoAg), MTP-PE (Biocine Corp.), QS21 (Genentech, Inc.), BCG (e.g., THERACYS®), MPL and nonviable prepartions of Corynebacterium parvum. In a specific embodiment, Therapeutics of the invention are administered in combination with alu In another specific embodiment, Therapeutics of the invention are administered in combination with QS-21. Further adjuvants that may be administered with the Therapeutics of the invention include, but are not limited to, Monophosphoryl lipid immunomodulator, AdjuVax 100a, QS-21, QS-18, CRL1005, Aluminum salts, MF-59, and Virosomal adjuvant technology. Vaccines that may be administered with the Therapeutics of the invention include, but are not limited to, vaccines directed toward protection against MMR (measles, mumps, rubella), polio, varicella, tetanus/diptheria, hepatitis A, hepatitis B, haemophilus influenzae B, whooping cough, pneumonia, influenza, Lyme's Disease, rotavirus, cholera, yellow fever, Japanese encephalitis, poliomyelitis, rabies, typhoid fever, and pertussis. Combinations may be administered either concomitantly, e.g., as an admixture, separately but simultaneously or concurrently; or sequentially. This includes presentations in which the combined agents are administered together as a therapeutic mixture, and also procedures in which the combined agents are administered separately but simultaneously, e.g., as through separate intravenous lines into the same individual. Administration “in combination” further includes the separate administration of one of the compounds or agents given first, followed by the second.

[0902] The Therapeutics of the invention may be administered alone or in combination with other therapeutic agents. Therapeutic agents that may be administered in combination with the Therapeutics of the invention, include but not limited to, chemotherapeutic agents, antibiotics, steroidal and non-steroidal anti-inflammatories, conventional immunotherapeutic agents, and/or therapeutic treatments described below. Combinations may be administered either concomitantly, e.g., as an admixture, separately but simultaneously or concurrently; or sequentially. This includes presentations in which the combined agents are administered together as a therapeutic mixture, and also procedures in which the combined agents are administered separately but simultaneously, e.g., as through separate intravenous lines into the same individual. Administration “in combination” further includes the separate administration of one of the compounds or agents given first, followed by the second.

[0903] In one embodiment, the Therapeutics of the invention are administered in combination with an anticoagulant. Anticoagulants that may be administered with the compositions of the invention include, but are not limited to, heparin, low molecular weight heparin, warfarin sodium (e.g., COUMADIN®), dicumarol, 4-hydroxycoumarin, anisindione (e.g., MIRADON™), acenocoumarol (e.g., nicoumalone, SINTHROME™), indan-1,3-dione, phenprocoumon (e.g., MARCUMAR™), ethyl biscoumacetate (e.g., TROMEXAN™), and aspirin. In a specific embodiment, compositions of the invention are administered in combination with heparin and/or warfarin. In another specific embodiment, compositions of the invention are administered in combination with warfarin. In another specific embodiment, compositions of the invention are administered in combination with warfarin and aspirin. In another specific embodiment, compositions of the invention are administered in combination with heparin. In another specific embodiment, compositions of the invention are administered in combination with heparin and aspirin.

[0904] In another embodiment, the Therapeutics of the invention are administered in combination with thrombolytic drugs. Thrombolytic drugs that may be administered with the compositions of the invention include, but are not limited to, plasminogen, lys-plasminogen, alpha2-antiplasmin, streptokinae (e.g., KABIKINASE™), antiresplace (e.g., EMINASE™), tissue plasminogen activator (t-PA, altevase, ACTIVASE™), urokinase (e.g., ABBOKINASE™), sauruplase, (Prourokinase, single chain urokinase), and aminocaproic acid (e.g., AMICAR™). In a specific embodiment, compositions of the invention are administered in combination with tissue plasminogen activator and aspirin.

[0905] In another embodiment, the Therapeutics of the invention are administered in combination with antiplatelet drugs. Antiplatelet drugs that may be administered with the compositions of the invention include, but are not limited to, aspirin, dipyridamole (e.g., PERSANTINE™), and ticlopidine (e.g., TICLID™).

[0906] In specific embodiments, the use of anti-coagulants, thrombolytic and/or antiplatelet drugs in combination with Therapeutics of the invention is contemplated for the detection, prevention, diagnosis, prognostication, treatment, and/or amelioration of thrombosis, arterial thrombosis, venous thrombosis, thromboembolism, pulmonary embolism, atherosclerosis, myocardial infarction, transient ischemic attack, unstable angina. In specific embodiments, the use of anticoagulants, thrombolytic drugs and/or antiplatelet drugs in combination with Therapeutics of the invention is contemplated for the prevention of occulsion of saphenous grafts, for reducing the risk of periprocedural thrombosis as might accompany angioplasty procedures, for reducing the risk of stroke in patients with atrial fibrillation including nonrheumatic atrial fibrillation, for reducing the risk of embolism associated with mechanical heart valves and or mitral valves disease. Other uses for the therapeutics of the invention, alone or in combination with antiplatelet, anticoagulant, and/or thrombolytic drugs, include, but are not limited to, the prevention of occlusions in extracorporeal devices (e.g., intravascular canulas, vascular access shunts in hemodialysis patients, hemodialysis machines, and cardiopulmonary bypass machines).

[0907] In certain embodiments, Therapeutics of the invention are administered in combination with antiretroviral agents, nucleoside/nucleotide reverse transcriptase inhibitors (NRTIs), non-nucleoside reverse transcriptase inhibitors (NNRTIs), and/or protease inhibitors (PIs). NRTIs that may be administered in combination with the Therapeutics of the invention, include, but are not limited to, RETROVIR™ (zidovudine/AZT), VIDEX™ (didanosine/ddI), HIVID™ (zalcitabinelddC), ZERIT™ (stavudine/d4T), EPIVIR™ (lanivudine/3TC), and COMBIVIR™ (zidovudine/lamivudine). NNRTIs that may be administered in combination with the Therapeutics of the invention, include, but are not limited to, VTRAMUNE™ (nevirapine), RESCRIPTOR™ (delavirdine), and SUSTIVA™ (efavirenz). Protease inhibitors that may be administered in combination with the Therapeutics of the invention, include, but are not limited to, CRIXIVAN™ (indinavir), NORVIR™ (ritonavir), INVIRASE™ (saquinavir), and VIRACEPT™ (nelfinavir). In a specific embodiment, antiretroviral agents, nucleoside reverse transcriptase inhibitors, non-nucleoside reverse transcriptase inhibitors, and/or protease inhibitors may be used in any combination with Therapeutics of the invention to treat AIDS and/or to prevent or treat HIV infection.

[0908] Additional NRTIs include LODENOSINE™ (F-ddA; an acid-stable adenosine NRTI; Triangle/Abbott; COVIRACIL™ (entricitabine/FTC; structurally related to lamivudine (3TC) but with 3- to 10-fold greater activity in vitro; Triangle/Abbott); dOTC (BCH-10652, also structurally related to lamivudine but retains activity against a substantial proportion of lamivudine-resistant isolates; Biochem Pharma); Adefovir (refused approval for anti-HIV therapy by FDA; Gilead Sciences); PREVEON® (Adefovir Dipivoxil, the active prodrug of adefovir, its active form is PMEA-pp); TENOFOVIR” (bis-POC PMPA, a PMPA prodrug; Gilead); DAPD/DXG (active metabolite of DAPD; Triangle/Abbott); D-D4FC (related to 3TC, with activity against AZT/3TC-resistant virus); GW420867X (Glaxo Wellcome); ZIAGEN™ (abacavir/159U89; Glaxo Wellcome Inc.); CS-87 (3′azido-2′,3′-dideoxyuridine; WO 99/66936); and S-acyl-2-thioethyl (SATE)-bearing prodrug forms of β-L-FD4C and β-L-FddC (WO 98/17281).

[0909] Additional NNRTIs include COACTINON™ (Emivirine/MKC-442, potent NNRTI of the HEPT class; Triangle/Abbott); CAPRAVIRINE™ (AG-1549/S-1153, a next generation NNRTI with activity against viruses containing the K103N mutation; Agouron); PNU-142721 (has 20- to 50-fold greater activity than its predecessor delavirdine and is active against K103N mutants; Pharmacia & Upjohn); DPC-961 and DPC-963 (second-generation derivatives of efavirenz, designed to be active against viruses with the K103N mutation; DuPont); GW-420867× (has 25-fold greater activity than HBY097 and is active against K103N mutants; Glaxo Wellcome); CALANOLIDE A (naturally occurring agent from the latex tree; active against viruses containing either or both the Y181C and K103N mutations); and Propolis (WO 99/49830).

[0910] Additional protease inhibitors include LOPINAVIR™ (ABT378/r; Abbott Laboratories); BMS-232632 (an azapeptide; Bristol-Myres Squibb); TIPRANAVIR™ (PNU-140690, a non-peptic dihydropyrone; Phanmacia & Upjohn); PD-178390 (a nonpeptidic dihydropyrone; Parke-Davis); BMS 232632 (an azapeptide; Bristol-Myers Squibb); L-756,423 (an indinavir analog; Merck); DMP-450 (a cyclic urea compound; Avid & DuPont); AG-1776 (a peptidomimetic with in vitro activity against protease inhibitor-resistant viruses; Agouron); VX-175/GW-433908 (phosphate prodrug of amprenavir; Vertex & Glaxo Welcome); CGP61755 (Ciba); and AGENERASE™ (amprenavir; Glaxo Wellcome Inc.).

[0911] Additional antiretroviral agents include fusion inhibitors/gp41 binders. Fusion inhibitors/gp41 binders include T-20 (a peptide from residues 643-678 of the HIV gp41 transmembrane protein ectodomain which binds to gp41 in its resting state and prevents transformation to the fusogenic state; Trimeris) and T-1249 (a second-generation fusion inhibitor, Trimeris).

[0912] Additional antiretroviral agents include fusion inhibitors/chemokine receptor antagonists. Fusion inhibitors/chemokine receptor antagonists include CXCR4 antagonists such as AMD 3100 (a bicyclam), SDF-1 and its analogs, and ALX40-4C (a cationic peptide), T22 (an 18 amino acid peptide; Trimeris) and the T22 analogs T134 and T140; CCR5 antagonists such as RANTES (9-68), AOP-RANTES, NNY-RANTES, and TAK-779; and CCR5/CXCR4 antagonists such as NSC 651016 (a distamycin analog). Also included are CCR2B, CCR3, and CCR6 antagonists. Chemokine recpetor agonists such as RANTES, SDF-1, MIP-1α, MIP-1β, etc., may also inhibit fusion.

[0913] Additional antiretroviral agents include integrase inhibitors. Integrase inhibitors include dicaffeoylquinic (DFQA) acids; Lchicoric acid (a dicaffeoyltartaric (DCTA) acid); quinalizari (QLC) and related anthraquinones; ZINTEVIR™ (AR 177, an oligonucleotide that probably acts at cell surface rather than being a true integrase inhibitor, Arondex); and naphthols such as those disclosed in WO 98/50347.

[0914] Additional antiretroviral agents include hydroxyurea-like compunds such as BCX-34 (a purine nucleoside phosphorylase inhibitor; Biocryst); ribonucleotide reductase inhibitors such as DIDOX™ (Molecules for Health); inosine monophosphate dehydrogenase (IMPDH) inhibitors sucha as VX-497 (Vertex); and mycopholic acids such as CellCept (mycophenolate mofetil; Roche).

[0915] Additional antiretroviral agents include inhibitors of viral integrase, inhibitors of viral genome nuclear translocation such as arylene bis(methylketone) compounds; inhibitors of HIV entry such as AOP-RANTES, NNY-RANTES, RANTES-IgG fusion protein, soluble complexes of RANTES and glycosaminoglycans (GAG), and AMD-3100; nucleocapsid zinc finger inhibitors such as dithiane compounds; targets of HIV Tat and Rev; and pharmacoenhancers such as ABT-378.

[0916] Other antiretroviral therapies and adjunct therapies include cytokines and lymphokines such as MIP-1α, MIP-1β, SDF-1α, IL-2, PROLEUKIN™ (aldesleukin/L2-7001; Chiron), IL-4, IL-10, IL-12, and IL-13; interferons such as IFN-α2a; antagonists of TNFs, NFκB, GM-CSF, M-CSF, and IL-10; agents that modulate immune activation such as cyclosporin and prednisone; vaccines such as Remune™ (HIV Immunogen), APL 400-003 (Apollon), recombinant gp120 and fragments, bivalent (B/E) recombinant envelope glycoprotein, rgp120CM235, MN rgp120, SF-2 rgp120, gp120/soluble CD4 complex, Delta JR-FL protein, branched synthetic peptide derived from discontinuous gp120 C3/C4 domain, fusion-competent immunogens, and Gag, Pol, Nef, and Tat vaccines; gene-based therapies such as genetic suppressor elements (GSES; WO 98/54366), and intrakines (genetically modified CC chemokines targetted to the ER to block surface expression of newly synthesized CCR5 (Yang et al., PNAS 94:11567-72 (1997); Chen et al., Nat. Med. 3:1110-16 (1997)); antibodies such as the anti-CXCR4 antibody 12G5, the anti-CCR5 antibodies 2D7, 5C7, PA8, PA9, PA10, PA11, PA12, and PA14, the anti-CD4 antibodies Q4120 and RPA-T4, the anti-CCR3 antibody 7B11, the anti-gp120 antibodies 17b, 48d, 447-52D, 257-D, 268-D and 50.1, anti-Tat antibodies, anti-TNF-α antibodies, and monoclonal antibody 33A; aryl hydrocarbon (AH) receptor agonists and antagonists such as TCDD, 3,3′,4,4′,5-pentachlorobiphenyl, 3,3′,4,4′-tetrachlorobiphenyl, and α-naphthoflavone (WO 98/30213); and antioxidants such as γ-L-glutamyl-L-cysteine ethyl ester (γ-GCE; WO 99/56764).

[0917] In a further embodiment, the Therapeutics of the invention are administered in combination with an antiviral agent. Antiviral agents that may be administered with the Therapeutics of the invention include, but are not limited to, acyclovir, ribavirin, amantadine, and remantidine.

[0918] In other embodiments, Therapeutics of the invention may be administered in combination with anti-opportunistic infection agents. Anti-opportunistic agents that may be administered in combination with the Therapeutics of the invention, include, but are not limited to, TRIMETHOPRIM-SULFAMETHOXAZOLE™, DAPSONE™, PENTAMIDNE™ ATOVAQUONE™, ISONIAZID™, RIFAMPIN™, PYRAZINAMDE™, ETHAMUTOL™, RIFABUTIN™, CLARITHROMYCN™, AZITHROMYCIN™, GANCICLOVIR™, FOSCARNET™, CIDOFOVIR™, FLUCONAZOLE™, ITRACONAZOLE™, KETOCONAZOLE™, ACYCLOVIR™, FAMCICOLVIR™, PYRIMETHAMINE™, LEUCOVORINE™, NEUPOGEN™ (filgrastim/G-CSF), and LEUKINE™ (sargramostim/GM-CSF). In a specific embodiment, Therapeutics of the invention are used in any combination with TRIMETHOPRIM-SULFAMETHOXAZOLE™, DAPSONE™, PENTAMIDINE™, and/or ATOVAQUONE™ to prophylactically treat or prevent an opportunistic Pneumocystis carinii pneumonia infection. In another specific embodiment, Therapeutics of the invention are used in any combination with ISONIAZD™, RIAMPAN™, PYRAZINAMIDE™, and/or ETHAMBUTOL™ to prophylactically treat or prevent an opportunistic Mycobacterium avium complex infection. In another specific embodiment, Therapeutics of the invention are used in any combination with RIFABUTIN™, CLARITHROMYCIN™, and/or AZITHROMYCIN™ to prophylactically treat or prevent an opportunistic Mycobacterium tuberculosis infection. In another specific embodiment, Therapeutics of the invention are used in any combination with GANCICLOVIR™, FOSCARNET™, and/or CIDOPOVIR™ to prophylactically treat or prevent an opportunistic cytomegalovirus infection. In another specific embodiment, Therapeutics of the invention are used in any combination with FLUCONAZOLE™, ITRACONAZOLE™, and/or KETOCONAZOLE™ to prophylactically treat or prevent an opportunistic fungal infection. In another specific embodiment, Therapeutics of the invention are used in any combination with ACYCLOVIR™ and/or FAMCICOLVIR™ to prophylactically treat or prevent an opportunistic herpes simplex virus type I and/or type II infection. In another specific embodiment, Therapeutics of the invention are used in any combination with PYRIMETHAMINE™ and/or LEUCOVORIN™ to prophylactically treat or prevent an opportunistic Toxoplasma gondii infection. In another specific embodiment, Therapeutics of the invention are used in any combination with LEUCOVORIN™ and/or NEUPOGEN™ to prophylactically treat or prevent an opportunistic bacterial infection.

[0919] In a further embodiment, the Therapeutics of the invention are administered in combination with an antibiotic agent. Antibiotic agents that may be administered with the Therapeutics of the invention include, but are not limited to, amoxicillin, beta-lactamases, aminoglycosides, beta-lactam (glycopeptide), beta-lactamases, Clindamycin, chloramphenicol, cephalosporins, ciprofloxacin, erythromycin, fluoroquinolones, macrolides, metronidazole, penicillins, quinolones, rapamycin, rifampin, streptomycin, sulfonamide, tetracyclines, trimethoprim, trimethoprim-sulfamethoxazole, and vancomycin.

[0920] In other embodiments, the Therapeutics of the invention are administered in combination with immunestimulants. Immunostimulants that may be administered in combination with the Therapeutics of the invention include, but are not limited to, levamisole (e.g., ERGAMISOL™), isoprinosine (e.g. INOSIPLEX™), interferons (e.g. interferon alpha), and interleukins (e.g., IL-2).

[0921] In other embodiments, Therapeutics of the invention are administered in combination with immunosuppressive agents. Immunosuppressive agents that may be administered in combination with the Therapeutics of the invention include, but are not limited to, steroids, cyclosporine, cyclosporine analogs, cyclophosphamide methylprednisone, prednisone, azathioprine, FK-506, 15-deoxyspergualin, and other immunosuppressive agents that act by suppressing the function of responding T cells. Other immunosuppressive agents that may be administered in combination with the Therapeutics of the invention include, but are not limited to, prednisolone, methotrexate, thalidomide, methoxsalen, rapamycin, leflunomide, mizoribine (BREDNIN™), brequinar, deoxyspergualin, and azaspirane (SKF 105685), ORTHOCLONE OKT® 3 (muromonab-CD3), SANDIMMUNE™, NEORAL™, SANGDYA™ (cyclosporine), PROGRAF® (FK506, tacrolimus), CELLCEPT® (mycophenolate motefil, of which the active metabolite is mycophenolic acid), IMURAN™ (azathioprine), glucocorticosteroids, adrenocortical steroids such as DELTASONE™ (prednisone) and HYDELTRASOL™ (prednisolone), FOLEX™ and MEXATE™ (methotrxate), OXSORALEN-ULTRA™ (methoxsalen) and RAPAMUNE™ (sirolimus). In a specific embodiment, immunosuppressants may be used to prevent rejection of organ or bone marrow transplantation.

[0922] In an additional embodiment, Therapeutics of the invention are administered alone or in combination with one or more intravenous immune globulin preparations. Intravenous immune globulin preparations that may be administered with the Therapeutics of the invention include, but not limited to, GAMMAR™, IVEEGAM™, SANDOGLOBULIN™, GAMMAGARD S/D™, ATGAM™ (antithymocyte glubulin), and GAMIMUNE™. In a specific embodiment, Therapeutics of the invention are administered in combination with intravenous immune globulin preparations in transplantation therapy (e.g., bone marrow transplant).

[0923] In certain embodiments, the Therapeutics of the invention are administered alone or in combination with an anti-inflammatory agent Anti-inflammatory agents that may be administered with the Therapeutics of the invention include, but are not limited to, corticosteroids (e.g. betamethasone, budesonide, cortisone, dexamethasone, hydrocortisone, methylprednisolone, prednisolone, prednisone, and triamcinolone), nonsteroidal anti-inflammatory drugs (e.g., diclofenac, diflunisal, etodolac, fenoprofen, floctafenine, flurbiprofen, ibuprofen, indomethacin, ketoprofen, meclofenamate, mefenamic acid, meloxicam, nabumetone, naproxen, oxaprozin, phenylbutazone, piroxicam, sulindac, tenoxicam, tiaprofenic acid, and tolmetin.), as well as antihistamines, aminoarylcarboxylic acid derivatives, arylacetic acid derivatives, arylbutyric acid derivatives, arylcarboxylic acids, arylpropionic acid derivatives, pyrazoles, pyrazolones, salicylic acid derivatives, thiazinecarboxamides, e-acetamidocaproic acid, S-adenosylmethionine, 3-amino-4-hydroxybutyric acid, amixetrine, bendazac, benzydamine, bucolome, difenpiramide, ditazol, emorfazone, guaiazulene, nabumetone, nimesulide, orgotein, oxaceprol, paranyline, perisoxal, pifoxime, proquazone, proxazole, and tenidap.

[0924] In an additional embodiment, the compositions of the invention are administered alone or in combination with an anti-angiogenic agent. Anti-angiogenic agents that may be administered with the compositions of the invention include, but are not limited to, Angiostatin (Entremed, Rockville, Md.), Troponin-1 (Boston Life Sciences, Boston, Mass.), anti-Invasive Factor, retinoic acid and derivatives thereof, paclitaxel (Taxol), Suramin, Tissue Inhibitor of Metalloproteinase-1, Tissue Inhibitor of Metalloproteinase-2, VEGL Plasminogen Activator Inhibitor-1, Plasminogen Activator Inhibitor-2, and various forms of the lighter “d group” transition metals.

[0925] Lighter “d group” transition metals include, for example, vanadium, molybdenum, tungsten, titanium, niobium, and tantalum species. Such transition metal species may form transition metal complexes. Suitable complexes of the above-mentioned transition metal species include oxo transition metal complexes.

[0926] Representative examples of vanadium complexes include oxo vanadium complexes such as vanadate and vanadyl complexes. Suitable vanadate complexes include metavanadate and orthovanadate complexes such as, for example, ammonium metavanadate, sodium metavanadate, and sodium orthovanadate. Suitable vanadyl complexes include, for example, vanadyl acetylacetonate and vanadyl sulfate including vanadyl sulfate hydrates such as vanadyl sulfate mono- and trihydrates.

[0927] Representative examples of tungsten and molybdenum complexes also include oxo complexes. Suitable oxo tungsten complexes include tungstate and tungsten oxide complexes. Suitable tungstate complexes include ammonium tungstate, calcium tungstate, sodium tungstate dihydrate, and tungstic acid. Suitable tungsten oxides include tungsten (IV) oxide and tungsten (VI) oxide. Suitable oxo molybdenum complexes include molybdate, molybdenum oxide, and molybdenyl complexes. Suitable molybdate complexes include ammonium molybdate and its hydrates, sodium molybdate and its hydrates, and potassium molybdate and its hydrates. Suitable molybdenum oxides include molybdenum (VI) oxide, molybdenum (VI) oxide, and molybdic acid. Suitable molybdenyl complexes include, for example, molybdenyl acetylacetonate. Other suitable tungsten and molybdenum complexes include hydroxo derivatives derived from, for example, glycerol, tartaric acid, and sugars.

[0928] A wide variety of other anti-angiogenic factors may also be utilized within the context of the present invention. Representative examples include, but are not limited to, platelet factor 4; protamine sulphate; sulphated chitin derivatives (prepared from queen crab shells), (Murata et al., Cancer Res. 51:22-26, (1991)); Sulphated Polysaccharide Peptidoglycan Complex (SP-PG) (the function of this compound may be enhanced by the presence of steroids such as estrogen, and tamoxifen citrate); Staurosporine; modulators of matrix metabolism, including for example, proline analogs, cishydroxyproline, d,L-3,4-dehydroproline, Thiaproline, alpha,alpha-dipyridyl, aminopropionitrile fumarate; 4-propyl-5-(4-pyridinyl)-2(3H)-oxazolone; Methotrexate; Mitoxantrone; Heparin; Interferons; 2 Macroglobulin-serum; ChIMP-3 (Pavloff et al., J. Bio. Chem. 267:17321-17326, (1992)); Chymostatin (Tomkinson et al., Biochem J. 286:475-480, (1992)); Cyclodextrin Tetradecasulfate; Eponemycin; Camptothecin; Fumagillin (Ingber et al., Nature 348:555-557, (1990)); Gold Sodium Thiomalate (“GST”; Matsubara and Ziff, J. Clin. Invest. 79:1440-1446, (1987)); anticollagenase-serum; alpha2-antiplasmin (Holmes et al., J. Biol. Chern. 262(4):1659-1664, (1987)); Bisantrene (National Cancer Institute); Lobenzarit disodium (N-(2)-carboxyphenyl-4-chloroanthronilic acid disodium or “CCA”; (Takeuchi et al., Agents Actions 36:312-316, (1992)); and metalloproteinase inhibitors such as BB94.

[0929] Additional anti-angiogenic factors that may also be utilized within the context of the present invention include Thalidomide, (Celgene, Warren, N.J.); Angiostatic steroid; AGM-1470 (H. Brem and J. Folkman J Pediatr. Surg. 28:445-51 (1993)); an integrin alpha v beta 3 antagonist (C. Storgard et al., J Clin. Invest. 103:47-54 (1999)); carboxynaminolmidazole; Carboxyamidotriazole (CAI) (National Cancer Institute, Bethesda, Md.); Conbretastatin A-4 (CA4P) (OXiGENE, Boston, Mass.); Squalamine (Magainin Pharmaceuticals, Plymouth Meeting, Pa.); TNP-470, (Tap Pharmaceuticals, Deerfield, Ill.); ZD-0101 AstraZeneca (London, UK); APRA (CT2584); Benefin, Byrostatin-1 (SC339555); CGP-41251 (PKC 412); CM101; Dexrazoxane (ICRF187); DMXAA; Endostatin; Flavopridiol; Genestein; GTE; ImmTher; Iressa (ZD1839); Octreotide (Somatostatin); Panretin; Penacillamine; Photopoint; PI-88; Prinomastat (AG-3340) Purlytin; Suradista (FCE26644); Tamoxifen (Nolvadex); Tazarotene; Tetrathiomolybdate; Xeloda (Capecitabine); and 5-Fluorouracil.

[0930] Anti-angiogenic agents that may be administed in combination with the compounds of the invention may work through a variety of mechanisms including, but not limited to, inhibiting proteolysis of the extracellular matrix, blocking the function of endothelial cell-extracellular matrix adhesion molecules, by antagonizing the function of angiogenesis inducers such as growth factors, and inhibiting integrin receptors expressed on proliferating endothelial cells. Examples of anti-angiogenic inhibitors that interfere with extracellular matrix proteolysis and which may be administered in combination with the compositons of the invention include, but are not lmited to, AG-3340 (Agouron, La Jolla, Calif.), BAY-12-9566 (Bayer, West Haven, Conn.), BMS-275291 (Bristol Myers Squibb, Princeton, N.J.), CGS-27032A (Novartis, East Hanover, N.J.), Marimastat (British Biotech, Oxford, UK), and Metastat (Aeterna, St-Foy, Quebec). Examples of anti-angiogenic inhibitors that act by blocking the function of endothelial cell-extracellular matrix adhesion molecules and which may be administered in combination with the compositons of the invention include, but are not limited to, EMD-121974 (Merck KcgaA Darmstadt, Germany) and Vitaxin (xsys, La Jolla, Calif./Medimmune, Gaithersburg, Md.). Examples of anti-angiogenic agents that act by directly antagonizing or inhibiting angiogenesis inducers and which may be administered in combination with the compositons of the invention include, but are not lmited to, Angiozyme (Ribozyme, Boulder, Colo.), Anti-VEGF antibody (Genentech, S. San Francisco, Calif.), PTK-787/ZK-225846 (Novartis, Basel, Switzerland), SU-101 (Sugen, S. San Francisco, Calif.), SU-5416 (Sugen/Pharmacia Upjohn, Bridgewater, N.J.), and SU-6668 (Sugen). Other anti-angiogenic agents act to indirectly inhibit angiogenesis. Examples of indirect inhibitors of angiogenesis which may be administered in combination with the compositons of the invention include, but are not limited to, IM-862 (Cytran, Kirkland, Wash.), Interferon-alpha, IL-12 (Roche, Nutley, N.J.), and Pentosan polysulfate (Georgetown University, Washington, D.C.).

[0931] In particular embodiments, the use of compositions of the invention in combination with anti-angiogenic agents is contemplated for the treatment, prevention, and/or amelioration of an autoimmune disease, such as for example, an autoimmune disease described herein.

[0932] In a particular embodiment, the use of compositions of the invention in combination with anti-angiogenic agents is contemplated for the treatment, prevention, and/or amelioration of arthritis. In a more particular embodiment, the use of compositions of the invention in combination with anti-angiogenic agents is contemplated for the treatment, prevention, and/or amelioration of rheumatoid arthritis.

[0933] In another embodiment, the polynucleotides encoding a polypeptide of the present invention are administered in combination with an angiogenic protein, or polynucleotides encoding an angiogenic protein. Examples of angiogenic proteins that may be administered with the compositions of the invention include, but are not limited to, acidic and basic fibroblast growth factors, VEGF-1, VEGF-2, VEGF-3, epidermal growth factor alpha and beta, platelet-derived endothelial cell growth factor, platelet-derived growth factor, tumor necrosis factor alpha, hepatocyte growth factor, insulin-like growth factor, colony stimulating factor, macrophage colony stimulating factor, granulocyte/macrophage colony stimulating factor, and nitric oxide synthase.

[0934] In additional embodiments, compositions of the invention are administered in combination with a chemotherapeutic agent. Chemotherapeutic agents that may be administered with the Therapeutics of the invention include, but are not limited to alkylating agents such as nitrogen mustards (for example, Mechlorethamine, cyclophosphamide, Cyclophosphamide Ifosfamide, Melphalan (L-sarcolysin), and Chlorambucil), ethylenimines and methylmelamines (for example, Hexamethylmelamine and Thiotepa), alkyl sulfonates (for example, Busulfan), nitrosoureas (for example, Carmustine (BCNU), Lomustine (CCNU), Semustine (methyl-CCNU), and Streptozocin (streptozotocin)), triazenes (for example, Dacarbazine (DTIC; dimethyltriazenoimidazolecarboxamide)), folic acid analogs (for example, Methotrexate (amethopterin)), pyrimidine analogs (for example, Fluorouacil (5-fluorouracil; 5-FU), Floxuridine (fluorodeoxyuridine; FudR), and Cytarabine (cytosine arabinoside)), purine analogs and related inhibitors (for example, Mercaptopurine (6-mercaptopurine; 6-MP), Thioguanine (6-thioguanine; TG), and Pentostatin (2′-deoxycoformycin)), vinca alkaloids (for example, Vinblastine (VLB, vinblastine sulfate)) and Vincristine (vincristine sulfate)), epipodophyllotoxins (for example, Etoposide and Teniposide), antibiotics (for example, Dactinomycin (actinomycin D), Daunorubicin (daunomycin; rubidomycin), Doxorubicin, Bleomycin, Plicamycin (mithramycin), and Mitomycin (mitomycin C), enzymes (for example, L-Asparaginase), biological response modifiers (for example, Interferon-alpha and interferon-alpha-2b), platinum coordination compounds (for example, Cisplatin (cis-DDP) and Carboplatin), anthracenedione (Mitoxantrone), substituted ureas (for example, Hydroxyurea), methylhydrazine derivatives (for example, Procarbazine (N-methylhydrazine; MIH), adrenocorticosteroids (for example, Prednisone), progestins (for example, Hydroxyprogesteronie caproate, Medroxyprogesterone, Medroxyprogesterone acetate, and Megestrol acetate), estrogens (for example, Diethylstilbestrol (DES), Diethylstilbestrol diphosphate, Estradiol, and Ethinyl estradiol), antiestrogens (for example, Tamoxifen), androgens (Testosterone proprionate, and Fluoxymesterone), antiandrogens (for example, Flutamide), gonadotropin-releasing horomone analogs (for example, Leuprolide), other hormones and hormone analogs (for example, methyltestosterone, estramustine, estramustine phosphate sodium, chlorotrianisene, and testolactone), and others (for example, dicarbazine, glutamic acid, and mitotane).

[0935] In one embodiment, the compositions of the invention are administered in combination with one or more of the following drugs: infliximab (also known as Remicade™ Centocor, Inc.), Trocade (Roche, RO-32-3555), Leflunomide (also known as Arava™ from Hoechst Marion Roussel), Kineret™ (an IL-1 Receptor antagonist also known as Anakinra from Amgen, Inc.)

[0936] In a specific embodiment, compositions of the invention are administered in combination with CHOP (cyclophosphamide, doxorubicin, vincristine, and prednisone) or combination of one or more of the components of CHOP. In one embodiment, the compositions of the invention are administered in combination with anti-CD20 antibodies, human monoclonal anti-CD20 antibodies. In another embodiment, the compositions of the invention are administered in combination with anti-CD20 antibodies and CHOP, or anti-CD20 antibodies and any combination of one or more of the components of CHOP, particularly cyclophosphamide and/or prednisone. In a specific embodiment, compositions of the invention are administered in combination with Rituximab. In a further embodiment, compositions of the invention are administered with Rituximab and CHOP, or Rituximab and any combination of one or more of the components of CHOP, particularly cyclophosphamide and/or prednisone. In a specific embodiment, compositions of the invention are administered in combination with tositumomab. In a further embodiment, compositions of the invention are administered with tositumomab and CHOP, or tositumomab and any combination of one or more of the components of CHOP, particularly cyclophosphamide and/or prednisone. The anti-CD20 antibodies may optionally be associated with radioisotopes, toxins or cytotoxic prodrugs.

[0937] In another specific embodiment, the compositions of the invention are administered in combination Zevalin™. In a further embodiment, compositions of the invention are administered with Zevalin™ and CHOP, or Zevain™ and any combination of one or more of the components of CHOP, particularly cyclophosphamide and/or prednisone. Zevalin™ may be associated with one or more radisotopes. Particularly preferred isotopes are ⁹⁰Y and ¹¹¹In.

[0938] In an additional embodiment, the Therapeutics of the invention are administered in combination with cytokines. Cytokines that may be administered with the Therapeutics of the invention include, but are not limited to, IL2, IL3, IL4, IL5, IL6, IL7, IL10, IL12, IL13, IL15, anti-CD40, CD40L, IFN-gamma and TNF-alpha. In another embodiment, Therapeutics of the invention may be administered with any interleukin, including, but not limited to, IL-1alpha, IL-1beta, IL-2, IL-3, IL4, IL-5, IL-6, IL-7, IL-8, IL-9, IL-10, IL-11, IL-12, IL-13, IL-14, IL-15, IL-16, IL-17, IL-18, IL-19, IL-20, and IL-21.

[0939] In one embodiment, the Therapeutics of the invention are administered in combination with members of the TNF family. TNF, TNF-related or TNF-like molecules that may be administered with the Therapeutics of the invention include, but are not limited to, soluble forms of TNF-alpha, lymphotoxin-alpha (LT-alpha, also known as TNF-beta), LT-beta (found in complex heterotrimer LT-alpha2-beta), OPGL, FasL, CD27L, CD30L, CD40L, 4-1BBL, DcR3, OX40L, TNF-gamma (International Publication No. WO 96/14328), AIM-I (International Publication No. WO 97/33899), endokine-alpha (International Publication No. WO 98/07880), OPG, and neutrokine-alpha (International Publication No. WO 98/18921, OX40, and nerve growth factor (NGF), and soluble forms of Fas, CD30, CD27, CD40 and 4-IBB, TR2 (International Publication No. WO 96/34095), DR3 (International Publication No. WO 97/33904), DR4 (International Publication No. WO 98/32856), TR5 (International Publication No. WO 98/30693), TRANK, TR9 (International Publication No. WO 98/56892), TR10 (International Publication No. WO 98/54202), 312C2 (International Publication No. WO 98/06842), and TR12, and soluble forms CD154, CD70, and CD153.

[0940] In an additional embodiment, the Therapeutics of the invention are administered in combination with angiogenic proteins. Angiogenic proteins that may be administered with the Therapeutics of the invention include, but are not limited to, Glioma Derived Growth Factor (GDGF), as disclosed in European Patent Number EP-399816; Platelet Derived Growth Factor-A (PDGF-A), as disclosed in European Patent Number EP-682110; Platelet Derived Growth Factor-B (PDGF-B), as disclosed in European Patent Number EP-282317; Placental Growth Factor (PIGF), as disclosed in International Publication Number WO 92/06194; Placental Growth Factor-2 (PIGF-2), as disclosed in Hauser et al., Growth Factors, 4:259-268 (1993); Vascular Endothelial Growth Factor (VEGF), as disclosed in International Publication Number WO 90/13649; Vascular Endothelial Growth Factor-A (VEGF-A), as disclosed in European Patent Number EP-506477; Vascular Endothelial Growth Factor-2 (VEGF-2), as disclosed in International Publication Number WO 96/39515; Vascular Endothelial Growth Factor B (VEGF-3); Vascular Endothelial Growth Factor B-186 (VEGF-B186), as disclosed in International Publication Number WO 96/26736; Vascular Endothelial Growth Factor-D (VEGF-D), as disclosed in International Publication Number WO 98/02543; Vascular Endothelial Growth Factor-D (VEGF-D), as disclosed in International Publication Number WO 98/07832; and Vascular Endothelial Growth Factor-E (VEGF-E), as disclosed in German Patent Number DE19639601. The above mentioned references are herein incorporated by reference in their entireties.

[0941] In an additional embodiment, the Therapeutics of the invention are administered in combination with Fibroblast Growth Factors. Fibroblast Growth Factors that may be administered with the Therapeutics of the invention include, but are not limited to, FGF-1, FGF-2, FGF-3, FGF-4, FGF-5, FGF-6, FGF-7, FGF-8, FGF-9, FGF-10, FGF-11, FGF-12, FGF-13, FGF-14, and FGF-15.

[0942] In an additional embodiment, the Therapeutics of the invention are administered in combination with hematopoietic growth factors. Hematopoietic growth factors that may be administered with the Therapeutics of the invention include, but are not limited to, granulocyte macrophage colony stimulating factor (GM-CSF) (sargramostim, LEUKINE™, PROKINE™), granulocyte colony stimulating factor (G-CSF) (filgrastim, NEUPOGEN™), macrophage colony stimulating factor (M-CSF, CSF-1) erythropoietin (epoetin alfa, EPOGEN™, PROCRRIT™), stem cell factor (SCF, c-kit ligand, steel factor), megakaryocyte colony stimulating factor, PIXY321 (a GMCSF/IL-3 fusion protein), interleulins, especially any one or more of IL-1 through IL-12, interferon-gamma, or thrombopoietin.

[0943] In certain embodiments, Therapeutics of the present invention are administered in combination with adrenergic blockers, such as, for example, acebutolol, atenolol, betaxolol, bisoprolol, carteolol, labetalol, metoprolol, nadolol, oxprenolol, penbutolol, pindolol, propranolol, sotalol, and timolol.

[0944] In another embodiment, the Therapeutics of the invention are administered in combination with an antiarrhythmic drug (e.g., adenosine, amidoarone, bretylium, digitalis, digoxin, digitoxin, diliazem, disopyramide, esmolol, flecainide, lidocaine, mexiletine, moricizine, phenyloin, procainamide, N-acetyl procainamide, propafenone, propranolol, quinidine, sotalol, tocainide, and verapamil).

[0945] In another embodiment, the Therapeutics of the invention are administered in combination with diuretic agents, such as carbonic anhydrase-inhibiting agents (e.g., acetazolamide, dichlorphenamide, and methazolamide), osmotic diuretics (e.g., glycerin, isosorbide, mannitol, and urea), diuretics that inhibit Na⁺—K⁺-2Cl⁻ symport (e.g., furosemide, bumetanide, azosemide, piretanide, tripamide, ethacrynic acid, muzolimine, and torsemide), thiazide and thiazide-like diuretics (e.g., bendroflumethiazide, benzthiazide, chlorothiazide, hydrochlorothiazide, hydroflumethiazide, methyclothiazide, polythiazide, trichormethiazide, chlorthalidone, indapamide, metolazone, and quinethazone), potassium sparing diuretics (e.g., amiloride and triamterene), and mineralcorticoid receptor antagonists (e.g., spironolactone, canrenone, and potassium canrenoate).

[0946] In one embodiment, the Therapeutics of the invention are administered in combination with treatments for endocrine and/or hormone imbalance disorders. Treatments for endocrine and/or hormone imbalance disorders include, but are not limited to, ¹²⁷I, radioactive isotopes of iodine such as ¹³¹I and ¹²³I; recombinant growth hormone, such as HUMATROPE™ (recombinant somatropin); growth hormone analogs such as PROTROPIN™ (somatrem); dopamine agonists such as PARLODEL™ (bromocriptine); somatostatin analogs such as SANDOSTATIN™ (octreotide); gonadotropin preparations such as PREGNYL™, A.P.L.™ and PROFASI™ (chorionic gonadotropin (CG)), PERGONAL™ (menotropins), and METRODIN™ (urofollitropin (uFSH)); synthetic human gonadotropin releasing hormone preparations such as FACRRELT” and LUTREPULSE™ (gonadorelin hydrochloride); synthetic gonadotropin agonists such as LUPRON™ (leuprolide acetate), SUPPRELIN™ (histrelin acetate), SYNAREL™ (nafarelin acetate), and ZOLADEX™ (goserelin acetate); synthetic preparations of thyrotropin-releasing hormone such as RELEFACT TRH™ and THYPINONE™ (protirelin); recombinant human TSH such as THYROGEN™; synthetic preparations of the sodium salts of the natural isomers of thyroid hormones such as L-T₄™, SYNTHROID™ and LEVOTHROID™ (levothyroxine sodium), L-T₃™, CYTOMEL™ and TRIOSTAT™ (liothyroine sodium), and THYROLAR™ (liotrix); antithyroid compounds such as 6-n-propylthiouracil (propylthiouracil), 1-methyl-2-mercaptoimidazole and TAPAZOLE™ (methimazole), NEO-MERCAZOLE™ (carbinazole); beta-adrenergic receptor antagonists such as propranolol and esmolol; Ca²⁺ channel blockers; dexamethasone and iodinated radiological contrast agents such as TELEPAQUE™ (iopanoic acid) and ORAGRAFIN™ (sodium ipodate).

[0947] Additional treatments for endocrine and/or hormone imbalance disorders include, but are not limited to, estrogens or congugated estrogens such as ESTRACE™ (estradiol), ESTINYL™ (ethinyl estradiol), PREMARIN™, ESTRATAB™, ORTHO-EST™, OGEN™ and estropipate (estrone), ESTROVIS™ (quinestrol), ESTRADERM™ (estradiol), DELESTROGEN™ and VALERGEN™ (estradiol valerate), DEPO-ESTRADIOL CYPIONATE™ and ESTROJEC™ LA™ (estradiol cypionate); antiestrogens such as NOLVADEX™ (tamoxifen), SEROPHENE™ and CLOMID™ (clomiphene); progestins such as DURALUTIN™ (hydroxyprogesterone caproate), MPA™ and DEPO-PROVERA™ (medroxyprogesterone acetate), PROVERA™ and CYCRIN™ (MPA), MEGACE™ (megestrol acetate), NORLUTIN™ (norethindrone), and NORLUTATE™ and AYGESTIN™ (norethindrone acetate); progesterone implants such as NORPLANT SYSTEM™ (subdermal implants of norgestrel); antiprogestins such as RU 486™ (mifepristone); hormonal contraceptives such as ENOVID™ (norethynodrel plus mestranol), PROGESTASERT™ (intrauterine device that releases progesterone), LOESTRIN™, BREVICON™, MODICON™, GENORA™, NELONA™, NORTNYL™, OVACON-35™ and OVACON-50™ (ethinyl estradiol/norethindrone), LEVLEN™, NORDETTET™, TRI-LEVLEN™ and TRIPHASIL-21™ (ethinyl estradiol/levonorgestrel) LO/OVRAL™ and OVRAL™ (ethinyl estradiol/norgestrel), DEMULEN™ (ethinyl estradiol/ethynodiol diacetate), NORINYL™, ORTHO-NOVUM™, NORETHIN™, GENORA™, and NELOVAT™ (norethindrone/mestranol), DESOGEN™ and ORTHO-CEPT™ (ethinyl estradiol/desogestrel), ORTHO-CYCLEN™ and ORTHO-TRICYCLEN™ (ethinyl estradiol/norgestimate), MICRONOR™ and NOR-QD™ (norethindrone), and OVRETTE™ (norgestrel).

[0948] Additional treatments for endocrine and/or hormone imbalance disorders include, but are not limited to, testosterone esters such as rnethenolone acetate and testosterone undecanoate; parenteral and oral androgens such as TESTOJECT-50™ (testosterone), TESTEX™ (testosterone propionate), DEIATESTRYL™ (testosterone enanthate), DEPO-TESTOSTERONE™ (testosterone cypionate), DANOCRINE™ (danazol), HALOTESTIN™ (fluoxymesterone), ORETON METHYL™, TESTRED™ and VIRILON™ (methyltestosterone), and OXANDRIN™ (oxandrolone); testosterone transdermal systems such as TESTODERM™; androgen receptor antagonist and 5-alpha-reductase inhibitors such as ANDROCUR™ (cyproterone acetate), EULEXIN™ (flutamide), and PROSCAR™ (finasteride); adrenocorticotropic hormone preparations such as CORTROSYN™ (cosyntropin); adrenocortical steroids and their synthetic analogs such as ACLOVATE™ (alclometasone dipropionate), CYCLOCORT™ (amcinonide), BECLOVENT™ and VANCERIL™ (beclomethasone dipropionate), CELESTONE™ (betamethasone), BENISONE™ and UTICORT™ (betamethasone benzoate), DIPROSONE™ (betamethasone dipropionate), CELESTONE PHOSPHATE™ (betamethasone sodium phosphate), CELESTONE SOLUSPAN™ (betamethasone sodium phosphate and acetate), BETA-VAL™ and VALISONE™ (betamethasone valerate), TEMOVATE™ (clobetasol propionate), CLODERM™ (clocortolone pivalate), CORTEF™ and HYDROCORTONE™ (cortisol (hydrocortisone)), HYDROCORTONE ACETATE™ (cortisol (hydrocortisone) acetate), LOCOID™ (cortisol (hydrocortisone) butyrate), HYDROCORTONE PHOSPHATE™ (cortisol (hydrocortisone) sodium phosphate), A-HYDROCORT™ and SOLU CORTEF™ (cortisol (hydrocortisone) sodium succinate), WESTCORT™ (cortisol (hydrocortisone) valerate), CORTISONE ACETATE™ (cortisone acetate), DESOWEN™ and TRIDESILON™ (desonide), TOPICORT™ (desoximetasone), DECADRON™ (dexamethasone), DECADRON LA™ (dexamethasone acetate), DECADRON PHOSPHATE™ and HEXADROL PHOSPHATE™ (dexamethasone sodium phosphate), FLORONE™ and MAXIFLOR™ (diflorasone diacetate), FLORINEF ACETATE™ (fludrocortisone acetate), AEROBID™ and NASALIDE™ (flunisolide), FLUONID™ and SYNALAR™ (fluocinolone acetonide), LIDEX™ (fluocinonide), FLUOR-OP™ and FML™ (fluorometholone), CORDRAN™ (flurandrenolide), HALOG™ (halcinonide), HMS LIZUIFILM™ (medrysone), MEDROL™ (methylprednisolone), DEPO-MEDROL™ and MEDROL ACETATE™ (methylprednisone acetate), A-METHAPRED™ and SOLUMEDROL™ (methylprednisolone sodium succinate), ELOCON™ (mometasone furoate), HALDRONE™ (paramethasone acetate), DELTA-CORTEF™ (prednisolone), ECONOPRED™ (prednisolone acetate), HYDELTRASOL™ (prednisolone sodium phosphate), HYDELTRA-T.B.A™ (prednisolone tebutate), DELTASONE™ (prednisone), ARISTOCORT™ and KENACORT™ (triamcinolone), KENALOG™ (triamcinolone acetonide), ARISTOCORT™ and KENACORT DIACETATE™ (triamcinolone diacetate), and ARISTOSPAN™ (triamcinolone hexacetonide); inhibitors of biosynthesis and action of adrenocortical steroids such as CYTADREN™ (aminoglutethimide), NIZORAL™ (ketoconazole), MODRASTANE™ (trilostane), and METOPIRONE™ (metyrapone); bovine, porcine or human insulin or mixtures thereof; insulin analogs; recombinant human insulin such as HUMULN™ and NOVOLIN™; oral hypoglycemic agents such as ORAMDE™ and ORINASE™ (tolbutamide), DIABINESE™ (chlorpropamide), TOLAMIDE™ and TOLINASE™ (tolazamide), DYMELOR™ (acetohexamide), glibenclamide, MICRONASE™, DIBETA™ and GLYNASE™ (glyburide), GLUCOTROL™ (glipizide), and DIAMCRON™ (gliclazide), GLUCOPHAGE™ (metformin), ciglitazone, pioglitazone, and alpha-glucosidase inhibitors; bovine or porcine glucagon; somatostatins such as SANDOSTATIN™ (octreotide); and diazoxides such as PROGLYCEM™ (diazoxide).

[0949] In an additional embodiment, the Therapeutics of the invention are administered in combination with drugs effective in treating iron deficiency and hypochromic anemias, including but not limited to, ferrous sulfate (iron sulfate, FEOSOL™), ferrous fumarate (e.g., FEOSTA™), ferrous gluconate (e.g., FERGON™), polysaccharide-iron complex (e.g., NIFEREX™), iron dextran injection (e.g., INFED™), cupric sulfate, pyroxidine, riboflavin, Vitamin B₁₂, cyancobalamin injection (e.g., REDISOL™, RUBRAMIN PC™), hydroxocobalamin, folic acid (e.g., FOLVITE™), leucovorin (folinic acid, 5-CHOH4PteGlu, citrovorum factor) or WELLCOVORIN (Calcium salt of leucovorin), transferrin or ferritin.

[0950] In another embodiment, Therapeutics of the invention are administered in combination with vasodilating agents and/or calcium channel blocking agents. Vasodilating agents that may be administered with the Therapeutics of the invention include, but are not limited to, Angiotensin Converting Enzyme (ACE) inhibitors (e.g., papaverine, isoxsuprine, benazepril, captopril, cilazapril, enalapril, enalaprilat, fosinopril, lisinopril, moexipril, perindopril, quinapril, ramipril, spirapril, trandolapril, and nylidrin), and nitrates (e.g., isosorbide dinitrate, isosorbide mononitrate, and nitroglycerin). Examples of calcium channel blocking agents that may be administered in combination with the Therapeutics of the invention include, but are not limited to amlodipine, bepridil, diltiazem, felodipine, flunarizine, isradipine, nicardipine, nifedipine, nimodipine, and verapamil.

[0951] In additional embodiments, the Therapeutics of the invention are administered in combination with other therapeutic or prophylactic regimens, such as, for example, radiation therapy.

### Example 14

### Method of Treating Decreased Levels of the Polypeptide

[0952] The present invention relates to a method for treating an individual in need of an increased level of a polypeptide of the invention in the body comprising administering to such an individual a composition comprising a therapeutically effective amount of polypeptides (including agonists thereto), and/or antibodies of the invention. Moreover, it will be appreciated that conditions caused by a decrease in the standard or normal expression level of a polypeptide of the present invention in an individual may be treated by administering agonists of said polypeptide. Thus, the invention also provides a method of treatment of an individual in need of an increased level of the polypeptide comprising administering to such an individual a Therapeutic comprising an amount of the agonist (including polypeptides and antibodies of the present invention) to increase the activity level of the polypeptide in such an individual.

[0953] For example, a patient with decreased levels of a polypeptide receives a daily dose 0.1-100 ug/kg of the agonist for six consecutive days. The exact details of the dosing scheme, based on administration and formulation, are provided in Example 13.

### Example 15

### Method of Treating Increased Levels of the Polypeptide

[0954] The present invention also relates to a method of treating an individual in need of a decreased level of a polypeptide of the invention in the body comprising administering to such an individual a composition comprising a therapeutically effective amount of an antagonist of the invention (including polypeptides and antibodies of the invention).

[0955] In one example, antisense technology is used to inhibit production of a polypeptide of the present invention. This technology is one example of a method of decreasing levels of a polypeptide, due to a variety of etiologies, such as cancer.

[0956] For example, a patient diagnosed with abnormally increased levels of a polypeptide is administered intravenously antisense polynucleotides at 0.5, 1.0, 1.5, 2.0 and 3.0 mg/kg day for 21 days. This treatment is repeated after a 7-day rest period if the treatment was well tolerated. The antisense polynucleotides of the present invention can be formulated using techniques and formulations described herein (e.g. see Example 13), or otherwise known in the art.

### Example 16

### Method of Treatment Using Gene Therapy-Ex Vivo

[0957] One method of gene therapy transplants fibroblasts, which are capable of expressing a polypeptide, onto a patient. Generally, fibroblasts are obtained from a subject by skin biopsy. The resulting tissue is placed in tissue-culture medium and separated into small pieces. Small chunks of the tissue are placed on a wet surface of a tissue culture flask, approximately ten pieces are placed in each flask. The flask is turned upside down, closed tight and left at room temperature over night. After 24 hours at room temperature, the flask is inverted and the chunks of tissue remain fixed to the bottom of the flask and fresh media (e.g., Ham's F12 media, with 10%. FBS, penicillin and streptomycin) is added. The flasks are then incubated at 37 degree C. for approximately one week.

[0958] At this time, fresh media is added and subsequently changed every several days. After an additional two weeks in culture, a monolayer of fibroblasts emerge. The monolayer is trypsinized and scaled into larger flasks.

[0959] pMV-7 (Kirschmeier, P. T. et al., DNA, 7:219-25 (1988)), flanked by the long terminal repeats of the Moloney murine sarcoma virus, is digested with EcoRI and HindIII and subsequently treated with calf intestinal phosphatase. The linear vector is fractionated on agarose gel and purified, using glass beads.

[0960] The cDNA encoding a polypeptide of the present invention can be amplified using PCR primers which correspond to the 5′ and 3′ end sequences respectively as set forth in Example 1 using primers and having appropriate restriction sites and initiation/stop codons, if necessary. Preferably, the 5′ primer contains an EcoRI site and the 3′ primer includes a HindIII site. Equal quantities of the Moloney murine sarcoma virus linear backbone and the amplified EcoRI and HindIII fragment are added together, in the presence of T4 DNA ligase. The resulting mixture is maintained under conditions appropriate for ligation of the two fragments. The ligation mixture is then used to transform bacteria HB101, which are then plated onto agar containing kanamycin for the purpose of confirming that the vector has the gene of interest properly inserted.

[0961] The amphotropic pA317 or GP+am12 packaging cells are grown in tissue culture to confluent density in Dulbecco's Modified Eagles Medium (DMEM) with 10% calf serum (CS), penicillin and streptomycin. The MSV vector containing the gene is then added to the media and the packaging cells transduced with the vector. The packaging cells now produce infectious viral particles containing the gene (the packaging cells are now referred to as producer cells).

[0962] Fresh media is added to the transduced producer cells, and subsequently, the media is harvested from a 10 cm plate of confluent producer cells. The spent media, containing the infectious viral particles, is filtered through a millipore filter to remove detached producer cells and this media is then used to infect fibroblast cells. Media is removed from a sub-confluent plate of fibroblasts and quickly replaced with the media from the producer cells. This media is removed and replaced with fresh media. If the titer of virus is high, then virtually all fibroblasts will be infected and no selection is required. If the titer is very low, then it is necessary to use a retroviral vector that has a selectable marker, such as neo or his. Once the fibroblasts have been efficiently infected, the fibroblasts are analyzed to determine whether protein is produced.

[0963] The engineered fibroblasts are then transplanted onto the host, either alone or after having been grown to confluence on cytodex 3 microcarrier beads.

### Example 17

### Gene Therapy Using Endogenous Genes Corresponding To Polynucleotides of the Invention

[0964] Another method of gene therapy according to the present invention involves operably associating the endogenous polynucleotide sequence of the invention with a promoter via homologous recombination as described, for example, in U.S. Pat. No. 5,641,670, issued Jun. 24, 1997; International Publication NO: WO 96/29411, published Sep. 26, 1996; International Publication NO: WO 94/12650, published Aug. 4, 1994; Koller et al., Proc. Natl. Acad. Sci. USA, 86:8932-8935 (1989); and Zijlstra et al., Nature, 342:435-438 (1989). This method involves the activation of a gene which is present in the target cells, but which is not expressed in the cells, or is expressed at a lower level than desired.

[0965] Polynucleotide constructs are made which contain a promoter and targeting sequences, which are homologous to the 5′ non-coding sequence of endogenous polynucleotide sequence, flanking the promoter. The targeting sequence will be sufficiently near the 5′ end of the polynucleotide sequence so the promoter will be operably linked to the endogenous sequence upon homologous recombination. The promoter and the targeting sequences can be amplified using PCR. Preferably, the amplified promoter contains distinct restriction enzyme sites on the 5′ and 3′ ends. Preferably, the 3′ end of the first targeting sequence contains the same restriction enzyme site as the 5′ end of the amplified promoter and the 5′ end of the second targeting sequence contains the same restriction site as the 3′ end of the amplified promoter.

[0966] The amplified promoter and the amplified targeting sequences are digested with the appropriate restriction enzymes and subsequently treated with calf intestinal phosphatase. The digested promoter and digested targeting sequences are added together in the presence of T4 DNA ligase. The resulting mixture is maintained under conditions appropriate for ligation of the two fragments. The construct is size fractionated on an agarose gel, then purified by phenol extraction and ethanol precipitation.

[0967] In this Example, the polynucleotide constructs are administered as naked polynucleotides via electroporation. However, the polynucleotide constructs may also be administered with transfection-facilitating agents, such as liposomes, viral sequences, viral particles, precipitating agents, etc. Such methods of delivery are known in the art.

[0968] Once the cells are transfected, homologous recombination will take place which results in the promoter being operably linked to the endogenous polynucleotide sequence. This results in the expression of polynucleotide corresponding to the polynucleotide in the cell. Expression may be detected by immunological staining, or any other method known in the art.

[0969] Fibroblasts are obtained from a subject by skin biopsy. The resulting tissue is placed in DMEM+10% fetal calf serum. Exponentially growing or early stationary phase fibroblasts are trypsinized and rinsed from the plastic surface with nutrient medium. An aliquot of the cell suspension is removed for counting, and the remaining cells are subjected to centrifugation. The supernatant is aspirated and the pellet is resuspended in 5 ml of electroporation buffer (20 mM HEPES pH 7.3, 137 mM NaCl, 5 mM KCl, 0.7 mM Na₂ HPO₄, 6 mM dextrose). The cells are recentrifmuged, the supernatant aspirated, and the cells resuspended in electroporation buffer containing 1 mg/ml acetylated bovine serum albumin. The final cell suspension contains approximately 3×10⁶ cells/ml. Electroporation should be performed immediately following resuspension.

[0970] Plasmid DNA is prepared according to standard techniques. For example, to construct a plasmid for targeting to the locus corresponding to the polynucleotide of the invention, plasmid pUC18 (MBI Fermentas, Amherst, N.Y.) is digested with HindIII. The CMV promoter is amplified by PCR with an XbaI site on the 5′ end and a BamHI site on the 3′ end. Two non-coding sequences are amplified via PCR: one non-coding sequence (fragment 1) is amplified with a HindIII site at the 5′ end and an Xba site at the 3′end; the other non-coding sequence (fragment 2) is amplified with a BamHI site at the 5′end and a HindIII site at the 3′end. The CMV promoter and the fragments (1 and 2) are digested with the appropriate enzymes (CMV promoter—XbaI and BamI; fragment 1—XbaI; fragment 2—BamHI) and ligated together. The resulting ligation product is digested with HindIII, and ligated with the HindIII-digested pUC18 plasmid.

[0971] Plasmid DNA is added to a sterile cuvette with a 0.4 cm electrode gap (Bio-Rad). The final DNA concentration is generally at least 120 μg/ml. 0.5 ml of the cell suspension (containing approximately 1.5.×10⁶ cells) is then added to the cuvette, and the cell suspension and DNA solutions are gently mixed. Electroporation is performed with a Gene-Pulser apparatus (Bio-Rad). Capacitance and voltage are set at 960 μF and 250-300 V, respectively. As voltage increases, cell survival decreases, but the percentage of surviving cells that stably incorporate the introduced DNA into their genome increases dramatically. Given these parameters, a pulse time of approximately 14-20 mSec should be observed.

[0972] Electroporated cells are maintained at room temperature for approximately 5 min, and the contents of the cuvette are then gently removed with a sterile transfer pipette. The cells are added directly to 10 ml of prewarmed nutrient media (DMEM with 15% calf serum) in a 10 cm dish and incubated at 37 degree C. The following day, the media is aspirated and replaced with 10 ml of fresh media and incubated for a further 16-24 hours.

[0973] The engineered fibroblasts are then injected into the host, either alone or after having been grown to confluence on cytodex 3 microcarrier beads. The fibroblasts now produce the protein product. The fibroblasts can then be introduced into a patient as described above.

### Example 18

### Method of Treatment Using Gene Therapy—In Vivo

[0974] Another aspect of the present invention is using in vivo gene therapy methods to prevent, treat, and/or ameliorate hematopoietic and hematologic diseases and disorders. The gene therapy method relates to the introduction of naked nucleic acid (DNA, RNA, and antisense DNA or RNA) sequences into an animal to increase or decrease the expression of the polypeptide. The polynucleotide of the present invention may be operatively linked to (i.e., associated with) a promoter or any other genetic elements necessary for the expression of the polypeptide by the target tissue. Such gene therapy and delivery techniques and methods are known in the art, see, for example, WO90/11092, WO98/11779; U.S. Pat. Nos. 5,693,622, 5,705,151, 5,580,859; Tabata et al., Cardiovasc. Res. 35(3):470-479 (1997); Chao et al., Pharmacol. Res. 35(6):517-522 (1997); Wolff, Neuromuscul. Disord. 7(5):314-318 (1997); Schwartz et al., Gene Ther. 3(5):405-411 (1996); Tsurumi et al., Circulation 94(12):3281-3290 (1996) (incorporated herein by reference).

[0975] The polynucleotide constructs may be delivered by any method that delivers injectable materials to the cells of an animal, such as, injection into the interstitial space of tissues (heart, muscle, skin, lung, liver, intestine and the like). The polynucleotide constructs can be delivered in a pharmaceutically acceptable liquid or aqueous carrier.

[0976] The term “naked” polynucleotide, DNA or RNA, refers to sequences that are free from any delivery vehicle that acts to assist, promote, or facilitate entry into the cell, including viral sequences, viral particles, liposome formulations, lipofectin or precipitating agents and the like. However, the polynucleotides of the present invention may also be delivered in liposome formulations (such as those taught in Felgner P. L. et al. (1995) Ann. NY Acad. Sci. 772:126-139 and Abdallah B. et al. (1995) Biol. Cell 85(1):1-7) which can be prepared by methods well known to those skilled in the art.

[0977] The polynucleotide vector constructs used in the gene therapy method are preferably constructs that will not integrate into the host genome nor will they contain sequences that allow for replication. Any strong promoter known to those skilled in the art can be used for driving the expression of DNA. Unlike other gene therapy techniques, one major advantage of introducing naked nucleic acid sequences into target cells is the transitory nature of the polynucleotide synthesis in the cells. Studies have shown that non-replicating DNA sequences can be introduced into cells to provide production of the desired polypeptide for periods of up to six months.

[0978] The polynucleotide construct can be delivered to the interstitial space of tissues within an animal, including muscle, skin, brain, lung, liver, spleen, bone marrow, thymus, heart, lymph, blood, bone, cartilage, pancreas, kidney, gall bladder, stomach, intestine, testis, ovary, uterus, rectum, nervous system, eye, gland, and connective tissue. Interstitial space of the tissues comprises the intercellular fluid, mucopolysaccharide matrix among the reticular fibers of organ tissues, elastic fibers in the walls of vessels or chambers, collagen fibers of fibrous tissues, or that same matrix within connective tissue ensheathing muscle cells or in the lacunae of bone. It is similarly the space occupied by the plasma of the circulation and the lymph fluid of the lymphatic channels. Delivery to the interstitial space of muscle tissue is preferred for the reasons discussed below. They may be conveniently delivered by injection into the tissues comprising these cells. They are preferably delivered to and expressed in persistent, non-dividing cells which are differentiated, although delivery and expression may be achieved in non-differentiated or less completely differentiated cells, such as, for example, stem cells of blood or skin fibroblasts. In vivo muscle cells are particularly competent in their ability to take up and express polynucleotides.

[0979] For the naked polynucleotide injection, an effective dosage amount of DNA or RNA will be in the range of from about 0.05 g/kg body weight to about 50 mg/kg body weight. Preferably the dosage will be from about 0.005 mg/kg to about 20 mg/kg and more preferably from about 0.05 mg/kg to about 5 mg/kg. Of course, as the artisan of ordinary skill will appreciate, this dosage will vary according to the tissue site of injection. The appropriate and effective dosage of nucleic acid sequence can readily be determined by those of ordinary skill in the art and may depend on the condition being treated and the route of administration. The preferred route of administration is by the parenteral route of injection into the interstitial space of tissues. However, other parenteral routes may also be used, such as, inhalation of an aerosol formulation particularly for delivery to lungs or bronchial tissues, throat or mucous membranes of the nose. In addition, naked polynucleotide constructs can be delivered to arteries during angioplasty by the catheter used in the procedure.

[0980] The dose response effects of injected polynucleotide in muscle in vivo is determined as follows. Suitable template DNA for production of mRNA coding for polypeptide of the present invention is prepared in accordance with a standard recombinant DNA methodology. The template DNA, which may be either circular or linear, is either used as naked DNA or complexed with liposomes. The quadriceps muscles of mice are then injected with various amounts of the template DNA.

[0981] Five to six week old female and male Balb/C mice are anesthetized by intraperitoneal injection with 0.3 ml of 2.5% Avertin. A 1.5 cm incision is made on the anterior thigh, and the quadriceps muscle is directly visualized. The template DNA is injected in 0.1 ml of carrier in a 1 cc syringe through a 27 gauge needle over one minute, approximately 0.5 cm from the distal insertion site of the muscle into the knee and about 0.2 cm deep: A suture is placed over the injection site for future localization, and the skin is closed with stainless steel clips.

[0982] After an appropriate incubation time (e.g., 7 days) muscle extracts are prepared by excising the entire quadriceps. Every fifth 15 um cross-section of the individual quadriceps muscles is histochemically stained for protein expression. A time course for protein expression may be done in a similar fashion except that quadriceps from different mice are harvested at different times. Persistence of DNA in muscle following injection may be determined by Southern blot analysis after preparing total cellular DNA and HIRT supernatants from injected and control mice. The results of the above experimentation in mice can be used to extrapolate proper dosages and other treatment parameters in humans and other animals using naked DNA.

### Example 19

### Transgenic Animals

[0983] The polypeptides of the invention can also be expressed in transgenic animals. Animals of any species, including, but not limited to, mice, rats, rabbits, hamsters, guinea pigs, pigs, micro-pigs, goats, sheep, cows and non-human primates, e.g., baboons, monkeys, and chimpanzees may be used to generate transgenic animals. In a specific embodiment, techniques described herein or otherwise known in the art, are used to express polypeptides of the invention in humans, as part of a gene therapy protocol.

[0984] Any technique known in the art may be used to introduce the transgene (i.e., polynucleotides of the invention) into animals to produce the founder lines of transgenic animals. Such techniques include, but are not limited to, pronuclear microinjection (Paterson et al., Appl. Microbiol. Biotechnol. 40:691-698 (1994); Carver et al., Biotechnology (NY) 11:1263-1270 (1993); Wright et al., Biotechnology (NY) 9:830-834 (1991); and Hoppe et al., U.S. Pat. No. 4,873,191 (1989)); retrovirus mediated gene transfer into germ lines (Van der Putten et al., Proc. Natl. Acad. Sci., USA 82:6148-6152 (1985)), blastocysts or embryos; gene targeting in embryonic stem cells (Thompson et al., Cell 56:313-321 (1989)); electroporation of cells or embryos (Lo, 1983, Mol Cell. Biol. 3:1803-1814 (1983)); introduction of the polynucleotides of the invention using a gene gun (see, e.g., Ulmer et al., Science 259:1745 (1993); introducing nucleic acid constructs into embryonic pleuripotent stem cells and transferring the stem cells back into the blastocyst; and sperm-mediated gene transfer (Lavitrano et al., Cell 57:717-723 (1989); etc. For a review of such techniques, see Gordon, “Transgenic Animals,” Intl. Rev. Cytol. 115:171-229 (1989), which is incorporated by reference herein in its entirety.

[0985] Any technique known in the art may be used to produce transgenic clones containing polynucleotides of the invention, for example, nuclear transfer into enucleated oocytes of nuclei from cultured embryonic, fetal, or adult cells induced to quiescence (Campell et al., Nature 380:64-66 (1996); Wilmut et al., Nature 385:810-813 (1997)).

[0986] The present invention provides for transgenic animals that carry the transgene in all their cells, as well as animals which carry the transgene in some, but not all their cells, Le., mosaic animals or chimeric. The transgene may be integrated as a single transgene or as multiple copies such as in concatamers, e.g., head-to-head tandems or head-to-tail tandems. The transgene may also be selectively introduced into and activated in a particular cell type by following, for example, the teaching of Lasko et al. (Lasko et al., Proc. Natl. Acad. Sci. USA 89:6232-6236 (1992)). The regulatory sequences required for such a cell-type specific activation will depend upon the particular cell type of interest, and will be apparent to those of skill in the art. When it is desired that the polynucleotide transgene be integrated into the chromosomal site of the endogenous gene, gene targeting is preferred. Briefly, when such a technique is to be utilized, vectors containing some nucleotide sequences homologous to the endogenous gene are designed for the purpose of integrating, via homologous recombination with chromosomal sequences, into and disrupting the function of the nucleotide sequence of the endogenous gene. The transgene may also be selectively introduced into a particular cell type, thus inactivating the endogenous gene in only that cell type, by following, for example, the teaching of Gu et al. (Gu et al., Science 265:103-106 (1994)). The regulatory sequences required for such a cell-type specific inactivation will depend upon the particular cell type of interest, and will be apparent to those of skill in the art.

[0987] Once transgenic animals have been generated, the expression of the recombinant gene may be assayed utilizing standard techniques. Initial screening may be accomplished by Southern blot analysis or PCR techniques to analyze animal tissues to verify that integration of the transgene has taken place. The level of mRNA expression of the transgene in the tissues of the transgenic animals may also be assessed using techniques which include, but are not limited to, Northern blot analysis of tissue samples obtained from the animal, in situ hybridization analysis, and reverse transcriptase-PCR (rt-PCR). Samples of transgenic gene-expressing tissue may also be evaluated immunocytochemically or immunohistochemically using antibodies specific for the transgene product.

[0988] Once the founder animals are produced, they may be bred, inbred, outbred, or crossbred to produce colonies of the particular animal. Examples of such breeding strategies include, but are not limited to: outbreeding of founder animals with more than one integration site in order to establish separate lines; inbreeding of separate lines in order to produce compound transgenics that express the transgene at higher levels because of the effects of additive expression of each transgene; crossing of heterozygous transgenic animals to produce animals homozygous for a given integration site in order to both augment expression and eliminate the need for screening of animals by DNA analysis; crossing of separate homozygous lines to produce compound heterozygous or homozygous lines; and breeding to place the transgene on a distinct background that is appropriate for an experimental model of interest.

[0989] Transgenic animals of the invention have uses which include, but are not limited to, animal model systems useful in elaborating the biological function of polypeptides of the present invention, studying conditions and/or disorders associated with aberrant expression, and in screening for compounds effective in ameliorating such conditions and/or disorders.

### Example 20

### Knock-Out Animals

[0990] Endogenous gene expression can also be reduced by inactivating or “knocking out” the gene and/or its promoter using targeted homologous recombination. (e.g., see Smithies et al., Nature 317:230-234 (1985); Thomas & Capecchi, Cell 51:503-512 (1987); Thompson et al., Cell 5:313-321 (1989); each of which is incorporated by reference herein in its entirety). For example, a mutant, non-functional polynucleotide of the invention (or a completely unrelated DNA sequence) flanked by DNA homologous to the endogenous polynucleotide sequence (either the coding regions or regulatory regions of the gene) can be used, with or without a selectable marker and/or a negative selectable marker, to transfect cells that express polypeptides of the invention in vivo. In another embodiment, techniques known in the art are used to generate knockouts in cells that contain, but do not express the gene of interest. Insertion of the DNA construct, via targeted homologous recombination, results in inactivation of the targeted gene. Such approaches are particularly suited in research and agricultural fields where modifications to embryonic stem cells can be used to generate animal offspring with an inactive targeted gene (e.g., see Thomas & Capecchi 1987 and Thompson 1989, supra). However this approach can be routinely adapted for use in humans provided the recombinant DNA constructs are directly administered or targeted to the required site in vivo using appropriate viral vectors that will be apparent to those of skill in the art.

[0991] In further embodiments of the invention, cells that are genetically engineered to express the polypeptides of the invention, or alternatively, that are genetically engineered not to express the polypeptides of the invention (e.g., knockouts) are administered to a patient in vivo. Such cells may be obtained from the patient (i.e., animal, including human) or an MHC compatible donor and can include, but are not limited to fibroblasts, bone marrow cells, blood cells (e.g., lymphocytes), adipocytes, muscle cells, endothelial cells etc. The cells are genetically engineered in vitro using recombinant DNA techniques to introduce the coding sequence of polypeptides of the invention into the cells, or alternatively, to disrupt the coding sequence and/or endogenous regulatory sequence associated with the polypeptides of the invention, e.g., by transduction (using viral vectors, and preferably vectors that integrate the transgene into the cell genome) or transfection procedures, including, but not limited to, the use of plasmids, cosmids, YACs, naked DNA, electroporation, liposomes, etc. The coding sequence of the polypeptides of the invention can be placed under the control of a strong constitutive or inducible promoter or promoter/enhancer to achieve expression, and preferably secretion, of the polypeptides of the invention. The engineered cells which express and preferably secrete the polypeptides of the invention can be introduced into the patient systemically, e.g., in the circulation, or intraperitoneally.

[0992] Alternatively, the cells can be incorporated into a matrix and implanted in the body, e.g., genetically engineered fibroblasts can be implanted as part of a skin graft; genetically engineered endothelial cells can be implanted as part of a lymphatic or vascular graft. (See, for example, Anderson et al. U.S. Pat. No. 5,399,349; and Mulligan & Wilson, U.S. Pat. No. 5,460,959 each of which is incorporated by reference herein in its entirety).

[0993] When the cells to be administered are non-autologous or non-MHC compatible cells, they can be administered using well known techniques which prevent the development of a host immune response against the introduced cells. For example, the cells may be introduced in an encapsulated form which, while allowing for an exchange of components with the immediate extracellular environment, does not allow the introduced cells to be recognized by the host immune system.

[0994] Transgenic and “knock-out” animals of the invention have uses which include, but are not limited to, animal model systems useful in elaborating the biological function of polypeptides of the present invention, studying conditions and/or disorders associated with aberrant expression, and in screening for compounds effective in ameliorating such conditions and/or disorders.

### Example 21

### Assays Detecting Stimulation or Inhibition of B cell Proliferation and Differentiation

[0995] Generation of functional humoral immune responses requires both soluble and cognate signaling between B-lineage cells and their microenvironment. Signals may impart a positive stimulus that allows a B-lineage cell to continue its programmed development, or a negative stimulus that instructs the cell to arrest its current developmental pathway. To date, numerous stimulatory and inhibitory signals have been found to influence B cell responsiveness including IL-2, IL4, IL-5, IL6, IL-7, IL10, IL-13, IL-14 and IL-15. Interestingly, these signals are by themselves weak effectors but can, in combination with various co-stimulatory proteins, induce activation, proliferation, differentiation, homing, tolerance and death among B cell populations.

[0996] One of the best studied classes of B-cell co-stimulatory proteins is the TNF-superfamily. Within this family CD40, CD27, and CD30 along with their respective ligands CD154, CD70, and CD153 have been found to regulate a variety of immune responses. Assays which allow for the detection and/or observation of the proliferation and differentiation of these B-cell populations and their precursors are valuable tools in determining the effects various proteins may have on these B-cell populations in terms of proliferation and differentiation. Listed below are two assays designed to allow for the detection of the differentiation, proliferation, or inhibition of B-cell populations and their precursors.

[0997] In Vitro Assay-Agonists or antagonists of the invention can be assessed for its ability to induce activation, proliferation, differentiation or inhibition and/or death in B-cell populations and their precursors. The activity of the agonists or antagonists of the invention on purified human tonsillar B cells, measured qualitatively over the dose range from 0.1 to 10,000 ng/mL, is assessed in a standard B-lymphocyte co-stimulation assay in which purified tonsillar B cells are cultured in the presence of either formalin-fixed Staphylococcus aureus Cowan I (SAC) or immobilized anti-human IgM antibody as the priming agent. Second signals such as IL-2 and IL-15 synergize with SAC and IgM crosslinking to elicit B cell proliferation as measured by tritiated-thymidine incorporation. Novel synergizing agents can be readily identified using this assay. The assay involves isolating human tonsillar B cells by magnetic bead (MACS) depletion of CD3-positive cells. The resulting cell population is greater than 95% B cells as assessed by expression of CD45R(B220).

[0998] Various dilutions of each sample are placed into individual wells of a 96-well plate to which are added 10⁵ B-cells suspended in culture medium (RPMI 1640 containing 10% FBS, 5×10⁻⁵M 2ME, 100 U/ml penicillin, 10 ug/ml streptomycin, and 10⁻⁵ dilution of SAC) in a total volume of 150 ul. Proliferation or inhibition is quantitated by a 20 h pulse (1 uCi/well) with 3H-thymidine (6.7 Ci/mM) beginning 72 h post factor addition. The positive and negative controls are IL2 and medium respectively.

[0999] In vivo Assay-BALB/c mice are injected (i.p.) twice per day with buffer only, or 2 mg/Kg of agonists or antagonists of the invention, or truncated forms thereof. Mice receive this treatment for 4 consecutive days, at which time they are sacrificed and various tissues and serum collected for analyses. Comparison of H&E sections from normal spleens and spleens treated with agonists or antagonists of the invention identify the results of the activity of the agonists or antagonists on spleen cells, such as the diffusion of peri-arterial lymphatic sheaths, and/or significant increases in the nucleated cellularity of the red pulp regions, which may indicate the activation of the differentiation and proliferation of B-cell populations. Immunohistochemical studies using a B cell marker, anti-CD45R(B220), are used to determine whether any physiological changes to splenic cells, such as splenic disorganization, are due to increased B-cell representation within loosely defined B-cell zones that infiltrate established T-cell regions.

[1000] Flow cytometric analyses of the spleens from mice treated with agonist or antagonist is used to indicate whether the agonists or antagonists specifically increases the proportion of ThB+, CD45R(B220) dull B cells over that which is observed in control mice.

[1001] Likewise, a predicted consequence of increased mature B-cell representation in vivo is a relative increase in serum Ig titers. Accordingly, serum IgM and IgA levels are compared between buffer and agonists or antagonists-treated mice.

[1002] The studies described in this example tested activity of agonists or antagonists of the invention. However, one skilled in the art could easily modify the exemplified studies to test the activity of polynucleotides or polypeptides of the invention (e.g., gene therapy).

### Example 22

### T Cell Proliferation Assay

[1003] A CD3-induced proliferation assay is performed on PBMCs and is measured by the uptake of ³H-thymidine. The assay is performed as follows. Ninety-six well plates are coated with 100 μl/well of mAb to CD3 (HIT3a, Pharmingen) or isotype-matched control mAb (B33.1) overnight at 4 degrees C. (1 μg/ml in 0.05M bicarbonate buffer, pH 9.5), then washed three times with PBS. PBMC are isolated by F/H gradient centrifugation from human peripheral blood and added to quadruplicate wells (5×10⁴/well) of mAb coated plates in RPMI containing 10% FCS and P/S in the presence of varying concentrations of agonists or antagonists of the invention (total volume 200 ul). Relevant protein buffer and medium alone are controls. After 48 hr. culture at 37 degrees C., plates are spun for 2 min. at 1000 rpm and 100 μl of supernatant is removed and stored −20 degrees C. for measurement of IL-2 (or other cytokines) if effect on proliferation is observed. Wells are supplemented with 100 ul of medium containing 0.5 uCi of ³H-thymidine and cultured at 37 degrees C. for 18-24 hr. Wells are harvested and incorporation of ³H-thymidine used as a measure of proliferation. Anti-CD3 alone is the positive control for proliferation. IL-2 (100 U/ml) is also used as a control which enhances proliferation. Control antibody which does not induce proliferation of T cells is used as the negative control for the effects of agonists or antagonists of the invention.

[1004] The studies described in this example tested activity of agonists or antagonists of the invention. However, one skilled in the art could easily modify the exemplified studies to test the activity of polynucleotides or polypeptides of the invention (e.g., gene therapy).

### Example 23

### Effect of Agonists or Antagonists of the Invention on the Expression of MHC Class II, Costimulatory and Adhesion Molecules and Cell Differentiation of Monocytes and Monocyte-Derived Human Dendrite Cells

[1005] Dendritic cells are generated by the expansion of proliferating precursors found in the peripheral blood: adherent PBMC or elutriated monocytic fractions are cultured for 7-10 days with GM-CSF (50 ng/ml) and IL4 (20 ng/ml). These dendritic cells have the characteristic phenotype of immature cells (expression of CD1, CD80, CD86, CD40 and MHC class 11 antigens). Treatment with activating factors, such as TNf-α, causes a rapid change in surface phenotype (increased expression of MHC class I and II, costimulatory and adhesion molecules, downregulation of FCγRII, upregulation of CD83). These changes correlate with increased antigen-presenting capacity and with functional maturation of the dendritic cells.

[1006] FACS analysis of surface antigens is performed as follows. Cells are treated 1-3 days with increasing concentrations of agonist or antagonist of the invention or LPS (positive control), washed with PBS containing 1% BSA and 0.02 mM sodium azide, and then incubated with 1:20 dilution of appropriate FFIC- or PE-labeled monoclonal antibodies for 30 minutes at 4 degrees C. After an additional wash, the labeled cells are analyzed by flow cytometry on a FACScan (Becton Dickinson).

[1007] Effect on the production of cytokines. Cytokines generated by dendritic cells, in particular IL-12, are important in the initiation of T-cell dependent immune responses. IL-12 strongly influences the development of Thl helper T-cell immune response, and induces cytotoxic T and NK cell function. An ELISA is used to measure the IL-12 release as follows. Dendritic cells (10⁶/ml) are treated with increasing concentrations of agonists or antagonists of the invention for 24 hours. LPS (100 ng/ml) is added to the cell culture as positive control. Supernatants from the cell cultures are then collected and analyzed for IL-12 content using commercial ELISA kit (e.g., R & D Systems (Minneapolis, Minn.)). The standard protocols provided with the kits are used.

[1008] Effect on the expression of MHC Class II costimulatory and adhesion molecules. Three major families of cell surface antigens can be identified on monocytes: adhesion molecules, molecules involved in antigen presentation, and Fc receptor. Modulation of the expression of MHC class II antigens and other costimulatory molecules, such as B7 and ICAM-1, may result in changes in the antigen presenting capacity of monocytes and ability to induce T cell activation. Increased expression of Fc receptors may correlate with improved monocyte cytotoxic activity, cytokine release and phagocytosis.

[1009] FACS analysis is used to examine the surface antigens as follows. Monocytes are treated 1-5 days with increasing concentrations of agonists or antagonists of the invention or LPS (positive control), washed with PBS containing 1% BSA and 0.02 mM sodium azide, and then incubated with 1:20 dilution of appropriate FITC- or PE-labeled monoclonal antibodies for 30 minutes at 4 degrees C. After an additional wash, the labeled cells are analyzed by flow cytometry on a FACScan (Becton Dickinson).

[1010] Monocyte activation and/or increased survival. Assays for molecules that activate (or alternatively, inactivate) monocytes and/or increase monocyte survival (or alternatively, decrease monocyte survival) are known in the art and may routinely be applied to determine whether a molecule of the invention functions as an inhibitor or activator of monocytes. Agonists or antagonists of the invention can be screened using the three assays described below. For each of these assays, Peripheral blood mononuclear cells (PBMC) are purified from single donor leukopacks (American Red Cross, Baltimore, Md.) by centrifugation through a Histopaque gradient (Sigma). Monocytes are isolated from PBMC by counterflow centrifugal elutriation.

[1011] Monocyte Survival Assay. Human peripheral blood monocytes progressively lose viability when cultured in absence of serum or other stimuli. Their death results from internally regulated processes (apoptosis). Addition to the culture of activating factors, such as TNF-alpha dramatically improves cell survival and prevents DNA fragmentation. Propidium iodide (PI) staining is used to measure apoptosis as follows. Monocytes are cultured for 48 hours in polypropylene tubes in serum-free medium (positive control), in the presence of 100 ng/ml TNF-alpha (negative control), and in the presence of varying concentrations of the compound to be tested. Cells are suspended at a concentration of 2×10⁶/ml in PBS containing PI at a final concentration of 5 μg/ml, and then incubated at room temperature for 5 minutes before FACScan analysis. PI uptake has been demonstrated to correlate with DNA fragmentation in this experimental paradigm.

[1012] Effect on cytokine release. An important function of monocytes/macrophages is their regulatory activity on other cellular populations of the immune system through the release of cytokines after stimulation. An ELISA to measure cytokine release is performed as follows. Human monocytes are incubated at a density of 5×10⁵ cells/ml with increasing concentrations of agonists or antagonists of the invention and under the same conditions, but in the absence of agonists or antagonists. For IL-12 production, the cells are primed overnight with IFN (100 U/ml) in the presence of agonist or antagonist of the invention. LPS (10 ng/ml) is then added. Conditioned media are collected after 24 h and kept frozen until use. Measurement of TNF-alpha, IL-10, MCP-1 and IL-8 is then performed using a commercially available ELISA kit (e.g., R & D Systems (Minneapolis, Minn.)) and applying the standard protocols provided with the kit.

[1013] Oxidative burst. Purified monocytes are plated in 96-w plate at 2-1×10⁵ cell/well. Increasing concentrations of agonists or antagonists of the invention are added to the wells in a total volume of 0.2 ml culture medium (RPMI 1640+10% FCS, glutamine and antibiotics). After 3 days incubation, the plates are centrifuged and the medium is removed from the wells. To the macrophage monolayers, 0.2 ml per well of phenol red solution (140 mM NaCl, 10 mM potassium phosphate buffer pH 7.0, 5.5 mM dextrose, 0.56 mM phenol red and 19 U/ml of HRPO) is added, together with the stimulant (200 nM PMA). The plates are incubated at 37° C. for 2 hours and the reaction is stopped by adding 20 μl 1N NaOH per well. The absorbance is read at 610 nm. To calculate the amount of H₂O₂ produced by the macrophages, a standard curve of a H₂O₂ solution of known molarity is performed for each experiment.

[1014] The studies described in this example tested activity of agonists or antagonists of the invention. However, one skilled in the art could easily modify the exemplified studies to test the activity of polynucleotides or polypeptides of the invention (e.g., gene therapy).

### Example 24

### Diabetic Mouse and Glucocorticoid-Impaired Wound Healing Models

Diabetic db+/db+Mouse Model.

[1015] To demonstrate that an agonist or antagonist of the invention accelerates the healing process, the genetically diabetic mouse model of wound healing is used. The full thickness wound healing model in the db+/db+ mouse is a well characterized, clinically relevant and reproducible model of impaired wound healing. Healing of the diabetic wound is dependent on formation of granulation tissue and re-epithelialization rather than contraction (Gartner, M. H. et al., J. Surg. Res. 52:389 (1992); Greenhalgh, D. G. et al., Am. J. Pathol. 136:1235 (1990)).

[1016] The diabetic animals have many of the characteristic features observed in Type II diabetes mellitus. Homozygous (db+/db+) mice are obese in comparison to their normal heterozygous (db+/+m) littermates. Mutant diabetic (db+/db+) mice have a single autosomal recessive mutation on chromosome 4 (db+) (Coleman et al. Proc. Natl. Acad. Sci. USA 77:283-293 (1982)). Animals show polyphagia, polydipsia and polyuria. Mutant diabetic mice (db+/db+) have elevated blood glucose, increased or normal insulin levels, and suppressed cell-mediated immunity (Mandel et al, J. Immunol. 120:1375 (1978); Debray-Sachs, M. et al., Clin. Exp. Immunol. 51(1):1-7 (1983); Leiter et al., Am. J. of Pathol. 114:46-55 (1985)). Peripheral neuropathy, myocardial complications, and microvascular lesions, basement membrane thickening and glomerular filtration abnormalities have been described in these animals (Norido, F. et al., Exp. Neurol. 83(2):221-232 (1984); Robertson et al, Diabetes 29(1):60-67 (1980); Giacomelli et al, Lab Invest. 40(4):460-473 (1979); Coleman, D. L., Diabetes 31 (Suppl):1-6 (1982)). These homozygous diabetic mice develop hyperglycemia that is resistant to insulin analogous to human type II diabetes (Mandel et al., J. Immunol. 120:1375-1377 (1978)).

[1017] The characteristics observed in these animals suggests that healing in this model may be similar to the healing observed in human diabetes (Greenhalgh, et al., Am. J. of Pathol. 136:1235-1246 (1990)).

[1018] Genetically diabetic female C57BL/KsJ (db+/db+) mice and their non-diabetic (db+/+m) heterozygous littermates are used in this study (Jackson Laboratories). The animals are purchased at 6 weeks of age and are 8 weeks old at the beginning of the study. Animals are individually housed and received food and water ad libitum. All manipulations are performed using aseptic techniques. The experiments are conducted according to the rules and guidelines of Human Genome Sciences, Inc. Institutional Animal Care and Use Committee and the Guidelines for the Care and Use of Laboratory Animals.

[1019] Wounding protocol is performed according to previously reported methods (Tsuboi, R. and Rifkin, D. B., J. Exp. Med. 172:245-251 (1990)). Briefly, on the day of wounding, animals are anesthetized with an intraperitoneal injection of Avertin (0.01 mg/mL), 2,2,2-tribromoethanol and 2-methyl-2-butanol dissolved in deionized water. The dorsal region of the animal is shaved and the skin washed with 70% ethanol solution and iodine. The surgical area is dried with sterile gauze prior to wounding. An 8 mm full-thickness wound is then created using a Keyes tissue punch. Immediately following wounding, the surrounding skin is gently stretched to eliminate wound expansion. The wounds are left open for the duration of the experiment. Application of the treatment is given topically for 5 consecutive days commencing on the day of wounding. Prior to treatment, wounds are gently cleansed with sterile saline and gauze sponges.

[1020] Wounds are visually examined and photographed at a fixed distance at the day of surgery and at two day intervals thereafter. Wound closure is determined by daily measurement on days 1-5 and on day 8. Wounds are measured horizontally and vertically using a calibrated Jameson caliper. Wounds are considered healed if granulation tissue is no longer visible and the wound is covered by a continuous epithelium.

[1021] An agonist or antagonist of the invention is administered using at a range different doses, from 4 mg to 500 mg per wound per day for 8 days in vehicle. Vehicle control groups received 50 mL of vehicle solution.

[1022] Animals are euthanized on day 8 with an intraperitoneal injection of sodium pentobarbital (300 mg/kg). The wounds and surrounding skin are then harvested for histology and immunohistochemistry. Tissue specimens are placed in 10% neutral buffered formalin in tissue cassettes between biopsy sponges for further processing.

[1023] Three groups of 10 animals each (5 diabetic and 5 non-diabetic controls) are evaluated: 1) Vehicle placebo control, 2) untreated group, and 3) treated group.

[1024] Wound closure is analyzed by measuring the area in the vertical and horizontal axis and obtaining the total square area of the wound. Contraction is then estimated by establishing the differences between the initial wound area (day 0) and that of post treatment (day 8). The wound area on day 1 is 64 mm², the corresponding size of the dermal punch. Calculations are made using the following formula:
[Open area on day 8]−[Open area on day 1]/[Open area on day 1]

[1025] Specimens are fixed in 10% buffered formalin and paraffin embedded blocks are sectioned perpendicular to the wound surface (5 mm) and cut using a Reichert-Jung microtome. Routine hematoxylin-eosin (H&E) staining is performed on cross-sections of bisected wounds. Histologic examination of the wounds are used to assess whether the healing process and the morphologic appearance of the repaired skin is altered by treatment with an agonist or antagonist of the invention. This assessment included verification of the presence of cell accumulation, inflammatory cells, capillaries, fibroblasts, re-epithelialization and epidermal maturity (Greenhalgh, D. G. et al., Am. J. Pathol. 136:1235 (1990)). A calibrated lens micrometer is used by a blinded observer.

[1026] Tissue sections are also stained immunohistochemically with a polyclonal rabbit anti-human keratin antibody using ABC Elite detection system. Human skin is used as a positive tissue control while non-immune IgG is used as a negative control. Keratinocyte growth is determined by evaluating the extent of reepithelialization of the wound using a calibrated lens micrometer.

[1027] Proliferating cell nuclear antigen/cyclin (PCNA) in skin specimens is demonstrated by using anti-PCNA antibody (1:50) with an ABC Elite detection system. Human colon cancer served as a positive tissue control and human brain tissue is used as a negative tissue control. Each specimen included a section with omission of the primary antibody and substitution with non-immune mouse IgG. Ranking of these sections is based on the extent of proliferation on a scale of 0-8, the lower side of the scale reflecting slight proliferation to the higher side reflecting intense proliferation.

[1028] Experimental data are analyzed using an unpaired t test. A p value of <0.05 is considered significant.

Steroid Impaired Rat Model

[1029] The inhibition of wound healing by steroids has been well documented in various in vitro and in vivo systems (Wahl, Glucocorticoids and Wound healing. In: Anti-Inflammatory Steroid Action: Basic and Clinical Aspects. 280-302 (1989); Wahl et al., J. Immunol. 115: 476-481 (1975); Werb et al., J. Exp. Med. 147:1684-1694 (1978)). Glucocorticoids retard wound healing by inhibiting angiogenesis, decreasing vascular permeability (Ebert et al., An. Intern. Med. 37:701-705 (1952)), fibroblast proliferation, and collagen synthesis (Beck et al., Growth Factors. 5: 295-304 (1991); Haynes et al., J. Clin. Invest. 61: 703-797 (1978)) and producing a transient reduction of circulating monocytes (Haynes et al., J. Clin. Invest. 61: 703-797 (1978); Wahl, “Glucocorticoids and wound healing”, In: Antiinflammatory Steroid Action: Basic and Clinical Aspects, Academic Press, New York, pp. 280-302 (1989)). The systemic administration of steroids to impaired wound healing is a well establish phenomenon in rats (Beck et al., Growth Factors. 5: 295-304 (1991); Haynes et al., J. Clin. Invest. 61: 703-797 (1978); Wahl, “Glucocorticoids and wound healing”, In: Antiinflammatory Steroid Action: Basic and Clinical Aspects, Academic Press, New York, pp. 280-302 (1989); Pierce et al., Proc. Natl. Acad. Sci. USA 86: 2229-2233 (1989)).

[1030] To demonstrate that an agonist or antagonist of the invention can accelerate the healing process, the effects of multiple topical applications of the agonist or antagonist on full thickness excisional skin wounds in rats in which healing has been impaired by the systemic administration of methylprednisolone is assessed.

[1031] Young adult male Sprague Dawley rats weighing 250-300 g (Charles River Laboratories) are used in this example. The animals are purchased at 8 weeks of age and are 9 weeks old at the beginning of the study. The healing response of rats is impaired by the systemic administration of methylprednisolone (17 mg/kg/rat intramuscularly) at the time of wounding. Animals are individually housed and received food and water ad libitum. All manipulations are performed using aseptic techniques. This study is conducted according to the rules and guidelines of Human Genome Sciences, Inc. Institutional Animal Care and Use Committee and the Guidelines for the Care and Use of Laboratory Animals.

[1032] The wounding protocol is followed according to section A, above. On the day of wounding, animals are anesthetized with an intramuscular injection of ketamine (50 mg/kg) and xylazine (5 mg/kg). The dorsal region of the animal is shaved and the skin washed with 70% ethanol and iodine solutions. The surgical area is dried with sterile gauze prior to wounding. An 8 mm full-thickness wound is created using a Keyes tissue punch. The wounds are left open for the duration of the experiment. Applications of the testing materials are given topically once a day for 7 consecutive days commencing on the day of wounding and subsequent to methylprednisolone administration. Prior to treatment, wounds are gently cleansed with sterile saline and gauze sponges.

[1033] Wounds are visually examined and photographed at a fixed distance at the day of wounding and at the end of treatment. Wound closure is determined by daily measurement on days 1-5 and on day 8. Wounds are measured horizontally and vertically using a calibrated Jameson caliper. Wounds are considered healed if granulation tissue is no longer visible and the wound is covered by a continuous epithelium.

[1034] The agonist or antagonist of the invention is administered using at a range different doses, from 4 mg to 500 mg per wound per day for 8 days in vehicle. Vehicle control groups received 50 mL of vehicle solution.

[1035] Animals are euthanized on day 8 with an intraperitoneal injection of sodium pentobarbital (300 mg/kg). The wounds and surrounding skin are then harvested for histology. Tissue specimens are placed in 10% neutral buffered formalin in tissue cassettes between biopsy sponges for further processing.

[1036] Three groups of 10 animals each (5 with methylprednisolone and 5 without glucocorticoid) are evaluated: 1) Untreated group 2) Vehicle placebo control 3) treated groups.

[1037] Wound closure is analyzed by measuring the area in the vertical and horizontal axis and obtaining the total area of the wound. Closure is then estimated by establishing the differences between the initial wound area (day 0) and that of post treatment (day 8). The wound area on day 1 is 64 mm², the corresponding size of the dermal punch. Calculations are made using the following formula:
[Open area on day 8]−[Open area on day 1]/[Open area on day 1]

[1038] Specimens are fixed in 10% buffered formalin and paraffin embedded blocks are sectioned perpendicular to the wound surface (5 mm) and cut using an Olympus microtome. Routine hematoxylin-eosin (H&E) staining is performed on cross-sections of bisected wounds. Histologic examination of the wounds allows assessment of whether the healing process and the morphologic appearance of the repaired skin is improved by treatment with an agonist or antagonist of the invention. A calibrated lens micrometer is used by a blinded observer to determine the distance of the wound gap.

[1039] Experimental data are analyzed using an unpaired t test. A p value of <0.05 is considered significant.

[1040] The studies described in this example tested activity of agonists or antagonists of the invention. However, one skilled in the art could easily modify the exemplified studies to test the activity of polynucleotides or polypeptides of the invention (e.g., gene therapy).

### Example 25

### Lymphadema Animal Model

[1041] The purpose of this experimental approach is to create an appropriate and consistent lymphedema model for testing the therapeutic effects of an agonist or antagonist of the invention in lymphangiogenesis and reestablishment of the lymphatic circulatory system in the rat hind limb. Effectiveness is measured by swelling volume of the affected limb, quantification of the amount of lymphatic vasculature, total blood plasma protein, and histopathology. Acute lymphedema is observed for 7-10 days. Perhaps more importantly, the chronic progress of the edema is followed for up to 34 weeks.

[1042] Prior to beginning surgery, blood sample is drawn for protein concentration analysis. Male rats weighing approximately ˜350 g are dosed with Pentobarbital. Subsequently, the right legs are shaved from knee to hip. The shaved area is swabbed with gauze soaked in 70% EtOH. Blood is drawn for serum total protein testing. Circumference and volumetric measurements are made prior to injecting dye into paws after marking 2 measurement levels (0.5 cm above heel, at mid-pt of dorsal paw). The intradermal dorsum of both right and left paws are injected with 0.05 ml of 1% Evan's Blue. Circumference and volumetric measurements are then made following injection of dye into paws.

[1043] Using the knee joint as a landmark, a mid-leg inguinal incision is made circumferentially allowing the femoral vessels to be located. Forceps and hemostats are used to dissect and separate the skin flaps. After locating the femoral vessels, the lymphatic vessel that runs along side and underneath the vessel(s) is located. The main lymphatic vessels in this area are then electrically coagulated or suture ligated.

[1044] Using a microscope, muscles in back of the leg (near the semitendinosis and adductors) are bluntly dissected. The popliteal lymph node is then located. The 2 proximal and 2 distal lymphatic vessels and distal blood supply of the popliteal node are then ligated by suturing. The popliteal lymph node, and any accompanying adipose tissue, is then removed by cutting connective tissues.

[1045] Care is taken to control any mild bleeding resulting from this procedure. After lymphatics are occluded, the skin flaps are sealed by using liquid skin (Vetbond) (AJ Buck). The separated skin edges are sealed to the underlying muscle tissue while leaving a gap of ˜0.5 cm around the leg. Skin also may be anchored by suturing to underlying muscle when necessary.

[1046] To avoid infection, animals are housed individually with mesh (no bedding). Recovering animals are checked daily through the optimal edematous peak, which typically occurred by day 5-7. The plateau edematous peak are then observed. To evaluate the intensity of the lymphedema, the circumference and volumes of 2 designated places on each paw before operation and daily for 7 days are measured. The effect of plasma proteins on lymphedema is determined and whether protein analysis is a useful testing perimeter is also investigated. The weights of both control and edematous limbs are evaluated at 2 places. Analysis is performed in a blind manner.

[1047] Circumference Measurements: Under brief gas anesthetic to prevent limb movement, a cloth tape is used to measure limb circumference. Measurements are done at the ankle bone and dorsal paw by 2 different people and those 2 readings are averaged. Readings are taken from both control and edematous limbs.

[1048] Volumetric Measurements: On the day of surgery, animals are anesthetized with Pentobarbital and are tested prior to surgery. For daily volumetrics animals are under brief halothane anesthetic (rapid immobilization and quick recovery), and both legs are shaved and equally marked using waterproof marker on legs. Legs are first dipped in water, then dipped into instrument to each marked level then measured by Buxco edema software (Chen/Victor). Data is recorded by one person, while the other is dipping the limb to marked area.

[1049] Blood-plasma protein measurements: Blood is drawn, spun, and serum separated prior to surgery and then at conclusion for total protein and Ca2⁺ comparison.

[1050] Limb Weight Comparison: After drawing blood, the animal is prepared for tissue collection. The limbs are amputated using a quillitine, then both experimental and control legs are cut at the ligature and weighed. A second weighing is done as the tibio-cacaneal joint is disarticulated and the foot is weighed.

[1051] Histological Preparations: The transverse muscle located behind the knee (popliteal) area is dissected and arranged in a metal mold, filled with freezeGel, dipped into cold methylbutane, placed into labeled sample bags at −80 EC until sectioning. Upon sectioning, the muscle is observed under fluorescent microscopy for lymphatics.

[1052] The studies described in this example tested activity of agonists or antagonists of the invention. However, one skilled in the art could easily modify the exemplified studies to test the activity of polynucleotides or polypeptides of the invention (e.g., gene therapy).

### Example 26

### Suppression of TNF Alpha-Induced Adhesion Molecule Expression by an Agonist or Antagonist of the Invention

[1053] The recruitment of lymphocytes to areas of inflammation and angiogenesis involves specific receptor-ligand interactions between cell surface adhesion molecules (CAMs) on lymphocytes and the vascular endothelium. The adhesion process, in both normal and pathological settings, follows a multi-step cascade that involves intercellular adhesion molecule-1 (ICAM-1), vascular cell adhesion molecule-1 (VCAM-1), and endothelial leukocyte adhesion molecule-1 (E-selectin) expression on endothelial cells (EC). The expression of these molecules and others on the vascular endothelium determines the efficiency with which leukocytes may adhere to the local vasculature and extravasate into the local tissue during the development of an inflammatory response. The local concentration of cytokines and growth factor participate in the modulation of the expression of these CAMs.

[1054] Tumor necrosis factor alpha (TNF-a), a potent proinflammatory cytokine, is a stimulator of all three CAMs on endothelial cells and may be involved in a wide variety of inflammatory responses, often resulting in a pathological outcome.

[1055] The potential of an agonist or antagonist of the invention to mediate a suppression of TNF-a induced CAM expression can be examined. A modified ELISA assay which uses ECs as a solid phase absorbent is employed to measure the amount of CAM expression on TNF-a treated ECs when co-stimulated with a member of the FGF family of proteins.

[1056] To perform the experiment, human umbilical vein endothelial cell (HUVEC) cultures are obtained from pooled cord harvests and maintained in growth medium (EGM-2; Clonetics, San Diego, Calif.) supplemented with 10% FCS and 1% penicillin/streptomycin in a 37 degree C. humidified incubator containing 5% CO₂. HUVECs are seeded in 96-well plates at concentrations of 1×10⁴ cells/well in EGM medium at 37 degree C. for 18-24 hrs or until confluent. The monolayers are subsequently washed 3 times with a serum-free solution of RPMI-1640 supplemented with 100 U/ml penicillin and 100 mg/ml streptomycin, and treated with a given cytokine and/or growth factor(s) for 24 h at 37 degree C. Following incubation, the cells are then evaluated for CAM expression.

[1057] Human Umbilical Vein Endothelial cells (HUVECs) are grown in a standard 96 well plate to confluence. Growth medium is removed from the cells and replaced with 90 ul of 199 Medium (10% FBS). Samples for testing and positive or negative controls are added to the plate in triplicate (in 10 ul volumes). Plates are incubated at 37 degree C. for either 5 h (selectin and integrin expression) or 24 h (integrin expression only). Plates are aspirated to remove medium and 100 μl of 0.1% paraformaldehyde-PBS (with Ca++ and Mg++) is added to each well. Plates are held at 4° C. for 30 min.

[1058] Fixative is then removed from the wells and wells are washed 1× with PBS(+Ca, Mg)+0.5% BSA and drained. Do not allow the wells to dry. Add 10 μl of diluted primary antibody to the test and control wells. Anti-ICAM-1-Biotin, Anti-VCAM-1-Biotin and Anti-E-selectin-Biotin are used at a concentration of 10 μg/ml (1:10 dilution of 0.1 mg/ml stock antibody). Cells are incubated at 37° C. for 30 min. in a humidified environment. Wells are washed X3 with PBS(+Ca, Mg)+0.5% BSA.

[1059] Then add 20 μl of diluted ExtrAvidin-Alkaline Phosphotase (1:5,000 dilution) to each well and incubated at 37° C. for 30 min. Wells are washed X3 with PBS(+Ca, Mg)+0.5% BSA. 1 tablet of p-Nitrophenol Phosphate pNPP is dissolved in 5 ml of glycine buffer (pH 10.4). 100 μl of pNPP substrate in glycine buffer is added to each test well. Standard wells in triplicate are prepared from the working dilution of the ExtrAvidin-Alkaline Phosphotase in glycine buffer: 1:5,000 (10⁰)>10^{-0.5}>10⁻¹>10^{-1.5}. 5 μl of each dilution is added to triplicate wells and the resulting AP content in each well is 5.50 ng, 1.74 ng, 0.55 ng, 0.18 ng. 100 μl of pNNP reagent must then be added to each of the standard wells. The plate must be incubated at 37° C. for 4 h. A volume of 50 μl of 3M NaOH is added to all wells. The results are quantified on a plate reader at 405 nm. The background subtraction option is used on blank wells filled with glycine buffer only. The template is set up to indicate the concentration of AP-conjugate in each standard well [5.50 ng; 1.74 ng; 0.55 ng; 0.18 ng]. Results are indicated as amount of bound AP-conjugate in each sample.

[1060] The studies described in this example tested activity of agonists or antagonists of the invention. However, one skilled in the art could easily modify the exemplified studies to test the activity of polynucleotides or polypeptides of the invention (e.g., gene therapy).

### Example 27

### Production of Polypeptide of the Invention for High-Throughput Screening Assays

[1061] The following protocol produces a supernatant containing polypeptide of the present invention to be tested. This supernatant can then be used in the Screening Assays described in Examples 29-37.

[1062] First, dilute Poly-D-Lysine (644 587 Boehringer-Mannheim) stock solution (1 mg/ml in PBS) 1:20 in PBS (w/o calcium or magnesium 17-516F Biowhittaker) for a working solution of 50 ug/ml. Add 200 ul of this solution to each well (24 well plates) and incubate at RT for 20 minutes. Be sure to distribute the solution over each well (note: a 12-channel pipetter may be used with tips on every other channel). Aspirate off the Poly-D-Lysine solution and rinse with 1 ml PBS (Phosphate Buffered Saline). The PBS should remain in the well until just prior to plating the cells and plates may be poly-lysine coated in advance for up to two weeks.

[1063] Plate 293T cells (do not carry cells past P+20) at 2×10⁵ cells/well in 0.5 ml DMEM (Dulbecco's Modified Eagle Medium)(with 4.5 G/L glucose and L-glutamine (12-604F Biowhittaker))/10% heat inactivated FBS(14-503F Biowhittaker)/1× Penstrep(17-602E Biowhittaker). Let the cells grow overnight.

[1064] The next day, mix together in a sterile solution basin: 300 ul Lipofectamine (18324-012 Gibco/BRL) and 5 ml Optimem I (31985070 Gibco/BRL)/96-well plate. With a small volume multi-channel pipetter, aliquot approximately 2 ug of an expression vector containing a polynucleotide insert, produced by the methods described in Examples 8-10, into an appropriately labeled 96-well round bottom plate. With a multi-channel pipetter, add 50 ul of the Lipofectamine/Optimem I mixture to each well. Pipette up and down gently to mix. Incubate at RT 15-45 minutes. After about 20 minutes, use a multi-channel pipetter to add 150 ul Optimem I to each well. As a control, one plate of vector DNA lacking an insert should be transfected with each set of transfections.

[1065] Preferably, the transfection should be performed by tag-teaming the following tasks. By tag-teaming, hands on time is cut in half, and the cells do not spend too much time on PBS. First, person A aspirates off the media from four 24-well plates of cells, and then person B rinses each well with 0.5-1 ml PBS. Person A then aspirates off PBS rinse, and person B, using a 12-channel pipetter with tips on every other channel, adds the 200 ul of DNA/Lipofectamine/Optimem I complex to the odd wells first, then to the even wells, to each row on the 24-well plates. Incubate at 37 degree C. for 6 hours.

[1066] While cells are incubating, prepare appropriate media, either 1% BSA in DMEM with 1× penstrep, or HGS CHO-5 media (116.6 mg/L of CaCl₂ (anhyd); 0.00130 mg/L CuSO₄-5H₂O; 0.050 mg/L of Fe(NO₃)₃-9H₂O; 0.417 mg/L of FeSO₄.7H₂O; 311.80 mg/L of Kcl; 28.64 mg/L of MgCl₂; 48.84 mg/L of MgSO₄; 6995.50 mg/L of NaCl; 2400.0 mg/L of NaHCO₃; 62.50 mg/L of NaH₂PO₄—H₂O; 71.02 mg/L of Na₂HPO4; 0.4320 mg/L of ZnSO₄.7H20; 0.002 mg/L of Arachidonic Acid; 1.022 mg/L of Cholesterol; 0.070 mg/L of DL-alpha-Tocopherol-Acetate; 0.0520 mg/mL of Linoleic Acid; 0.010 mg/L of Linolenic Acid; 0.010 mg/L of Myristic Acid; 0.010 mg/L of Oleic Acid; 0.010 mg/L of Palmitric Acid; 0.010 mg/L of Palmitic Acid; 100 mg/L of Pluronic F-68; 0.010 mg/L of Stearic Acid; 2.20 mg/L of Tween 80; 4551 mg/L of D-Glucose; 130.85 mg/ml of L-Alanine; 147.50 mg/ml of L-Arginine-HCL; 7.50 mg/ml of L-Asparagine-H₂O; 6.65 mg/ml of L-Aspartic Acid; 29.56 mg/ml of L-Cystine-2HCL-H₂O; 31.29 mg/ml of L-Cystine-2HCL; 7.35 mg/ml of L-Glutamic Acid; 365.0 mg/ml of L-Glutamine; 18.75 mg/ml of Glycine; 52.48 mg/ml of L-Histidine-HCL-H₂O; 106.97 mg/ml of L-Isoleucine; 111.45 mg/ml of L-Leucine; 163.75 mg/ml of L-Lysine HCL; 32.34 mg/ml of L-Methionine; 68.48 mg/ml of L-Phenylalainine; 40.0 mg/ml of L-Proline; 26.25 mg/ml of L-Serine; 101.05 mg/ml of L-Threonine; 19.22 mg/ml of L-Tryptophan; 91.79 mg/ml of L-Tryrosine-2Na-2H₂O; and 99.65 mg/ml of L-Valine; 0.0035 mg/L of Biotin; 3.24 mg/L of D-Ca Pantothenate; 11.78 mg/L of Choline Chloride; 4.65 mg/L of Folic Acid; 15.60 mg/L of i-Inositol; 3.02 mg/L of Niacinamide; 3.00 mg/L of Pyridoxal HCL; 0.031 mg/L of Pyridoxine HCL; 0.319 mg/L of Riboflavin; 3.17 mg/L of Thiamine HCL; 0.365 mg/L of Thymidine; 0.680 mg/L of Vitamin B12; 25 mM of HEPES Buffer; 2.39 mg/L of Na Hypoxanthine; 0.105 mg/L of Lipoic Acid; 0.081 mg/L of Sodium Putrescine-2HCL; 55.0 mg/L of Sodium Pyruvate; 0.0067 mg/L of Sodium Selenite; 20 uM of Ethanolamine; 0.122 mg/L of Ferric Citrate; 41.70 mg/L of Methyl-B-Cyclodextrin complexed with Linoleic Acid; 33.33 mg/L of Methyl-B-Cyclodextrin complexed with Oleic Acid; 10 mg/L of Methyl-B-Cyclodextrin complexed with Retinal Acetate. Adjust osmolarity to 327 mOsm) with 2 mm glutamine and 1× penstrep. (BSA (81-068-3 Bayer) 100 gm dissolved in 1L DMEM for a 10% BSA stock solution). Filter the media and collect 50 ul for endotoxin assay in 15 ml polystyrene conical.

[1067] The transfection reaction is terminated, preferably by tag-teaming, at the end of the incubation period. Person A aspirates off the transfection media, while person B adds 1.5 ml appropriate media to each well. Incubate at 37 degree C. for 45 or 72 hours depending on the media used: 1% BSA for 45 hours or CHO-5 for 72 hours.

[1068] On day four, using a 300 ul multichannel pipetter, aliquot 600 ul in one 1 ml deep well plate and the remaining supernatant into a 2 ml deep well. The supernatants from each well can then be used in the assays described in Examples 29-35.

[1069] It is specifically understood that when activity is obtained in any of the assays described below using a supernatant, the activity originates from either the polypeptide of the present invention directly (e.g., as a secreted protein) or by polypeptide of the present invention inducing expression of other proteins, which are then secreted into the supernatant. Thus, the invention further provides a method of identifying the protein in the supernatant characterized by an activity in a particular assay.

### Example 28

### Construction of GAS Reporter Construct

[1070] One signal transduction pathway involved in the differentiation and proliferation of cells is called the Jaks-STATs pathway. Activated proteins in the Jaks-STATs pathway bind to gamma activation site “GAS” elements or interferon-sensitive responsive element (“ISRE”), located in the promoter of many genes. The binding of a protein to these elements alter the expression of the associated gene.

[1071] GAS and ISRE elements are recognized by a class of transcription factors called Signal Transducers and Activators of Transcription, or “STATs.” There are six members of the STATs family. Stat1 and Stat3 are present in many cell types, as is Stat2 (as response to IFN-alpha is widespread). Stat4 is more restricted and is not in many cell types though it has been found in T helper class I, cells after treatment with IL-12. Stat5 was originally called mammary growth factor, but has been found at higher concentrations in other cells including myeloid cells. It can be activated in tissue culture cells by many cytokines.

[1072] The STATs are activated to translocate from the cytoplasm to the nucleus upon tyrosine phosphorylation by a set of kinases known as the Janus Kinase (“Jaks”) family. Jaks represent a distinct family of soluble tyrosine kinases and include Tyk2, Jak1, Jak2, and Jak3. These kinases display significant sequence similarity and are generally catalytically inactive in resting cells.

[1073] The Jaks are activated by a wide range of receptors summarized in the Table below. (Adapted from review by Schidler and Darnell, Ann. Rev. Biochem. 64:621-51 (1995)). A cytokine receptor family, capable of activating Jaks, is divided into two groups: (a) Class 1 includes receptors for IL-2, IL-3, L4, IL-6, IL-7, IL-9, IL-11, IL-12, IL-15, Epo, PRL, GH, G-CSF, GM-CSF, LIF, CNTF, and thrombopoietin; and (b) Class 2 includes IFN-a, IFN-g, and IL-10. The Class 1 receptors share a conserved cysteine motif (a set of four conserved cysteines and one tryptophan) and a WSXWS motif (a membrane proximal region encoding Trp-Ser-Xaa-Trp-Ser (SEQ ID NO: 2)).

[1074] Thus, on binding of a ligand to a receptor, Jaks are activated, which in turn activate STATs, which then translocate and bind to GAS elements. This entire process is encompassed in the Jaks-STATs signal transduction pathway. Therefore, activation of the Jaks-STATs pathway, reflected by the binding of the GAS or the ISRE element, can be used to indicate proteins involved in the proliferation and differentiation of cells. For example, growth factors and cytokines are known to activate the Jaks-STATs pathway (See Table below). Thus, by using GAS elements linked to reporter molecules, activators of the Jaks-STATs pathway can be identified.

| | JAKs | | | | | |
|---|---|---|---|---|---|---|
| Ligand | tyk2 | Jak1 | Jak2 | Jak3 | STATS | GAS (elements) or ISRE |
| IFN family | | | | | | |
| IFN-a/B | + | + | − | − | 1, 2, 3 | ISRE |
| IFN-g | | + | + | − | 1 | GAS (IRF1 > Lys6 > IFP) |
| Il-10 | + | ? | ? | − | 1, 3 | |
| gp130 family | | | | | | |
| IL-6 (Pleiotropic) | + | + | + | ? | 1, 3 | GAS (IRF1 > Lys6 > IFP) |
| Il-11 (Pleiotropic) | ? | + | ? | ? | 1, 3 | |
| OnM (Pleiotropic) | ? | + | + | ? | 1, 3 | |
| LIF (Pleiotropic) | ? | + | + | ? | 1, 3 | |
| CNTF (Pleiotropic) | −/+ | + | + | ? | 1, 3 | |
| G-CSF (Pleiotropic) | ? | + | ? | ? | 1, 3 | |
| IL-12 (Pleiotropic) | + | − | + | + | 1, 3 | |
| g-C family | | | | | | |
| IL-2 (lymphocytes) | − | + | − | + | 1, 3, 5 | GAS |
| IL-4 (lymph/myeloid) | − | + | − | + | 6 | GAS (IRF1 = IFP >> Ly6)(IgH) |
| IL-7 (lymphocytes) | − | + | − | + | 5 | GAS |
| IL-9 (lymphocytes) | − | + | − | + | 5 | GAS |
| IL-13 (lymphocyte) | − | + | ? | ? | 6 | GAS |
| IL-15 | ? | + | ? | + | 5 | GAS |
| gp140 family | | | | | | |
| IL-3 (myeloid) | − | − | + | − | 5 | GAS (IRF1 > IFP >> Ly6) |
| IL-5 (myeloid) | − | − | + | − | 5 | GAS |
| GM-CSF (myeloid) | − | − | + | − | 5 | GAS |
| Growth hormone family | | | | | | |
| GH | ? | − | + | − | 5 | |
| PRL | ? | +/− | + | − | 1, 3, 5 | |
| EPO | ? | − | + | − | 5 | GAS(B- |
| | | | | | | CAS > IRF1 = IFP >> Ly6) |
| Receptor Tyrosine Kinases | | | | | | |
| EGF | ? | + | + | − | 1, 3 | GAS (IRF1) |
| PDGF | ? | + | + | − | 1, 3 | |
| CSF-1 | ? | + | + | − | 1, 3 | GAS (not IRF1) |

[1075] To construct a synthetic GAS containing promoter element, which is used in the Biological Assays described in Examples 29-30, a PCR based strategy is employed to generate a GAS-SV40 promoter sequence. The 5′ primer contains four tandem copies of the GAS binding site found in the IRF1 promoter and previously demonstrated to bind STATs upon induction with a range of cytolines (Rothman et al., Immunity 1:457-468 (1994).), although other GAS or ISRE elements can be used instead. The 5′ primer also contains 18 bp of sequence complementary to the SV40 early promoter sequence and is flanked with an XhoI site. The sequence of the 5′ primer is:

| | |
|---|---|
| 5′:GCGCCTCGAGATTTCCCCGAAATCTAGATTTCCCCGAAATGATTTCCCCGAA | (SEQ ID NO: 3) |
| ATGATTTCCCCGAAATATCTGCCATCTCAATTAG:3′ | |

[1076] The downstream primer is complementary to the SV40 promoter and is flanked with a Hind III site:

| | |
|---|---|
| 5′:GCGGCAAGCTTTTTGCAAAGCCTAGGC:3′ | (SEQ ID NO: 4) |

[1077] PCR amplification is performed using the SV40 promoter template present in the B-gal:promoter plasmid obtained from Clontech. The resulting PCR fragment is digested with XhoI/Hind III and subcloned into BLSK2-. (Stratagene.) Sequencing with forward and reverse primers confirms that the insert contains the following sequence:

| | |
|---|---|
| 5′:CTCGAGATTTCCCCGAAATCTAGATTTCCCCGAAATGATTTCCCCGAAATGA | (SEQ ID NO: 5) |
| TTTCCCCGAAATATCTGCCATCTCAATTAGTCAGCAACCATAGTCCCGCCCCTAACTCC | |
| GCCCATCCCGCCCCTAACTCCGCCCAGTTCCGCCCATTCTCCGCCCCATGGCTGACTAA | |
| TTTTTTTTATTTATGCAGAGGCCGAGGCCGCCTCGGCCTCTGAGCTATTCCAGAAGTAG | |
| TGAGGAGGCTTTTTTGGAGGCCTAGGCTTTTGCAAAAAGCTT:3′ | |

[1078] With this GAS promoter element linked to the SV40 promoter, a GAS:SEAP2 reporter construct is next engineered. Here, the reporter molecule is a secreted alkaline phosphatase, or “SEAP.” Clearly, however, any reporter molecule can be instead of SEAP, in this or in any of the other Examples. Well known reporter molecules that can be used instead of SEAP include chloramphenicol acetyltransferase (CAT), luciferase, alkaline phosphatase, B-galactosidase, green fluorescent protein (GFP), or any protein detectable by an antibody.

[1079] The above sequence confirmed synthetic GAS-SV40 promoter element is subcloned into the pSEAP-Promoter vector obtained from Clontech using HindIII and XhoI, effectively replacing the SV40 promoter with the amplified GAS:SV40 promoter element, to create the GAS-SEAP vector. However, this vector does not contain a neomycin resistance gene, and therefore, is not preferred for mammalian expression systems.

[1080] Thus, in order to generate mammalian stable cell lines expressing the GAS-SEAP reporter, the GAS-SEAP cassette is removed from the GAS-SEAP vector using SalI and NotI, and inserted into a backbone vector containing the neomycin resistance gene, such as pGFP-1 (Clontech), using these restriction sites in the multiple cloning site, to create the GAS-SEAP/Neo vector. Once this vector is transfected into mammalian cells, this vector can then be used as a reporter molecule for GAS binding as described in Examples 29-30.

[1081] Other constructs can be made using the above description and replacing GAS with a different promoter sequence. For example, construction of reporter molecules containing EGR and NF-KB promoter sequences are described in Example 31. However, many other promoters can be substituted using the protocols described in these Examples. For instance, SRE, IL-2, NFAT, or Osteocalcin promoters can be substituted, alone or in combination (e.g., GAS/NF-KB/EGR, GASNF-KB, II-2/NFAT, or NF-KB/GAS). Similarly, other cell lines can be used to test reporter construct activity, such as HELA (epithelial), HUVEC (endothelial), Reh (B-cell), Saos-2 (osteoblast), HUVAC (aortic), or Cardiomyocyte.

### Example 29

### High-Throughput Screening Assay for T-Cell Activity

[1082] The following protocol is used to assess T-cell activity by identifying factors, and determining whether supernate containing a polypeptide of the invention proliferates and/or differentiates T-cells. T-cell activity is assessed using the GAS/SEAP/Neo construct produced in Example 28. Thus, factors that increase SEAP activity indicate the ability to activate the Jaks-STATS signal transduction pathway. The T-cell used in this assay is Jurkat T-cells (ATCC Accession No. TIB-152), although Molt-3 cells (ATCC Accession No. CRL-1552) and Molt-4 cells (ATCC Accession No. CRL-1582) cells can also be used.

[1083] Jurkat T-cells are lymphoblastic CD4+ Th1 helper cells. In order to generate stable cell lines, approximately 2 million Jurkat cells are transfected with the GAS-SEAP/neo vector using DMRIE-C (Life Technologies)(transfection procedure described below). The transfected cells are seeded to a density of approximately 20,000 cells per well and transfectants resistant to 1 mg/ml genticin selected. Resistant colonies are expanded and then tested for their response to increasing concentrations of interferon gamma. The dose response of a selected clone is demonstrated.

[1084] Specifically, the following protocol will yield sufficient cells for 75 wells containing 200 ul of cells. Thus, it is either scaled up, or performed in multiple to generate sufficient cells for multiple 96 well plates. Jurkat cells are maintained in RPMI+10% serum with 1% Pen-Strep. Combine 2.5 mils of OPTI-MEM (Life Technologies) with 10 ug of plasmid DNA in a T25 flask. Add 2.5 ml OPTI-MEM containing 50 ul of DMRIE-C and incubate at room temperature for 1545 mins.

[1085] During the incubation period, count cell concentration, spin down the required number of cells (10⁷ per transfection), and resuspend in OPTI-MEM to a final concentration of 10⁷ cells/ml. Then add 1 ml of 1×10⁷ cells in OPTI-MEM to T25 flask and incubate at 37 degree C. for 6 hrs. After the incubation, add 10 ml of RPMI+15% serum.

[1086] The Jurkat:GAS-SEAP stable reporter lines are maintained in RPMI+10% serum, 1 mg/ml Genticin, and 1% Pen-Strep. These cells are treated with supernatants containing polypeptide of the present invention or polypeptide of the present invention induced polypeptides as produced by the protocol described in Example 27.

[1087] On the day of treatment with the supernatant, the cells should be washed and resuspended in fresh RPMI+10% serum to a density of 500,000 cells per ml. The exact number of cells required will depend on the number of supernatants being screened. For one 96 well plate, approximately 10 million cells (for 10 plates, 100 million cells) are required.

[1088] Transfer the cells to a triangular reservoir boat, in order to dispense the cells into a 96 well dish, using a 12 channel pipette. Using a 12 channel pipette, transfer 200 ul of cells into each well (therefore adding 100,000 cells per well).

[1089] After all the plates have been seeded, 50 ul of the supernatants are transferred directly from the 96 well plate containing the supernatants into each well using a 12 channel pipette. In addition, a dose of exogenous interferon gamma (0.1, 1.0, 10 ng) is added to wells H9, H10, and H11 to serve as additional positive controls for the assay.

[1090] The 96 well dishes containing Jurkat cells treated with supernatants are placed in an incubator for 48 hrs (note: this time is variable between 48-72 hrs). 35 ul samples from each well are then transferred to an opaque 96 well plate using a 12 channel pipette. The opaque plates should be covered (using sellophene covers) and stored at −20 degree C. until SEAP assays are performed according to Example 32. The plates containing the remaining treated cells are placed at 4 degree C. and serve as a source of material for repeating the assay on a specific well if desired.

[1091] As a positive control, 100 Unit/ml interferon gamma can be used which is known to activate Jurkat T cells. Over 30 fold induction is typically observed in the positive control wells.

[1092] The above protocol may be used in the generation of both transient, as well as, stable transfected cells, which would be apparent to those of skill in the art.

### Example 30

### High-Throughput Screening Assay Identifying Myeloid Activity

[1093] The following protocol is used to assess myeloid activity of polypeptide of the present invention by determining whether polypeptide of the present invention proliferates and/or differentiates myeloid cells. Myeloid cell activity is assessed using the GAS/SEAP/Neo construct produced in Example 28. Thus, factors that increase SEAP activity indicate the ability to activate the Jaks-STATS signal transduction pathway. The myeloid cell used in this assay is U937, a pre-monocyte cell line, although TF-1, HL60, or KG1 can be used.

[1094] To transiently transfect U937 cells with the GAS/SEAP/Neo construct produced in Example 28, a DEAE-Dextran method (Kharbanda et. al., 1994, Cell Growth & Differentiation, 5:259-265) is used. First, harvest 2×10⁷ U937 cells and wash with PBS. The U937 cells are usually grown in RPMI 1640 medium containing 10% heat-inactivated fetal bovine serum (FBS) supplemented with 100 units/ml penicillin and 100 mg/ml streptomycin.

[1095] Next, suspend the cells in 1 ml of 20 mM Tris-HCl (pH 7.4) buffer containing 0.5 mg/ml DEAE-Dextran, 8 ug GAS-SEAP2 plasmid DNA, 140 mM NaCl, 5 mM KCl, 375 uM Na₂HPO₄.7H₂O, 1 mM MgCl2, and 675 uM CaCl₂. Incubate at 37 degrees C. for 45 min.

[1096] Wash the cells with RPMI 1640 medium containing 10% FBS and then resuspend in 10 ml complete medium and incubate at 37 degree C. for 36 hr.

[1097] The GAS-SEAP/U937 stable cells are obtained by growing the cells in 400 ug/ml G418. The G418-free medium is used for routine growth but every one to two months, the cells should be re-grown in 400 ug/ml G418 for couple of passages.

[1098] These cells are tested by harvesting 1×10⁸ cells (this is enough for ten 96-well plates assay) and wash with PBS. Suspend the cells in 200 ml above described growth medium, with a final density of 5×10⁵ cells/ml. Plate 200 ul cells per well in the 96-well plate (or 1×10⁵ cells/well).

[1099] Add 50 ul of the supernatant prepared by the protocol described in Example 27. Incubate at 37 degee C for 48 to 72 hr. As a positive control, 100 Unit/ml interferon gamma can be used which is known to activate U937 cells. Over 30 fold induction is typically observed in the positive control wells. SEAP assay the supernatant according to the protocol described in Example 32.

### Example 31

### High-Throughput Screening Assay for T-cell Activity

[1100] NF-KB (Nuclear Factor KB) is a transcription factor activated by a wide variety of agents including the inflammatory cytokines IL-1 and TNF, CD30 and CD40, lymphotoxin-alpha and lymphotoxin-beta, by exposure to LPS or thrombin, and by expression of certain viral gene products. As a transcription factor, NF-KB regulates the expression of genes involved in immune cell activation, control of apoptosis (NF-KB appears to shield cells from apoptosis), B and T-cell development, anti-viral and antimicrobial responses, and multiple stress responses.

[1101] In non-stimulated conditions, NF-KB is retained in the cytoplasm with I-KB (Inhibitor KB). However, upon stimulation, I-KB is phosphorylated and degraded, causing NP-KB to shuttle to the nucleus, thereby activating transcription of target genes. Target genes activated by NF-KB include IL-2, IL6, GM-CSF, ICAM-1 and class 1 MHC.

[1102] Due to its central role and ability to respond to a range of stimuli, reporter constructs utilizing the NF-KB promoter element are used to screen the supernatants produced in Example 27. Activators or inhibitors of NF-KB would be useful in detecting, preventing, diagnosing, prognosticating, treating, and/or ameliorating diseases. For example, inhibitors of NF-KB could be used to treat those diseases related to the acute or chronic activation of NF-KB, such as rheumatoid arthritis.

[1103] To construct a vector containing the NF-KB promoter element, a PCR based strategy is employed. The upstream primer contains four tandem copies of the NF-KB binding site (GGGGACTTTCCC) (SEQ ID NO: 8), 18 bp of sequence complementary to the 5′ end of the SV40 early promoter sequence, and is flanked with an XhoI site:

| | |
|---|---|
| 5′:GCGGCCTCGAGGGGACTTTCCCGGGGACTTTCCGGGGACTTTCCGGGACTTT | (SEQ ID NO: 9) |
| CCATCCTGCCATCTCAATTAG:3′ | |

[1104] The downstream primer is complementary to the 3′ end of the SV40 promoter and is flanked with a Hind III site:

| | |
|---|---|
| 5′:GCGGCAAGCTTTTTGCAAAGCCTAGGC:3′ | (SEQ ID NO: 4) |

[1105] PCR amplification is performed using the SV40 promoter template present in the pB-gal:promoter plasmid obtained from Clontech. The resulting PCR fragment is digested with XhoI and Hind III and subcloned into BLSK2-. (Stratagene) Sequencing with the T7 and T3 primers confirms the insert contains the following sequence:

| | |
|---|---|
| 5′:CTCGAGGGGACTTTCCCGGGGACTTTCCGGGGACTTTCCGGGACTTTCCATC | (SEQ ID NO: 10) |
| TGCCATCTCAATTAGTCAGCAACCATAGTCCCGCCCCTAACTCCGCCCATCCCGCCCCT | |
| AACTCCGCCCAGTTCCGCCCATTCTCCGCCCCATGGCTGACTAATTTTTTTTATTTATG | |
| CAGAGGCCGAGGCCGCCTCGGCCTCTGAGCTATTCCAGAAGTAGTGAGGAGGCTTTT | |
| TGGAGGCCTAGGCTTTTGCAAAAAGCTT:3′ | |

[1106] Next, replace the SV40 minimal promoter element present in the pSEAP2-promoter plasmid (Clontech) with this NF-KB/SV40 fragment using XhoI and HindIII. However, this vector does not contain a neomycin resistance gene, and therefore, is not preferred for mammalian expression systems.

[1107] In order to generate stable mammalian cell lines, the NF-KB/SV40/SEAP cassette is removed from the above NF-KB/SEAP vector using restriction enzymes SalI and NotI, and inserted into a vector containing neomycin resistance. Particularly, the NF-KB/SV40/SEAP cassette was inserted into pGFP-1 (Clontech), replacing the GFP gene, after restricting pGFP-1 with SalI and NotI.

[1108] Once NF-KB/SV40/SEAP/Neo vector is created, stable Jurkat T-cells are created and maintained according to the protocol described in Example 29. Similarly, the method for assaying supernatants with these stable Jurkat T-cells is also described in Example 29. As a positive control, exogenous TNF alpha (0.1, 1, 10 ng) is added to wells H9, H10, and H11, with a 5-10 fold activation typically observed.

### Example 32

### Assay for SEAP Activity

[1109] As a reporter molecule for the assays described in Examples 29-31, SEAP activity is assayed using the Tropix Phospho-light Kit (Cat BP-400) according to the following general procedure. The Tropix Phospho-light Kit supplies the Dilution, Assay, and Reaction Buffers used below.

[1110] Prime a dispenser with the 2.5× Dilution Buffer and dispense 15 ul of 2.5× dilution buffer into Optiplates containing 35 ul of a supernatant. Seal the plates with a plastic sealer and incubate at 65 degree C for 30 min. Separate the Optiplates to avoid uneven heating.

[1111] Cool the samples to room temperature for 15 minutes. Empty the dispenser and prime with the Assay Buffer. Add 50 ml Assay Buffer and incubate at room temperature 5 min. Empty the dispenser and prime with the Reaction Buffer (see the Table below). Add 50 ul Reaction Buffer and incubate at room temperature for 20 minutes. Since the intensity of the chemiluminescent signal is time dependent, and it takes about 10 minutes to read 5 plates on a luminometer, thus one should treat 5 plates at each time and start the second set 10 minutes later.

[1112] Read the relative light unit in the luminometer. Set H12 as blank, and print the results. An increase in chemiluminescence indicates reporter activity.

Reaction Buffer Formulation:

| # of plates | Rxn buffer diluent (ml) | CSPD (ml) |
|---|---|---|
| 10 | 60 | 3 |
| 11 | 65 | 3.25 |
| 12 | 70 | 3.5 |
| 13 | 75 | 3.75 |
| 14 | 80 | 4 |
| 15 | 85 | 4.25 |
| 16 | 90 | 4.5 |
| 17 | 95 | 4.75 |
| 18 | 100 | 5 |
| 19 | 105 | 5.25 |
| 20 | 110 | 5.5 |
| 21 | 115 | 5.75 |
| 22 | 120 | 6 |
| 23 | 125 | 6.25 |
| 24 | 130 | 6.5 |
| 25 | 135 | 6.75 |
| 26 | 140 | 7 |
| 27 | 145 | 7.25 |
| 28 | 150 | 7.5 |
| 29 | 155 | 7.75 |
| 30 | 160 | 8 |
| 31 | 165 | 8.25 |
| 32 | 170 | 8.5 |
| 33 | 175 | 8.75 |
| 34 | 180 | 9 |
| 35 | 185 | 9.25 |
| 36 | 190 | 9.5 |
| 37 | 195 | 9.75 |
| 38 | 200 | 10 |
| 39 | 205 | 10.25 |
| 40 | 210 | 10.5 |
| 41 | 215 | 10.75 |
| 42 | 220 | 11 |
| 43 | 225 | 11.25 |
| 44 | 230 | 11.5 |
| 45 | 235 | 11.75 |
| 46 | 240 | 12 |
| 47 | 245 | 12.25 |
| 48 | 250 | 12.5 |
| 49 | 255 | 12.75 |
| 50 | 260 | 13 |

### Example 33

### High-Throughput Screening Assay Identifying Changes in Small Molecule Concentration and Membrane Permeability

[1113] Binding of a ligand to a receptor is known to alter intracellular levels of small molecules, such as calcium, potassium, sodium, and pH, as well as alter membrane potential. These alternations can be measured in an assay to identify supernatants which bind to receptors of a particular cell. Although the following protocol describes an assay for calcium, this protocol can easily be modified to detect changes in potassium, sodium, pH, membrane potential, or any other small molecule which is detectable by a fluorescent probe.

[1114] The following assay uses Fluorometric Imaging Plate Reader (“FLIPR”) to measure changes in fluorescent molecules (Molecular Probes) that bind small molecules. Clearly, any fluorescent molecule detecting a small molecule can be used instead of the calcium fluorescent molecule, fluo-4 (Molecular Probes, Inc.; catalog no. F-14202), used here.

[1115] For adherent cells, seed the cells at 10,000 cells/well in a Co-star black 96-well plate with clear bottom. The plate is incubated in a CO₂ incubator for 20 hours. The adherent cells are washed two times in Biotek washer with 200 ul of HBSS (Hank's Balanced Salt Solution) leaving 100 ul of buffer after the final wash.

[1116] A stock solution of 1 mg/ml fluo-4 is made in 10% pluronic acid DMSO. To load the cells with fluo-4, 50 ul of 12 ug/ml fluo-4 is added to each well. The plate is incubated at 37 degrees C in a CO₂ incubator for 60 min. The plate is washed four times in the Biotek washer with HBSS leaving 100 ul of buffer.

[1117] For non-adherent cells, the cells are spun down from culture media. Cells are resuspended to 2-5=10⁶ cells/ml with HBSS in a 50-ml conical tube. 4 ul of 1 mg/ml fluo-4 solution in 10% pluronic acid DMSO is added to each ml of cell suspension. The tube is then placed in a 37 degrees C. water bath for 30-60 min. The cells are washed twice with HBSS, resuspended to 1×10⁶ cells/ml, and dispensed into a microplate, 100 ul/well. The plate is centrifuged at 1000 rpm for 5 min. The plate is then washed once in Denley Cell Wash with 200 ul, followed by an aspiration step to 100 ul final volume.

[1118] For a non-cell based assay, each well contains a fluorescent molecule, such as fluo-4. The supernatant is added to the well, and a change in fluorescence is detected.

[1119] To measure the fluorescence of intracellular calcium, the FLIPR is set for the following parameters: (1) System gain is 300-800 mW; (2) Exposure time is 0.4 second; (3) Camera F/stop is F/2; (4) Excitation is 488 nm; (5) Emission is 530 nm; and (6) Sample addition is 50 ul. Increased emission at 530 nm indicates an extracellular signaling event caused by the a molecule, either polypeptide of the present invention or a molecule induced by polypeptide of the present invention, which has resulted in an increase in the intracellular Ca⁺⁺ concentration.

### Example 34

### High-Throughput Screening Assay Identifying Tyrosine Kinase Activity

[1120] The Protein Tyrosine Kinases (PTK) represent a diverse group of transmembrane and cytoplasmic kinases. Within the Receptor Protein Tyrosine Kinase RPTK) group are receptors for a range of mitogenic and metabolic growth factors including the PDGF, FGF, EGF, NGF, HGF and Insulin receptor subfamilies. In addition there are a large family of RPTKs for which the corresponding ligand is unknown. Ligands for RPTKs include mainly secreted small proteins, but also membrane-bound and extracellular matrix proteins.

[1121] Activation of RPTK by ligands involves ligand-mediated receptor dimerization, resulting in transphosphorylation of the receptor subunits and activation of the cytoplasmic tyrosine kinases. The cytoplasmic tyrosine kinases include receptor associated tyrosine kinases of the src-family (e.g., src, yes, Ick, lyn, fyn) and non-receptor linked and cytosolic protein tyrosine kinases, such as the Jak family, members of which mediate signal transduction triggered by the cytokine superfamily of receptors (e.g., the Interleukins, Interferons, GM-CSF, and Leptin).

[1122] Because of the wide range of known factors capable of stimulating tyrosine kinase activity, identifying whether polypeptide of the present invention or a molecule induced by polypeptide of the present invention is capable of activating tyrosine kinase signal transduction pathways is of interest. Therefore, the following protocol is designed to identify such molecules capable of activating the tyrosine kinase signal transduction pathways.

[1123] Seed target cells (e.g., primary keratinocytes) at a density of approximately 25,000 cells per well in a 96 well Loprodyne Silent Screen Plates purchased from Nalge Nunc (Naperville, Ill.). The plates are sterilized with two 30 minute rinses with 100% ethanol, rinsed with water and dried overnight. Some plates are coated for 2 hr with 100 ml of cell culture grade type I collagen (50 mg/ml), gelatin (2%) or polylysine (50 mg/ml), all of which can be purchased from Sigma Chemicals (St. Louis, Mo.) or 10% Matrigel purchased from Becton Dickinson (Bedford, Mass.), or calf serum, rinsed with PBS and stored at 4 degree C. Cell growth on these plates is assayed by seeding 5,000 cells/well in growth medium and indirect quantitation of cell number through use of alamarBlue as described by the manufacturer Alamar Biosciences, Inc. (Sacramento, Calif.) after 48 hr. Falcon plate covers #3071 from Becton Dickinson (Bedford, Mass.) are used to cover the Loprodyne Silent Screen Plates. Falcon Microtest III cell culture plates can also be used in some proliferation experiments.

[1124] To prepare extracts, A431 cells are seeded onto the nylon membranes of Loprodyne plates (20,000/200 ml/well) and cultured overnight in complete medium. Cells are quiesced by incubation in serum-free basal medium for 24 hr. After 5-20 minutes treatment with EGF (60 ng/ml) or 50 ul of the supernatant produced in Example 27, the medium was removed and 100 ml of extraction buffer ((20 mM HEPES pH 7.5, 0.15 M NaCl, 1% Triton X-100, 0.1% SDS, 2 mM Na3VO4, 2 mM Na4P207 and a cocktail of protease inhibitors (# 1836170) obtained from Boeheringer Mannheim (Indianapolis, Ind.)) is added to each well and the plate is shaken on a rotating shaker for 5 minutes at 4° C. The plate is then placed in a vacuum transfer manifold and the extract filtered through the 0.45 mm membrane bottoms of each well using house vacuum. Extracts are collected in a 96-well catch/assay plate in the bottom of the vacuum manifold and immediately placed on ice. To obtain extracts clarified by centrifugation, the content of each well, after detergent solubilization for 5 minutes, is removed and centrifuged for 15 minutes at 4 degree C. at 16,000×g.

[1125] Test the filtered extracts for levels of tyrosine kinase activity. Although many methods of detecting tyrosine kinase activity are known, one method is described here.

[1126] Generally, the tyrosine kinase activity of a supernatant is evaluated by determining its ability to phosphorylate a tyrosine residue on a specific substrate (a biotinylated peptide). Biotinylated peptides that can be used for this purpose include PSK1 (corresponding to amino acids 6-20 of the cell division kinase cdc2-p34) and PSK2 (corresponding to amino acids 1-17 of gastrin). Both peptides are substrates for a range of tyrosine kinases and are available from Boehringer Mannheim.

[1127] The tyrosine kinase reaction is set up by adding the following components in order. First, add 10 ul of 5 uM Biotinylated Peptide, then 10 ul ATP/Mg₂₊ (5 mM ATP/50 mM MgCl₂), then 10 ul of 5× Assay Buffer (40 mM imidazole hydrochloride, pH7.3, 40 mM beta-glycerophosphate, 1 mM EGTA, 100 mM MgCl₂, 5 mM MnCl₂, 0.5 mg/ml BSA), then 5 ul of Sodium Vanadate (1 mM), and then 5 ul of water. Mix the components gently and preincubate the reaction mix at 30 degree C. for 2 min. Initial the reaction by adding 10 ul of the control enzyme or the filtered supernatant.

[1128] The tyrosine kinase assay reaction is then terminated by adding 10 ul of 120 mm EDTA and place the reactions on ice.

[1129] Tyrosine kinase activity is determined by transferring 50 ul aliquot of reaction mixture to a microtiter plate (MTP) module and incubating at 37 degree C. for 20 min. This allows the streptavidin coated 96 well plate to associate with the biotinylated peptide. Wash the MTP module with 300 ul/well of PBS four times. Next add 75 ul of anti-phospotyrosine antibody conjugated to horse radish peroxidase (anti-P-Tyr-POD(0.5u/ml)) to each well and incubate at 37 degree C. for one hour. Wash the well as above.

[1130] Next add 100 ul of peroxidase substrate solution (Boehringer Mannheim) and incubate at room temperature for at least 5 mins (up to 30 min). Measure the absorbance of the sample at 405 nm by using ELISA reader. The level of bound peroxidase activity is quantitated using an ELISA reader and reflects the level of tyrosine kinase activity.

### Example 35

### High-Throughput Screening Assay Identifying Phosphorylation Activity

[1131] As a potential alternative and/or complement to the assay of protein tyrosine kinase activity described in Example 34, an assay which detects activation (phosphorylation) of major intracellular signal transduction intermediates can also be used. For example, as described below one particular assay can detect tyrosine phosphorylation of the Erk-1 and Erk-2 kinases. However, phosphorylation of other molecules, such as Raf, JNK, p38 MAP, Map kinase kinase (MEK), MEK kinase, Src, Muscle specific kinase (MuSK), IRAK, Tec, and Janus, as well as any other phosphoserine, phosphotyrosine, or phosphothreonine molecule, can be detected by substituting these molecules for Erk-1 or Erk-2 in the following assay.

[1132] Specifically, assay plates are made by coating the wells of a 96-well ELISA plate with 0.1 ml of protein G (1 ug/ml) for 2 hr at room temp, (RT). The plates are then rinsed with PBS and blocked with 3% BSA/PBS for 1 hr at RT. The protein G plates are then treated with 2 commercial monoclonal antibodies (10 ng/well) against Erk-1 and Erk-2 (1 hr at RT) (Santa Cruz Biotechnology). (To detect other molecules, this step can easily be modified by substituting a monoclonal antibody detecting any of the above described molecules.) After 3-5 rinses with PBS, the plates are stored at 4 degree C. until use.

[1133] A431 cells are seeded at 20,000/well in a 96-well Loprodyne filterplate and cultured overnight in growth medium. The cells are then starved for 48 hr in basal medium (DMEM) and then treated with EGF (6 ng/well) or 50 ul of the supernatants obtained in Example 27 for 5-20 minutes. The cells are then solubilized and extracts filtered directly into the assay plate.

[1134] After incubation with the extract for 1 hr at RT, the wells are again rinsed. As a positive control, a commercial preparation of MAP kinase (10 ng/well) is used in place of A431 extract. Plates are then treated with a commercial polyclonal (rabbit) antibody (1 ug/ml) which specifically recognizes the phosphorylated epitope of the Erk-1 and Erk-2 kinases (1 hr at RT). This antibody is biotinylated by standard procedures. The bound polyclonal antibody is then quantitated by successive incubations with Europium-streptavidin and Europium fluorescence enhancing reagent in the Wallac DELFIA instrument (time-resolved fluorescence). An increased fluorescent signal over background indicates a phosphorylation by polypeptide of the present invention or a molecule induced by polypeptide of the present invention.

### Example 36

### Assay for the Stimulation of Bone Marrow CD34+Cell Proliferation

[1135] This assay is based on the ability of human CD34+ to proliferate in the presence of hematopoietic growth factors and evaluates the ability of isolated polypeptides expressed in mammalian cells to stimulate proliferation of CD34+cells.

[1136] It has been previously shown that most mature precursors will respond to only a single signal. More immature precursors require at least two signals to respond. Therefore, to test the effect of polypeptides on hematopoietic activity of a wide range of progenitor cells, the assay contains a given polypeptide in the presence or absence of other hematopoietic growth factors. Isolated cells are cultured for 5 days in the presence of Stem Cell Factor (SCF) in combination with tested sample. SCF alone has a very limited effect on the proliferation of bone marrow (BM) cells, acting in such conditions only as a “survival” factor. However, combined with any factor exhibiting stimulatory effect on these cells (e.g., IL-3), SCF will cause a synergistic effect. Therefore, if the tested polypeptide has a stimulatory effect on hematopoietic progenitors, such activity can be easily detected. Since normal BM cells have a low level of cycling cells, it is likely that any inhibitory effect of a given polypeptide, or agonists or antagonists thereof, might not be detected. Accordingly, assays for an inhibitory effect on progenitors is preferably tested in cells that are first subjected to in vitro stimulation with SCF+IL+3, and then contacted with the compound that is being evaluated for inhibition of such induced proliferation.

[1137] Briefly, CD34+cells are isolated using methods known in the art. The cells are thawed and resuspended in medium (QBSF 60 serum-free medium with 1% L-glutamine (500 ml) Quality Biological, Inc., Gaithersburg, Md. Cat# 160-204-101). After several gentle centrifugation steps at 200×g, cells are allowed to rest for one hour. The cell count is adjusted to 2.5×10⁵ cells/ml. During this time, 100 μl of sterile water is added to the peripheral wells of a 96-well plate. The cytokines that can be tested with a given polypeptide in this assay is rhSCF (R&D Systems, Minneapolis, Minn., Cat# 255-SC) at 50 ng/ml alone and in combination with rhSCF and rhIL-3 (R&D Systems, Minneapolis, Minn., Cat# 203-ML) at 30 ng/ml. After one hour, 10 μl of prepared cytokines, 50 μl of the supernatants prepared in Example 27 (supernatants at 1:2 dilution=50 μl) and 20 μl of diluted cells are added to the media which is already present in the wells to allow for a final total volume of 100 μl. The plates are then placed in a 37° C./5% CO₂ incubator for five days.

[1138] Eighteen hours before the assay is harvested, 0.5 μCi/well of [3H] Thymidine is added in a 10 μl volume to each well to determine the proliferation rate. The experiment is terminated by harvesting the cells from each 96-well plate to a filtermat using the Tomtec Harvester 96. After harvesting, the filtermats are dried, trimmed and placed into OmniFilter assemblies consisting of one OmniFilter plate and one OmniFilter Tray. 60 μl Microscint is added to each well and the plate sealed with TopSeal-A press-on sealing film A bar code 15 sticker is affixed to the first plate for counting. The sealed plates are then loaded and the level of radioactivity determined via the Packard Top Count and the printed data collected for analysis. The level of radioactivity reflects the amount of cell proliferation.

[1139] The studies described in this example test the activity of a given polypeptide to stimulate bone marrow CD34+cell proliferation. One skilled in the art could easily modify the exemplified studies to test the activity of polynucleotides (e.g., gene therapy), antibodies, agonists, and/or antagonists and fragments and variants thereof. As a nonlimiting example, potential antagonists tested in this assay would be expected to inhibit cell proliferation in the presence of cytokines and/or to increase the inhibition of cell proliferation in the presence of cytokines and a given polypeptide. In contrast, potential agonists tested in this assay would be expected to enhance cell proliferation and/or to decrease the inhibition of cell proliferation in the presence of cytokines and a given polypeptide.

[1140] The ability of a gene to stimulate the proliferation of bone marrow CD34+cells indicates that polynucleotides and polypeptides corresponding to the gene are useful for the detection, prevention, diagnosis, prognostication, treatment, and/or amelioration of disorders affecting the immune system and hematopoiesis. Representative uses are described in the “Immune Activity” and “Infectious Disease” sections above, and elsewhere herein.

### Example 37

### Assay for Extracellular Matrix Enhanced Cell Response (EMECR)

[1141] The objective of the Extracellular Matrix Enhanced Cell Response (EMECR) assay is to identify gene products (e.g., isolated polypeptides) that act on the hematopoietic stem cells in the context of the extracellular matrix (ECM) induced signal.

[1142] Cells respond to the regulatory factors in the context of signal(s) received from the surrounding microenvironment. For example, fibroblasts, and endothelial and epithelial stem cells fail to replicate in the absence of signals from the ECM. Hematopoietic stem cells can undergo self-renewal in the bone marrow, but not in in vitro suspension culture. The ability of stem cells to undergo self-renewal in vitro is dependent upon their interaction with the stromal cells and the ECM protein fibronectin (fn). Adhesion of cells to fn is mediated by the α₅.β₁ and α₄.β₁ integrin receptors, which are expressed by human and mouse hematopoietic stem cells. The factor(s) which integrate with the ECM environment and are responsible for stimulating stem cell self-renewal have a not yet been identified. Discovery of such factors should be of great interest in gene therapy and bone marrow transplant applications

[1143] Briefly, polystyrene, non tissue culture treated, 96-well plates are coated with fn fragment at a coating concentration of 0.2 μg/cm². Mouse bone marrow cells are plated (1,000 cells/well) in 0.2 ml of serum-free medium. Cells cultured in the presence of IL-3 (5 ng/ml)+SCF (50 ng/ml) would serve as the positive control, conditions under which little self-renewal but pronounced differentiation of the stem cells is to be expected. Gene products of the invention (e.g., including, but not limited to, polynucleotides and polypeptides of the present invention, and supernatants produced in Example 27), are tested with appropriate negative controls in the presence and absence of SCF(5.0 ng/ml), where test factor supernatants represent 10% of the total assay volume. The plated cells are then allowed to grow by incubating in a low oxygen environment (5% CO₂, 7% O₂, and 88% N₂) tissue culture incubator for 7 days. The number of proliferating cells within the wells is then quantitated by measuring thymidine incorporation into cellular DNA. Verification of the positive hits in the assay will require phenotypic characterization of the cells, which can be accomplished by scaling up of the culture system and using appropriate antibody reagents against cell surface antigens and FACScan.

[1144] One skilled in the art could easily modify the exemplified studies to test the activity of polynucleotides (e.g., gene therapy), antibodies, agonists, and/or antagonists and fragments and variants thereof.

[1145] If a particular polypeptide of the present invention is found to be a stimulator of hematopoietic progenitors, polynucleotides and polypeptides corresponding to the gene encoding said polypeptide may be useful for the detection, prevention, diagnosis, prognostication, treatment, and/or amelioration of disorders affecting the immune system and hematopoiesis. Representative uses are described in the “Immune Activity” and “Infectious Disease” sections above, and elsewhere herein. The gene product may also be useful in the expansion of stem cells and committed progenitors of various blood lineages, and in the differentiation and/or proliferation of various cell types.

[1146] Additionally, the polynucleotides and/or polypeptides of the gene of interest and/or agonists and/or antagonists thereof, may also be employed to inhibit the proliferation and differentiation of hematopoietic cells and therefore may be employed to protect bone marrow stem cells from chemotherapeutic agents during chemotherapy. This antiproliferative effect may allow administration of higher doses of chemotherapeutic agents and, therefore, more effective chemotherapeutic treatment.

[1147] Moreover, polynucleotides and polypeptides corresponding to the gene of interest may also be useful for the detection, prevention, diagnosis, prognostication, treat, and/or amelioration of hematopoietic and hematologic related disorders such as, for example, anemia, pancytopenia, leukopenia, thrombocytopenia or leukemia since stromal cells are important in the production of cells of hematopoietic lineages. The uses include bone marrow cell ex-vivo culture, bone marrow transplantation, bone marrow reconstitution, radiotherapy or chemotherapy of neoplasia

### Example 38

### Human Dermal Fibroblast and Aortic Smooth Muscle Cell Proliferation

[1148] The polypeptide of interest is added to cultures of normal human dermal fibroblasts (NHDF) and human aortic smooth muscle cells (AOSMC) and two co-assays are performed with each sample. The first assay examines the effect of the polypeptide of interest on the proliferation of normal human dermal fibroblasts (NHDF) or aortic smooth muscle cells (AoSMC). Aberrant growth of fibroblasts or smooth muscle cells is a part of several pathological processes, including fibrosis, and restenosis. The second assay examines IL6 production by both NHDF and SMC. IL6 production is an indication of functional activation. Activated cells will have increased production of a number of cytokines and other factors, which can result in a proinflammatory or immunomodulatory outcome. Assays are run with and without co-TNFa stimulation, in order to check for costimulatory or inhibitory activity.

[1149] Briefly, on day 1,96-well black plates are set up with 1000 cells/well (NHDF) or 2000 cells/well (AoSMC) in 100 μl culture media. NHDF culture media contains: Clonetics FB basal media, 1 mg/ml hFGF, 5 mg/ml insulin, 50 mg/ml gentamycin, 2% FBS, while AoSMC culture media contains Clonetics SM basal media, 0.5 μg/ml hEGF, 5 mg/ml insulin, 1 μg/ml hFGF, 50 mg/ml gentamycin, 50 μg/ml Amphotericin B, 5% FBS. After incubation at 37° C. for at least 4-5 hours culture media is aspirated and replaced with growth arrest media. Growth arrest media for NHDF contains fibroblast basal media, 50 mg/ml gentamycin, 2% FBS, while growth arrest media for AOSMC contains SM basal media, 50 mg/ml gentamycin, 50 μg/ml Amphotericin B, 0.4% FBS. Incubate at 37° C. until day 2.

[1150] On day 2, serial dilutions and templates of the polypeptide of interest are designed such that they always include media controls and known-protein controls. For both stimulation and inhibition experiments, proteins are diluted in growth arrest media. For inhibition experiments, TNFa is added to a final concentration of 2 ng/ml (NHDF) or 5 ng/ml (AoSMC). Add ⅓ vol media containing controls or polypeptides of the present invention and incubate at 37 degrees C./5% CO₂ until day 5.

[1151] Transfer 60 μl from each well to another labeled 96-well plate, cover with a plate-sealer, and store at 4 degrees C. until Day 6 (for IL6 ELISA). To the remaining 100 μl in the cell culture plate, aseptically add Alamar Blue in an amount equal to 10% of the culture volume (10 μl). Return plates to incubator for 3 to 4 hours. Then measure fluorescence with excitation at 530 nm and emission at 590 nm using the CytoFluor. This yields the growth stimulation/inhibition data.

[1152] On day 5, the IL6 ELISA is performed by coating a 96 well plate with 50-100 ul/well of Anti-Human IL6 Monoclonal antibody diluted in PBS, pH 7.4, incubate ON at room temperature.

[1153] On day 6, empty the plates into the sink and blot on paper towels. Prepare Assay Buffer containing PBS with 4% BSA. Block the plates with 200 μl/well of Pierce Super Block blocking buffer in PBS for 1-2 hr and then wash plates with wash buffer (PBS, 0.05% Tween-20). Blot plates on paper towels. Then add 50 μl/well of diluted Anti-Human IL-6 Monoclonal, Biotin-labeled antibody at 0.50 mg/ml. Make dilutions of IL-6 stock in media (30, 10, 3, 1, 0.3, 0 ng/ml). Add duplicate samples to top row of plate. Cover the plates and incubate for 2 hours at RT on shaker.

[1154] Plates are washed with wash buffer and blotted on paper towels. Dilute EU-labeled Streptavidin 1:1000 in Assay buffer, and add 100 μl/well. Cover the plate and incubate 1 h at RT. Plates are again washed with wash buffer and blotted on paper towels.

[1155] Add 100 μl/well of Enhancement Solution. Shake for 5 minutes. Read the plate on the Wallac DELFIA Fluorometer. Readings from triplicate samples in each assay were tabulated and averaged.

[1156] A positive result in this assay suggests AoSMC cell proliferation and that the polypeptide of the present invention may be involved in dermal fibroblast proliferation and/or smooth muscle cell proliferation. A positive result also suggests many potential uses of polypeptides, polynucleotides, agonists and/or antagonists of the polynucleotide/polypeptide of the present invention which gives a positive result. For example, inflammation and immune responses, wound healing, and angiogenesis, as detailed throughout this specification. Particularly, polypeptides of the present invention and polynucleotides of the present invention may be used in wound healing and dermal regeneration, as well as the promotion of vasculogenesis, both of the blood vessels and lymphatics. The growth of vessels can be used in the treatment of, for example, cardiovascular diseases. Additionally, antagonists of polypeptides and polynucleotides of the invention may be useful in treating diseases, disorders, and/or conditions which involve angiogenesis by acting as an anti-vascular agent (e.g., anti-angiogenesis). These diseases, disorders, and/or conditions are known in the art and/or are described herein, such as, for example, malignancies, solid tumors, benign tumors, for example hemangiomas, acoustic neuromas, neurofibromas, trachomas, and pyogenic granulomas; artheroscleric plaques; ocular angiogenic diseases, for example, diabetic retinopathy, retinopathy of prematurity, macular degeneration, corneal graft rejection, neovascular glaucoma, retrolental fibroplasia, rubeosis, retinoblastoma, uvietis and Pterygia (abnormal blood vessel growth) of the eye; rheumatoid arthritis; psoriasis; delayed wound healing; endometriosis; vasculogenesis; granulations; hypertrophic scars (keloids); nonunion fractures; scleroderima; trachoma; vascular adhesions; myocardial angiogenesis; coronary collaterals; cerebral collaterals; arteriovenous malformations; ischemic limb angiogenesis; Osler-Webber Syndrome; plaque neovascularization; telangiectasia; hemophiliac joints; angiofibroma; fibromuscular dysplasia; wound granulation; Crohn's disease; and atherosclerosis. Moreover, antagonists of polypeptides and polynucleotides of the invention may be useful in treating anti-hyperproliferative diseases and/or anti-inflammatory known in the art and/or described herein.

[1157] One skilled in the art could easily modify the exemplified studies to test the activity of polynucleotides (e.g., gene therapy), antibodies, agonists, and/or antagonists and fragments and variants thereof.

### Example 39

### Cellular Adhesion Molecule (CAM) Expression on Endothelial Cells

[1158] The recruitment of lymphocytes to areas of inflammation and angiogenesis involves specific receptor-ligand interactions between cell surface adhesion molecules (CAMs) on lymphocytes and the vascular endothelium The adhesion process, in both normal and pathological settings, follows a multi-step cascade that involves intercellular adhesion molecule-1 (ICAM-1), vascular cell adhesion molecule-1 (VCAM-1), and endothelial leukocyte adhesion molecule-1 (E-selectin) expression on endothelial cells (EC). The expression of these molecules and others on the vascular endothelium determines the efficiency with which leukocytes may adhere to the local vasculature and extravasate into the local tissue during the development of an inflammatory response. The local concentration of cytokines and growth factor participate in the modulation of the expression of these CAMs.

[1159] Briefly, endothelial cells (e.g., Human Umbilical Vein Endothelial cells (HUVECs)) are grown in a standard 96 well plate to confluence, growth medium is removed from the cells and replaced with 100 μl of 199 Medium (10% fetal bovine serum (FBS)). Samples for testing and positive or negative controls are added to the plate in triplicate (in 10 μl volumes). Plates are then incubated at 37° C. for either 5 h (selectin and integrin expression) or 24 h (integrin expression only). Plates are aspirated to remove medium and 100 μl of 0.1% paraformaldehyde-PBS (with Ca++ and Mg++) is added to each well. Plates are held at 4° C. for 30 min. Fixative is removed from the wells and wells are washed 1× with PBS(+Ca, Mg)+0.5% BSA and drained. 10 μl of diluted primary antibody is added to the test and control wells. Anti-ICAM-1-Biotin, Anti-VCAM-1-Biotin and Anti-E-selectin-Biotin are used at a concentration of 10 μg/ml (1:10 dilution of 0.1 mg/ml stock antibody). Cells are incubated at 37° C. for 30 min. in a humidified environment. Wells are washed three times with PBS(+Ca, Mg)+0.5% BSA. 20 μl of diluted ExtrAvidin-Alkaline Phosphatase (1:5,000 dilution, referred to herein as the working dilution) are added to each well and incubated at 37° C. for 30 min. Wells are washed three times with PBS(+Ca, Mg)+0.5% BSA. Dissolve 1 tablet of p-Nitrophenol Phosphate pNPP per 5 ml of glycine buffer (pH 10.4). 100 μl of pNPP substrate in glycine buffer is added to each test well. Standard wells in triplicate are prepared from the working dilution of the ExtrAvidin-Alkaline Phosphotase in glycine buffer: 1:5,000 (10⁰)>10^{-0.5}>10⁻¹>10^{-1.5} 0.5 μl of each dilution is added to triplicate wells and the resulting AP content in each well is 5.50 ng, 1.74 ng, 0.55 ng, 0.18 ng. 100 μl of pNNP reagent is then added to each of the standard wells. The plate is incubated at 37° C. for 4 h. A volume of 50 μl of 3M NaOH is added to all wells. The plate is read on a plate reader at 405 nm using the background subtraction option on blank wells filled with glycine buffer only. Additionally, the template is set up to indicate the concentration of AP-conjugate in each standard well [5.50 ng; 1.74 ng; 0.55 ng; 0.18 ng]. Results are indicated as amount of bound AP-conjugate in each sample.

### Example 40

### Alamar Blue Endothelial Cells Proliferation Assay

[1160] This assay may be used to quantitatively determine protein mediated inhibition of bFGF-induced proliferation of Bovine Lymphatic Endothelial Cells (LECs), Bovine Aortic Endothelial Cells (BAECs) or Human Microvascular Uterine Myometrial Cells (UTMECs). This assay incorporates a fluorometric growth indicator based on detection of metabolic activity. A standard Alamar Blue Proliferation Assay is prepared in EGM-2MV with 10 ng/ml of bFGF added as a source of endothelial cell stimulation. This assay may be used with a variety of endothelial cells with slight changes in growth medium and cell concentration. Dilutions of the protein batches to be tested are diluted as appropriate. Serum-free medium (GIBCO SFM) without bFGF is used as a non-stimulated control and Angiostatin or TSP-1 are included as a known inhibitory controls.

[1161] Briefly, LEC, BAECs or UTMECs are seeded in growth media at a density of 5000 to 2000 cells/well in a 96 well plate and placed at 37 degreesC overnight After the overnight incubation of the cells, the growth media is removed and replaced with GIBCO EC-SFM. The cells are treated with the appropriate dilutions of the protein of interest or control protein sample(s) (prepared in SFM) in triplicate wells with additional bFGF to a concentration of 10 ng/ml. Once the cells have been treated with the samples, the plate(s) is/are placed back in the 37° C. incubator for three days. After three days 10 ml of stock alarnar blue (Biosource Cat# DAL1100) is added to each well and the plate(s) is/are placed back in the 37° C. incubator for four hours. The plate(s) are then read at 530 nm excitation and 590 nm emission using the CytoFluor fluorescence reader. Direct output is recorded in relative fluorescence units.

[1162] Alamar blue is an oxidation-reduction indicator that both fluoresces and changes color in response to chemical reduction of growth medium resulting from cell growth. As cells grow in culture, innate metabolic activity results in a chemical reduction of the immediate surrounding environment. Reduction related to growth causes the indicator to change from oxidized (non-fluorescent blue) form to reduced (fluorescent red) form (i.e., stimulated proliferation will produce a stronger signal and inhibited proliferation will produce a weaker signal and the total signal is proportional to the total number of cells as well as their metabolic activity). The background level of activity is observed with the starvation medium alone. This is compared to the output observed from the positive control samples (bFGF in growth medium) and protein dilutions.

### Example 41

### Detection of Inhibition of a Mixed Lymphocyte Reaction

[1163] This assay can be used to detect and evaluate inhibition of a Mixed Lymphocyte Reaction (MLR) by gene products (e.g., isolated polypeptides). Inhibition of a MLR may be due to a direct effect on cell proliferation and viability, modulation of costimulatory molecules on interacting cells, modulation of adhesiveness between lymphocytes and accessory cells, or modulation of cytokine production by accessory cells. Multiple cells may be targeted by these polypeptides since the peripheral blood mononuclear fraction used in this assay includes T, B and natural killer lymphocytes, as well as monocytes and dendritic cells.

[1164] Polypeptides of interest found to inhibit the MLR may find application in diseases associated with lymphocyte and monocyte activation or proliferation. These include, but are not limited to, diseases such as asthma, arthritis, diabetes, inflammatory skin conditions, psoriasis, eczema, systemic lupus erythematosus, multiple sclerosis, glomerulonephritis, inflammatory bowel disease, crohn's disease, ulcerative colitis, arteriosclerosis, cirrhosis, graft vs. host disease, host vs. graft disease, hepatitis, leukemia and lymphoma.

[1165] Briefly, PBMCs from human donors are purified by density gradient centrifugation using Lymphocyte Separation Medium (LSM®, density 1.0770 g/ml, Organon Teknika Corporation, West Chester, Pa.). PBMCs from two donors are adjusted to 2×10⁶ cells/ml in RPMI-1640 (Life Technologies, Grand Island, N.Y.) supplemented with 10% FCS and 2 mM glutamine. PBMCs from a third donor is adjusted to 2×10⁵ cells/ml. Fifty microliters of PBMCs from each donor is added to wells of a 96-well round bottom microtiter plate. Dilutions of test materials (50 μl) is added in triplicate to microtiter wells. Test samples (of the protein of interest) are added for final dilution of 1:4; rhuIL-2 (R&D Systems, Minneapolis, Minn., catalog number 202-IL) is added to a final concentration of 1 μg/ml; anti-CD4 mAb (R&D Systems, clone 34930.11, catalog number MAB379) is added to a final concentration of 10 μg/ml. Cells are cultured for 7-8 days at 37° C. in 5% CO₂, and 1 μC of [³H] thymidine is added to wells for the last 16 hrs of culture. Cells are harvested and thymidine incorporation determined using a Packard TopCount. Data is expressed as the mean and standard deviation of triplicate determinations.

[1166] Samples of the protein of interest are screened in separate experiments and compared to the negative control treatment, anti-CD4 mAb, which inhibits proliferation of lymphocytes and the positive control treatment, IL-2 (either as recombinant material or supernatant), which enhances proliferation of lymphocytes.

[1167] One skilled in the art could easily modify the exemplified studies to test the activity of polynucleotides (e.g., gene therapy), antibodies, agonists, and/or antagonists and fragments and variants thereof.

### Example 42

### Assays for Protease Activity

[1168] The following assay may be used to assess protease activity of the polypeptides of the invention.

[1169] Gelatin and casein zymography are performed essentially as described (Heusen et al., Anal. Biochem., 102:196-202 (1980); Wilson et al., Journal of Urology, 149:653-658 (1993)). Samples are run on 10% polyacryamide/0.1% SDS gels containing 1% gelain orcasein, soaked in 2.5% triton at room temperature for 1 hour, and in 0.1M glycine, pH 8.3 at 37° C. 5 to 16 hours. After staining in amido black areas of proteolysis apear as clear areas agains the blue-black background. Trypsin (Sigma T8642) is used as a positive control.

[1170] Protease activity is also determined by monitoring the cleavage of n-a-benzoyl-L-arginine ethyl ester (BABE) (Sigma B-4500. Reactions are set up in (25 mMNaPO₄, 1 mM EDTA, and 1 mM BAEE), pH 7.5. Samples are added and the change in adsorbance at 260 nm is monitored on the Beckman DU-6 spectrophotometer in the time-drive mode. Trypsin is used as a positive control.

[1171] Additional assays based upon the release of acid-soluble peptides from casein or hemoglobin measured as adsorbance at 280 nm or colorimetrically using the Folin method are performed as described in Bergmeyer, et al., Methods of Enzymatic Analysis, 5 (1984). Other assays involve the solubilization of chromogenic substrates (Ward, Applied Science, 251-317 (1983)).

### Example 43

### Identifying Serine Protease Substrate Specificity

[1172] Methods known in the art or described herein may be used to determine the substrate specificity of the polypeptides of the present invention having serine protease activity. A preferred method of determining substrate specificity is by the use of positional scanning synthetic combinatorial libraries as described in GB 2 324 529 (incorporated herein in its entirety).

### Example 44

### Ligand Binding Assays

[1173] The following assay may be used to assess ligand binding activity of the polypeptides of the invention.

[1174] Ligand binding assays provide a direct method for ascertaining receptor pharmacology and are adaptable to a high throughput format. The purified ligand for a polypeptide is radiolabeled to high specific activity (50-2000 Ci/mmol) for binding studies. A determination is then made that the process of radiolabeling does not diminish the activity of the ligand towards its polypeptide. Assay conditions for buffers, ions, pH and other modulators such as nucleotides are optimized to establish a workable signal to noise ratio for both membrane and whole cell polypeptide sources. For these assays, specific polypeptide binding is defined as total associated radioactivity minus the radioactivity measured in the presence of an excess of unlabeled competing ligand. Where possible, more than one competing ligand is used to define residual nonspecific binding.

### Example 45

### Functional Assay in Xenopus Oocytes

[1175] Capped RNA transcripts from linearized plasmid templates encoding the polypeptides of the invention are synthesized in vitro with RNA polymerases in accordance with standard procedures. In vitro transcripts are suspended in water at a final concentration of 0.2 mg/ml. Ovarian lobes are removed from adult female toads, Stage V defolliculated oocytes are obtained, and RNA transcripts (10 ng/oocytc) are injected in a 50 nl bolus using a microinjection apparatus. Two electrode voltage clamps are used to measure the currents from individual Xenopus oocytes in response polypeptides and polypeptide agonist exposure. Recordings are made in Ca2+ free Barth's medium at room temperature. The Xenopus system can be used to screen known ligands and tissue/cell extracts for activating ligands.

### Example 46

### Microphysiometric Assays

[1176] Activation of a wide variety of secondary messenger systems results in extrusion of small amounts of acid from a cell. The acid formed is largely as a result of the increased metabolic activity required to fuel the intracellular signaling process. The pH changes in the media surrounding the cell are very small but are detectable by the CYTOSENSOR microphysiometer (Molecular Devices Ltd., Menlo Park, Calif.). The CYTOSENSOR is thus capable of detecting the activation of polypeptide which is coupled to an energy utilizing intracellular signaling pathway.

### Example 47

### Extract/Cell Supernatant Screening

[1177] A large number of mammalian receptors exist for which there remains, as yet, no cognate activating ligand (agonist). Thus, active ligands for these receptors may not be included within the ligands banks as identified to date. Accordingly, the polypeptides of the invention can also be functionally screened (using calcium, cAMP, microphysiometer, oocyte electrophysiology, etc., functional screens) against tissue extracts to identify its natural ligands. Extracts that produce positive functional responses can be sequentially subfractionated until an activating ligand is isolated and identified.

### Example 48

### Calcium and cAMP Functional Assays

[1178] Seven transmembrane receptors which are expressed in HEK 293 cells have been shown to be coupled functionally to activation of PLC and calcium mobilization and/or cAMP stimulation or inhibition. Basal calcium levels in the HEK 293 cells in receptor-transfected or vector control cells were observed to be in the normal, 100 nM to 200 nM, range. HEK 293 cells expressing recombinant receptors are loaded with fura 2 and in a single day >150 selected ligands or tissue/cell extracts are evaluated for agonist induced calcium mobilization. Similarly, HEK 293 cells expressing recombinant receptors are evaluated for the stimulation or inhibition of cAMP production using standard cAMP quantitation assays. Agonists presenting a calcium transient or cAMP fluctuation are tested in vector control cells to determine if the response is unique to the transfected cells expressing receptor.

### Example 49

### ATP-Binding Assay

[1179] The following assay may be used to assess ATP-binding activity of polypeptides of the invention.

[1180] ATP-binding activity of the polypeptides of the invention may be detected using the ATP-binding assay described in U.S. Pat. No. 5,858,719, which is herein incorporated by reference in its entirety. Briefly, ATP-binding to polypeptides of the invention is measured via photoaffinity labeling with 8-azido-ATP in a competition assay. Reaction mixtures containing 1 mg/ml of the ABC transport protein of the present invention are incubated with varying concentrations of ATP, or the non-hydrolyzable ATP analog adenyl-5′-imidodiphosphate for 10 minutes at 4° C. A mixture of 8-azido-ATP (Sigma Chem. Corp., St. Louis, Mo.) plus 8-azido-ATP (³²P-ATP) (5 mCi/μmol, ICN, Irvine Calif.) is added to a final concentration of 100 μM and 0.5 ml aliquots are placed in the wells of a porcelain spot plate on ice. The plate is irradiated using a short wave 254 nm UV lamp at a distance of 2.5 cm from the plate for two one-minute intervals with a one-minute cooling interval in between. The reaction is stopped by addition of dithiothreitol to a final concentration of 2 mM. The incubations are subjected to SDS-PAGE electrophoresis, dried, and autoradiographed. Protein bands corresponding to the particular polypeptides of the invention are excised, and the radioactivity quantified. A decrease in radioactivity with increasing ATP or adenly-5′-imidodiphosphate provides a measure of ATP affinity to the polypeptides.

### Example 50

### Small Molecule Screening

[1181] This invention is particularly useful for screening therapeutic compounds by using the polypeptides of the invention, or binding fragments thereof, in any of a variety of drug screening techniques. The polypeptide or fragment employed in such a test may be affixed to a solid support, expressed on a cell surface, free in solution, or located intracellularly. One method of drug screening utilizes eukaryotic or prokaryotic host cells which are stably transformed with recombinant nucleic acids expressing the polypeptide or fragment. Drugs are screened against such transformed cells in competitive binding assays. One may measure, for example, the formulation of complexes between the agent being tested and polypeptide of the invention.

[1182] Thus, the present invention provides methods of screening for drugs or any other agents which affect activities mediated by the polypeptides of the invention. These methods comprise contacting such an agent with a polypeptide of the invention or fragment thereof and assaying for the presence of a complex between the agent and the polypeptide or fragment thereof, by methods well known in the art. In such a competitive binding assay, the agents to screen are typically labeled. Following incubation, free agent is separated from that present in bound form, and the amount of free or uncomplexed label is a measure of the ability of a particular agent to bind to the polypeptides of the invention.

[1183] Another technique for drug screening provides high throughput screening for compounds having suitable binding affinity to the polypeptides of the invention, and is described in great detail in European Patent Application 84/03564, published on Sep. 13, 1984, which is herein incorporated by reference in its entirety. Briefly stated, large numbers of different small molecule test compounds are synthesized on a solid substrate, such as plastic pins or some other surface. The test compounds are reacted with polypeptides of the invention and washed. Bound polypeptides are then detected by methods well known in the art. Purified polypeptides are coated directly onto plates for use in the aforementioned drug screening techniques. In addition, non-neutralizing antibodies may be used to capture the peptide and immobilize it on the solid support.

[1184] This invention also contemplates the use of competitive drug screening assays in which neutralizing antibodies capable of binding polypeptides of the invention specifically compete with a test compound for binding to the polypeptides or fragments thereof. In this manner, the antibodies are used to detect the presence of any peptide which shares one or more antigenic epitopes with a polypeptide of the invention.

### Example 51

### Phosphorylation Assay

[1185] In order to assay for phosphorylation activity of the polypeptides of the invention, a phosphorylation assay as described in U.S. Pat. No. 5,958,405 (which is herein incorporated by reference) is utilized. Briefly, phosphorylation activity may be measured by phosphorylation of a protein substrate using gamma-labeled ³²P-ATP and quantitation of the incorporated radioactivity using a gamma radioisotope counter. The polypeptides of the invention are incubated with the protein substrate, ³²P-ATP, and a kinase buffer. The ³²P incorporated into the substrate is then separated from free ³²P-ATP by electrophoresis, and the incorporated ³²P is counted and compared to a negative control. Radioactivity counts above the negative control are indicative of phosphorylation activity of the polypeptides of the invention.

### Example 52

### Detection of Phosphorylation Activity (Activation) of the Polypeptides of the Invention in the Presence of Polypeptide Ligands

[1186] Methods known in the art or described herein may be used to determine the phosphorylation activity of the polypeptides of the invention. A preferred method of determining phosphorylation activity is by the use of the tyrosine phosphorylation assay as described in U.S. Pat. No. 5,817,471 (incorporated herein by reference).

### Example 53

### Identification of Signal Transduction Proteins that Interact with Polypeptides of the Present Invention

[1187] The purified polypeptides of the invention are research tools for the identification, characterization and purification of additional signal transduction pathway proteins or receptor proteins. Briefly, labeled polypeptides of the invention are useful as reagents for the purification of molecules with which it interacts. In one embodiment of affinity purification, polypeptides of the invention are covalently coupled to a chromatography column. Cell-free extract derived from putative target cells, such as carcinoma tissues, is passed over the column, and molecules with appropriate affinity bind to the polypeptides of the invention. The protein complex is recovered from the column, dissociated, and the recovered molecule subjected to N-terminal protein sequencing. This amino acid sequence is then used to identify the captured molecule or to design degenerate oligonucleotide probes for cloning the relevant gene from an appropriate cDNA library.

### Example 54

### IL-6 Bioassay

[1188] To test the proliferative effects of the polypeptides of the invention, the IL-6 Bioassay as described by Marz et al. is utilized (Proc. Natl. Acad. Sci., U.S.A., 95:3251-56 (1998), which is herein incorporated by reference). Briefly, IL-6 dependent B9 murine cells are washed three times in IL-6 free medium and plated at a concentration of 5,000 cells per well in 50 μl, and 50 μl of the IL-6-like polypeptide is added. After 68 hrs. at 37° C., the number of viable cells is measured by adding the tetrazolium salt thiazolyl blue (MTT) and incubating for a further 4 hrs. at 37° C. B9 cells are lysed by SDS and optical density is measured at 570 nm. Controls containing IL-6 (positive) and no cytokine (negative) are utilized. Enhanced proliferation in the test sample(s) relative to the negative control is indicative of proliferative effects mediated by polypeptides of the invention.

### Example 55

### Assay for Phosphatase Activity

[1189] The following assay may be used to assess serine/threonine phosphatase (PTPase) activity of the polypeptides of the invention.

[1190] In order to assay for serine/threonine phosphatase (PTPase) activity, assays can be utilized which are widely known to those skilled in the art. For example, the serine/threonine phosphatase (PSPase) activity is measured using a PSPase assay kit from New England Biolabs, Inc. Myelin basic protein (MyBP), a substrate for PSPase, is phosphorylated on serine and threonine residues with cAMP-dependent Protein Kinase in the presence of [³²P]ATP. Protein serine/threonine phosphatase activity is then determined by measuring the release of inorganic phosphate from 32P-labeled MyBP.

### Example 56

### Interaction of Serine/Threonine Phosphatases with Other Proteins

[1191] The polypeptides of the invention with serine/threonine phosphatase activity as determined in Example 58 are research tools for the identification, characterization and purification of additional interacting proteins or receptor proteins, or other signal transduction pathway proteins. Briefly, labeled polypeptide(s) of the invention is useful as a reagent for the purification of molecules with which it interacts. In one embodiment of affinity purification, polypeptide of the invention is covalently coupled to a chromatography column. Cell-free extract derived from putative target cells, such as neural or liver cells, is passed over the column, and molecules with appropriate affinity bind to the polypeptides of the invention. The polypeptides of the invention-complex is recovered from the column, dissociated, and the recovered molecule subjected to N-terminal protein sequencing. This amino acid sequence is then used to identify the captured molecule or to design degenerate oligonucleotide probes for cloning the relevant gene from an appropriate cDNA library.

### Example 57

### Assaying for Heparanase Activity

[1192] In order to assay for heparanase activity of the polypeptides of the invention, the heparanase assay described by Vlodavsky et al is utilized (Vlodavsky, I., et al., Nat. Med., 5:793-802 (1999)). Briefly, cell lysates, conditioned media or intact cells (1×10⁶ cells per 35-mm dish) are incubated for 18 hrs at 37° C., pH 6.2-6.6, with ³⁵S-labeled ECM or soluble ECM derived peak I proteoglycans. The incubation medium is centrifuged and the supernatant is analyzed by gel filtration on a Sepharose CL-6B column (0.9×30 cm). Fractions are eluted with PBS and their radioactivity is measured. Degradation fragments of heparan sulfate side chains are eluted from Sepharose 6B at 0.5<Kₐᵥ<0.8 (peak II). Each experiment is done at least three times. Degradation fragments corresponding to “peak II,” as described by Vlodavsky et al., is indicative of the activity of the polypeptides of the invention in cleaving heparan sulfate.

### Example 58

### Immobilization of Biomolecules

[1193] This example provides a method for the stabilization of polypeptides of the invention in non-host cell lipid bilayer constucts (see, e.g., Bieri et al., Nature Biotech 17:1105-1108 (1999), hereby incorporated by reference in its entirety herein) which can be adapted for the study of polypeptides of the invention in the various functional assays described above. Briefly, carbohydrate-specific chemistry for biotinylation is used to confine a biotin tag to the extracellular domain of the polypeptides of the invention, thus allowing uniform orientation upon immobilization. A 50 uM solution of polypeptides of the invention in washed membranes is incubated with 20 mM NaIO4 and 1.5 mg/ml (4 mM) BACH or 2 mg/ml (7.5 mM) biotin-hydrazide for 1 hr at room temperature (reaction volume, 150 ul). Then the sample is dialyzed (Pierce Slidealizer Cassett, 10 kDa cutoff; Pierce Chemical Co., Rockford Ill.) at 4 C first for 5 h, exchanging the buffer after each hour, and finally for 12 h against 500 ml buffer R (0.15 M NaCl, 1 mM MgC12, 10 mM sodium phosphate, pH7). Just before addition into a cuvette, the sample is diluted 1:5 in buffer ROG50 (Buffer R supplemented with 50 mM octylglucoside).

### Example 59

### TAQMAN

[1194] Quantitative PCR (QPCR). Total RNA from cells in culture are extracted by Trizol separation as recommended by the supplier (LifeTechnologies). (Total RNA is treated with DNase I (Life Technologies) to remove any contaminating genomic DNA before reverse transcription.) Total RNA (50 ng) is used in a one-step, 50 ul, RT-QPCR, consisting of Taqman Buffer A (Perkin-Elmer; 50 mM KCl/10 mM Tris, pH 8.3), 5.5 mM MgCl₂, 240 μM each dNTP, 0.4 units RNase inhibitor (Promega), 8% glycerol, 0.012% Tween-20, 0.05% gelatin, 0.3 uM primers, 0.1 uM probe, 0.025 units Amplitaq Gold (Perkin-Elmer) and 2.5 units Superscript II reverse transcriptase (Life Technologies). As a control for genomic contamination, parallel reactions are setup without reverse transcriptase. The relative abundance of (unknown) and 18S RNAs are assessed by using the Applied Biosystems Prism 7700 Sequence Detection System (Livak, K. J., Flood, S. J., Marmaro, J., Giusti, W. & Deetz, K. (1995) PCR Methods Appl. 4, 357-362). Reactions are carried out at 48° C. for 30 min, 95° C. for 10 min, followed by 40 cycles of 95° C. for 15 s, 60° C. for 1 min. Reactions are performed in triplicate.

[1195] Primers (f & r) and FRET probes sets are designed using Primer Express Software (Perkin-Elmer). Probes are labeled at the 5′-end with the reporter dye 6-FAM and on the 3′-end with the quencher dye TAMRA (Biosource International, Camarillo, Calif. or Perkin-Elmer).

### Example 60

### Assays for Metalloproteinase Activity

[1196] Metalloproteinases (EC 3.4.24.-) are peptide hydrolases which use metal ions, such as Zn²⁺, as the catalytic mechanism. Metalloproteinase activity of polypeptides of the present invention can be assayed according to the following methods.

Proteolysis of Alpha-2-Macroglobulin

[1197] To confirm protease activity, purified polypeptides of the invention are mixed with the substrate alpha-2-macroglobulin (0.2 unit/ml; Boehringer Mannheim, Germany) in 1× assay buffer (50 mM HEPES, pH 7.5, 0.2 M NaCl, 10 mM CaCl₂, 25 μM ZnCl₂ and 0.05% Brij-35) and incubated at 37° C. for 1-5 days. Trypsin is used as positive control. Negative controls contain only alpha-2-macroglobulin in assay buffer. The samples are collected and boiled in SDS-PAGE sample buffer containing 5% 2-mercaptoethanol for 5-min, then loaded onto 8% SDS-polyacrylamide gel. After electrophoresis the proteins are visualized by silver staining. Proteolysis is evident by the appearance of lower molecular weight bands as compared to the negative control.

Inhibition of Alpha-2-Macroglobulin Proteolysis by Inhibitors of Metalloproteinases

[1198] Known metalloproteinase inhibitors (metal chelators (EDTA, EGTA, AND HgCl₂), peptide metalloproteinase inhibitors (TIMP-1 and TIMP-2), and commercial small molecule MMP inhibitors) are used to characterize the proteolytic activity of polypeptides of the invention. The three synthetic MMP inhibitors used are: MMP inhibitor I, [IC₅₀=1.0 μM against MMP-1 and MMP-8; IC₅₀=30 μM against MMP-9; IC₅₀=150 μM against MMP-3]; MMP-3 (stromelysin-1) inhibitor I [IC₅₀=5 μM against MMP-3], and MMP-3 inhibitor II [Kᵢ=130 nM against MMP-3]; inhibitors available through Calbiochem, catalog # 444250, 444218, and 444225, respectively). Briefly, different concentrations of the small molecule NMP inhibitors are mixed with purified polypeptides of the invention (50 μg/ml) in 22.9 μl of 1×HEPES buffer (50 mM HEPES, pH 7.5, 0.2 M NaCl, 10 mM CaCl₂, 25 μM ZnCl₂ and 0.05% Brij-35) and incubated at room temperature (24° C.) for 2-hr, then 7.1 μl of substrate alpha-2-macroglobulin (0.2 unit/ml) is added and incubated at 37° C. for 20-hr. The reactions are stopped by adding 4× sample buffer and boiled immediately for 5 minutes. After SDS-PAGE, the protein bands are visualized by silver stain.

Synthetic Fluorogenic Peptide Substrates Cleavage Assay

[1199] The substrate specificity for polypeptides of the invention with demonstrated metalloproteinase activity can be determined using synthetic fluorogenic peptide substrates purchased from BACHEM Bioscience Inc). Test substrates include, M-1985, M-2225, M-2105, M-2110, and M-2255. The first four are MMP substrates and the last one is a substrate of tumor necrosis factor-α (TNF-α) converting enzyme (TACE). All the substrates are prepared in 1:1 dimethyl sulfoxide (DMSO) and water. The stock solutions are 50-500 μM. Fluorescent assays are performed by using a Perkin Elmer LS 50B luminescence spectrometer equipped with a constant temperature water bath. The excitation λ is 328 nm and the emission λ is 393 nm. Briefly, the assay is carried out by incubating 176 μl 1×HEPES buffer (0.2 M NaCl, 10 mM CaCl₂, 0.05% Brij-35 and 50 mM HEPES, pH 7.5) with 4 μl of substrate solution (50 μM) at 25° C. for 15 minutes, and then adding 20 μl of a purified polypeptide of the invention into the assay cuvett. The final concentration of substrate is 1 μM. Initial hydrolysis rates are monitored for 30-min.

### Example 61

### Characterization of the cDNA Contained in a Deposited Plasmid

[1200] The size of the cDNA insert contained in a deposited plasmid may be routinely determined using techniques known in the art, such as PCR amplification using synthetic primers hybridizable to the 3′ and 5′ ends of the cDNA sequence. For example, two primers of 17-30 nucleotides derived from each end of the cDNA (i.e., hybridizable to the absolute 5′ nucleotide or the 3′ nucleotide end of the sequence of SEQ ID NO:X, respectively) are synthesized and used to amplify the cDNA using the deposited cDNA plasmid as a template. The polymerase chain reaction is carried out under routine conditions, for instance, in 25 ul of reaction mixture with 0.5 ug of the above cDNA template. A convenient reaction mixture is 1.5-5 mM MgCl₂, 0.01% (w/v) gelatin, 20 uM each of dATP, dCTP, dGTP, dTTP, 25 pmol of each primer and 0.25 Unit of Taq polymerase. Thirty five cycles of PCR (denaturation at 94 degree C. for 1 min; annealing at 55 degree C. for 1 min; elongation at 72 degree C. for 1 min) are performed with a Perkin-Elmer Cetus automated thermal cycler. The amplified product is analyzed by agarose gel electrophoresis. The PCR product is verified to be the selected sequence by subcloning and sequencing the DNA product. It will be clear that the invention may be practiced otherwise than as particularly described in the foregoing description and examples. Numerous modifications and variations of the present invention are possible in light of the above teachings and, therefore, are within the scope of the appended claims.

Incorporation by Reference

[1201] The entire disclosure of each document cited (including patents, patent applications, journal articles, abstracts, laboratory manuals, books, or other disclosures) in the Background of the Invention, Detailed Description, and Examples is hereby incorporated herein by reference. In addition, the sequence listing submitted herewith is incorporated herein by reference in its entirety. The specification and sequence listing of each of the following U.S. and PCr applications are herein incorporated by reference in their entirety (filing dates shown in format “year-month-day” (yyyy-mm-dd)): Application No. 60/278,650 filed on 2001-03-27, application Ser. No. 09/950,082 filed on 2001-09-12, application Ser. No. 09/950,083 filed on 2001-09-12, Application No. 60/306,171 filed on 19-Jul.-2001, application Ser. No. 09/833,245 filed on 2001-04-12, Application No. PCT/US01/11988 filed on 2001-04-12, Application No. 60/331,287 filed on 2001-11-13, Application No. 60/277,340 filed on 2001-03-21, Application No. PCT/US00/06043 filed on 2000-03-09, Application No. PCT/US00/06012 filed on 2000-03-09, Application No. PCT/US00/06058 filed on 2000-03-09, Application No. PCT/US00/06044 filed on 2000-03-09, Application No. PCT/US/00/06059 filed on 2000-03-09, Application No. PCT/US00/06042 filed on 2000-03-09, Application No. PCT/US00/06014 filed on 2000-03-09, Application No. PCT/US00/06013 filed on 2000-03-09, Application No. PCT/US00/06049 filed on 20004-03-09, Application No. PCT/US00/06057 filed on 2000-03-09, Application No. PCT/US00/06824 filed on 2000-03-16, Application No. PCT/US00/06765 filed on 2000-03-16, Application No. PCT/US00/06792 filed on 2000-03-16, Application No. PCT/US00/06830 filed on 2000-03-16, Application No. PCT/US00/06782 filed on 2000-03-16, Application No. PCT/US00/06822 filed on 2000-03-16, Application No. PCT/US00/06791 filed on 2000-03-16, Application No. PCT/US00/06828 filed on 2000-03-16, Application No. PCT/US00/06823 filed on 2000-03-16, Application No. PCT/US00/06781 filed on 2000-03-16, Application No. PCT/US00/07505 filed on 2000-03-22, Application No. PCT/US00/07440 filed on 2000-03-22, Application No. PCT/US00/07506 filed on 2000-03-22, Application No. PCT/US00/07507 filed on 2000-03-22, Application No. PCT/US00/07535 filed on 2000-03-22, Application No. PCT/US00/07525 filed on 2000-03-22, Application No. PCT/US00/07534 filed on 2000-03-22, Application No. PCT/US00/07483 filed on 2000-03-22, Application No. PCT/US00/07526 filed on 2000-03-22, Application No. PCT/US00/07527 filed on 2000-03-22, Application No. PCT/US00/07661 filed on 2000-03-23, Application No. PCT/US00/07579 filed on 2000-03-23, Application No. PCT/US00/07723 filed on 2000-03-23, Application No. PCT/US00/07724 fled on 2000-03-23, Application No. PCT/US00/14929 filed on 2000-06-01, Application No. PCT/US00/07722 filed on 2000-03-23, Application No. PCT/US00/07578 filed on 2000-03-23, Application No. PCT/US00/07726 filed on 2000-03-23, Application No. PCT/US00/07677 filed on 2000-03-23, Application No. PCT/US00/07725 filed on 2000-03-23, Application No. PCT/US00/09070 filed on 2000-04-06, Application No. PCT/US00/08982 filed on 2000-04-06, Application No. PCT/US00/08983 filed on 2000404-06, Application No. PCT/US00/09067 filed on 2000-046, Application No. PCT/US00/09066 filed on 2000404-06, Application No. PCT/US00/09068 filed on 2000-04-06, Application No. PCT/US00/08981 fled on 2000-04-06, Application No. PCT/US00/08980 filed on 2000-04-06, Application No. PCT/US00/09071 fled on 2000-04-06, Application No. PCT/US00/09069 filed on 2000-04-06, Application No. PCT/US00/15136 filed on 2000-06-01, Application No. PCT/US00/14926 filed on 2000-06-01, Application No. PCT/US00/14963 filed on 2000-06-01, Application No. PCT/US00/15135 filed on 2000-06-01, Application No. PCT/US00/14934 filed on 2000-06-01, Application No. PCT/US00/14933 filed on 2000-06-01, Application No. PCT/US00/15137 filed on 2000-04-06, Application No. PCT/US00/14928 filed on 2000-06-01, Application No. PCT/US00/14973 filed on 2000-06-01, Application No. PCT/US00/14964 filed on 2000-06-01, Application No. PCT/US00/26376 filed on 2000-09-26, Application No. PCT/US00/26371 filed on 2000-09-26, Application No. PCT/US00/26324 filed on 2000-09-26, Application No. PCT/US00/26323 filed on 2000-09-26, Application No. PCT/US00/26337 filed on 2000-09-26, Application No. PCT/US01/13318 filed on 2001-04-27, Application No. U.S. 60/124,146 filed on 1999-03-12, Application No. U.S. 60/167,061 filed on 1999-11-23, Application No. U.S. 60/124,093 filed on 1999-03-12, Application No. U.S. 60/166,989 filed on 1999-11-23, Application No. U.S. 60/124,145 filed on 1999-03-12, Application No. U.S. 60/168,654 filed on 1999-12-03, Application No. U.S. 60/124,099 filed on 1999-03-12, Application No. U.S. 60/168,661 filed on 1999-12-03, Application No. U.S. 60/124,096 filed on 1999-03-12, Application No. U.S. 60/168,622 filed on 1999-12-03, Application No. U.S. 60/124,143 filed on 1999-03-12, Application No. U.S. 60/168,663 filed on 1999-12-03, Application No. U.S. 60/124,095 filed on 1999-03-12, Application No. U.S. 60/138,598 filed on 1999-06-11, Application No. U.S. 60/168,665 filed on 1999-12-03, Application No. U.S. 60/125,360 filed on 1999-03-19, Application No. U.S. 60/138,626 filed on 1999-06-11, Application No. U.S. 60/168,662 filed on 1999-12-03, Application No. U.S. 60/124,144 filed on 1999-03-12, Application No. U.S. 60/138,574 filed on 1999-06-11, Application No. U.S. 60/168,667 filed on 1999-12-03, Application No. U.S. 60/124,142 filed on 1999-03-12, Application No. U.S. 60/138,597 filed on 1999-06-11, Application No. U.S. 60/168,666 filed on 1999-12-03, Application No. U.S. 60/125,359 filed on 1999-03-19, Application No. U.S. 60/168,664 filed on 1999-12-03, Application No. U.S. 60/126,051 filed on 1999-03-23, Application No. U.S. 60/169,906 filed on 1999-12-10, Application No. U.S. 60/125,362 filed on 1999-03-19, Application No. U.S. 60/169,980 filed on 1999-12-10, Application No. U.S. 60/125,361 filed on 1999-03-19, Application No. U.S. 60/169,910 filed on 1999-12-10, Application No. U.S. 60/125,812 filed on 1999-03-23, Application No. U.S. 60/169,936 filed on 1999-12-10, Application No. U.S. 60/126,054 filed on 1999-03-23, Application No. U.S. 60/169,916 filed on 1999-12-10, Application No. U.S. 60/125,815 filed on 1999-03-23, Application No. U.S. 60/169,946 filed on 1999-12-10, Application No. U.S. 60/125,358 filed on 1999-03-19, Application No. U.S. 60/169,616 filed on 1999-12-08, Application No. U.S. 60/125,364 filed on 1999-03-19, Application No. U.S. 60/169,623 filed on 1999-12-08, Application No. U.S. 60/125,363 filed on 1999-03-19, Application No. U.S. 60/169,617 filed on 1999-12-08, Application No. U.S. 60/126,502 filed on 1999-03-26, Application No. U.S. 60/172,410 filed on 1999-12-17, Application No. U.S. 60/126,503 filed on 1999-03-26, Application No. U.S. 60/172,409 filed on 1999-12-17, Application No. U.S. 60/126,505 filed on 1999-03-26, Application No. U.S. 60/172,412 filed on 1999-12-17, Application No. U.S. 60/126,594 filed on 1999-03-26, Application No. U.S. 60/172,408 filed on 1999-12-17, Application No. U.S. 60/126,511 filed on 1999-03-26, Application No. U.S. 60/172,413 filed on 1999-12-17, Application No. U.S. 60/126,595 filed on 1999-03-26, Application No. U.S. 60/171,549 filed on 1999-12-22, Application No. U.S. 60/126,598 filed on 1999-03-26, Application No. U.S. 60/171,504 filed on 1999-12-22, Application No. U.S. 60/126,596 filed on 1999-03-26, Application No. U.S. 60/171,552 filed on 1999-12-22, Application No. U.S. 60/126,600 filed on 1999-03-26, Application No. U.S. 60/171,550 filed on 1999-12-22, Application No. U.S. 60/126,501 filed on 1999-03-26, Application No. U.S. 60/171,551 filed on 1999-12-22, Application No. U.S. 60/126,504 filed on 1999-03-26, Application No. U.S. 60/174,847 filed on 2000-01-07, Application No. U.S. 60/126,509 filed on 1999-03-26, Application No. U.S. 60/174,853 filed on 2000-01-07, Application No. U.S. 60/126,506 filed on 1999-03-26, Application No. U.S. 60/174,852 filed on 2000-01-07, Application No. U.S. 60/242,710 filed on 2000-10-25, Application No. U.S. 60/126,510 filed on 1999-03-26, Application No. U.S. 60/174,850 filed on 2000-01-07, Application No. U.S. 60/138,573 filed on 1999-06-11, Application No. U.S. 60/174,851 filed on 2000-01-07, Application No. U.S. 60/126,508 filed on 1999-03-26, Application No. U.S. 60/174,871 filed on 2000-01-07, Application No. U.S. 60/126,507 filed on 1999-03-26, Application No. U.S. 60/174,872 filed on 2000-01-07, Application No. U.S. 60/126,597 filed on 1999-03-26, Application No. U.S. 60/174,877 filed on 2000-01-07, Application No. U.S. 60/126,601 filed on 1999-03-26, Application No. U.S. 60/154,373 filed on 1999-09-17, Application No. U.S. 60/176,064 filed on 2000-01-14, Application No. U.S. 60/126,602 filed on 1999-03-26, Application No. U.S. 60/176,063 filed on 2000-01-14, Application No. U.S. 60/128,695 filed on 1999-04-09, Application No. U.S. 60/176,052 filed on 2000-01-14, Application No. U.S. 60/128,696 filed on 1999-04-09, Application No. U.S. 60/176,069 filed on 2000-01-14, Application No. U.S. 60/128,703 filed on 1999-04-09, Application No. U.S. 60/176,068 filed on 2000-01-14, Application No. U.S. 60/128,697 filed on 199909, Application No. U.S. 60/176,929 filed on 2000-01-20, Application No. U.S. 60/128,698 filed on 199909, Application No. U.S. 60/176,926 filed on 2000-01-20, Application No. U.S. 60/128,699 filed on 1999-04-09, Application No. U.S. 60/177,050 filed on 2000-01-20, Application No. U.S. 60/128,701 filed on 1999-04-09, Application No. U.S. 60/177,166 filed on 2000-01-20, Application No. U.S. 60/128,700 filed on 1999-09, Application No. U.S. 60/176,930 filed on 2000-01-20, Application No. U.S. 60/128,694 filed on 1999-04-09, Application No. U.S. 60/176,931 filed on 2000-01-20, Application No. U.S. 60/128,702 filed on 1999-04-09, Application No. U.S. 60/177,049 filed on 2000-01-20, Application No. U.S. 60/138,629 filed on 1999-06-11, Application No. U.S. 60/138,628 filed on 1999-06-11, Application No. U.S. 60/138,631 filed on 1999-06-11, Application No. U.S. 60/138,632 filed on 1999-06-11, Application No. U.S. 60/138,599 filed on 1999-06-11, Application No. U.S. 60/138,572 filed on 1999-06-11, Application No. U.S. 60/138,625 filed on 1999-06-11, Application No. U.S. 60/138,633 filed on 1999-06-11, Application No. U.S. 60/138,630 filed on 1999-06-11, Application No. U.S. 60/138,627 filed on 1999-06-11, Application No. U.S. 60/155,808 filed on 1999-09-27, Application No. U.S. 60/155,804 filed on 1999-09-27, Application No. U.S. 60/155,807 filed on 1999-09-27, Application No. U.S. 60/155,805 filed on 1999-09-27, Application No. U.S. 60/155,806 filed on 1999-09-27, Application No. U.S. 60/201,194 filed on 2000-05-O₂, and Application No. U.S. 60/212,142 filed on 2000-06-16.

[image]

Europe

[1202] In respect of those designations in which a European Patent is sought a sample of the deposited microorganism will be made available until the publication of the mention of the grant of the European patent or until the date on which the application has been refused or withdrawn or is deemed to be withdrawn, only by the issue of such a sample to an expert nominated by the person requesting the sample (Rule 28(4) EPC).

Canada

[1203] The applicant requests that, until either a Canadian patent has been issued on the basis of an application or the application has been refused, or is abandoned and no longer subject to reinstatement, or is withdrawn, the Commissioner of Patents only authorizes the furnishing of a sample of the deposited biological material referred to in the application to an independent expert nominated by the Commissioner, the applicant must, by a written statement, inform the International Bureau accordingly before completion of technical preparations for publication of the international application.

Norway

[1204] The applicant hereby requests that the application has been laid open to public inspection (by the Norwegian Patent Office), or has been finally decided upon by the Norwegian Patent Office without having been laid open inspection, the furnishing of a sample shall only be effected to an expert in the art. The request to this effect shall be filed by the applicant with the Norwegian Patent Office not later than at the time when the application is made available to the public under Sections 22 and 33(3) of the Norwegian Patents Act. If such a request has been filed by the applicant, any request made by a third party for the furnishing of a sample shall indicate the expert to be used. That expert may be any person entered on the list of recognized experts drawn up by the Norwegian Patent Office or any person approved by the applicant in the individual case.

Australia

[1205] The applicant hereby gives notice that the furnishing of a sample of a microorganism shall only be effected prior to the grant of a patent, or prior to the lapsing, refusal or withdrawal of the application, to a person who is a skilled addressee without an interest in the invention (Regulation 3.25(3) of the Australian Patents Regulations).

Finland

[1206] The applicant hereby requests that, until the application has been laid open to public inspection (by the National Board of Patents and Regulations), or has been finally decided upon by the National Board of Patents and Registration without having been laid open to public inspection, the furnishing of a sample shall only be effected to an expert in the art.

United Kingdom

[1207] The applicant hereby requests that the furnishing of a sample of a microorganism shall only be made available to an expert. The request to this effect must be filed by the applicant with the International Bureau before the completion of the technical preparations for the international publication of the application.

Denmark

[1208] The applicant hereby requests that, until the application has been laid open to public inspection (by the Danish Patent Office), or has been finally decided upon by the Danish Patent office without having been laid open to public inspection, the furnishing of a sample shall only be effected to an expert in the art. The request to this effect shall be filed by the applicant with the Danish Patent Office not later that at the time when the application is made available to the public under Sections 22 and 33(3) of the Danish Patents Act. If such a request has been filed by the applicant, any request made by a third party for the furnishing of a sample shall indicate the expert to be used. That expert may be any person entered on a list of recognized experts drawn up by the Danish Patent Office or any person by the applicant in the individual case.

Sweden

[1209] The applicant hereby requests that, until the application has been laid open to public inspection (by the Swedish Patent Office), or has been finally decided upon by the Swedish Patent Office without having been laid open to public inspection, the furnishing of a sample shall only be effected to an expert in the art. The request to this effect shall be filed by the applicant with the International Bureau before the expiration of 16 months from the priority date (preferably on the Form PCT/RO/134 reproduced in annex Z of Volume I of the PCT Applicant's Guide). If such a request has been filed by the applicant any request made by a third party for the furnishing of a sample shall indicate the expert to be used. That expert may be any person entered on a list of recognized experts drawn up by the Swedish Patent Office or any person approved by a applicant in the individual case.

Netherlands

[1210] The applicant hereby requests that until the date of a grant of a Netherlands patent or until the date on which the application is refused or withdrawn or lapsed, the microorganism shall be made available as provided in the 31F(1) of the Patent Rules only by the issue of a sample to an expert. The request to this effect must be furnished by the applicant with the Netherlands Industrial Property Office before the date on which the application is made available to the public under Section 22C or Section 25 of the Patents Act of the Kingdom of the Netherlands, whichever of the two dates occurs earlier.

LENGTHY TABLE
The patent application contains a lengthy table section. A copy of the table is available in electronic form from the USPTO web site (http://seqdata.uspto.gov/?pageRequest=docDetail&DocID=US20070026454A1) An electronic copy of the table will also be available from the USPTO upon request and payment of the fee set forth in 37 CFR 1.19(b)(3).

The application's sequence listing, which the Patent Office published only in electronic form, follows.

SEQUENCE LISTING (994 sequences)

SEQ ID NO: 1 - DNA, 733 bp, Homo sapiens
gggatccggagcccaaatcttctgacaaaactcacacatgcccaccgtgcccagcacctgaattcgagggtgcaccgtcagtcttcctcttccccccaaaacccaaggacaccctcatgatctcccggactcctgaggtcacatgcgtggtggtggacgtaagccacgaagaccctgaggtcaagttcaactggtacgtggacggcgtggaggtgcataatgccaagacaaagccgcgggaggagcagtacaacagcacgtaccgtgtggtcagcgtcctcaccgtcctgcaccaggactggctgaatggcaaggagtacaagtgcaaggtctccaacaaagccctcccaacccccatcgagaaaaccatctccaaagccaaagggcagccccgagaaccacaggtgtacaccctgcccccatcccgggatgagctgaccaagaaccaggtcagcctgacctgcctggtcaaaggcttctatccaagcgacatcgccgtggagtgggagagcaatgggcagccggagaacaactacaagaccacgcctcccgtgctggactccgacggctccttcttcctctacagcaagctcaccgtggacaagagcaggtggcagcaggggaacgtcttctcatgctccgtgatgcatgaggctctgcacaaccactacacgcagaagagcctctccctgtctccgggtaaatgagtgcgacggccgcgactctagaggat

SEQ ID NO: 2 - protein, 5 aa, Homo sapiens
  Site (3): Xaa equals any amino acid
WSXWS

SEQ ID NO: 3 - DNA, 86 bp, Artificial Sequence
  Primer_Bind: Synthetic sequence with 4 tandem copies of the GAS binding site found in the IRF1 promoter (Rothman et al., Immunity 1:457-468 (1994)), 18 nucleotides complementary to the SV40 early promoter, and a Xho I restriction site.
gcgcctcgagatttccccgaaatctagatttccccgaaatgatttccccgaaatgatttccccgaaatatctgccatctcaattag

SEQ ID NO: 4 - DNA, 27 bp, Artificial Sequence
  Primer_Bind: Synthetic sequence complementary to the SV40 promoter; includes a Hind III restriction site.
gcggcaagctttttgcaaagcctaggc

SEQ ID NO: 5 - DNA, 271 bp, Artificial Sequence
  Protein_Bind: Synthetic promoter for use in biological assays; includes GAS binding sites found in the IRF1 promoter (Rothman et al., Immunity 1:457-468 (1994)).
ctcgagatttccccgaaatctagatttccccgaaatgatttccccgaaatgatttccccgaaatatctgccatctcaattagtcagcaaccatagtcccgcccctaactccgcccatcccgcccctaactccgcccagttccgcccattctccgccccatggctgactaattttttttatttatgcagaggccgaggccgcctcggcctctgagctattccagaagtagtgaggaggcttttttggaggcctaggcttttgcaaaaagctt

SEQ ID NO: 6 - DNA, 32 bp, Artificial Sequence
  Primer_Bind: Synthetic primer complementary to human genomic EGR-1 promoter sequence (Sakamoto et al., Oncogene 6:867-871 (1991)); includes a Xho I restriction site.
gcgctcgagggatgacagcgatagaaccccgg

SEQ ID NO: 7 - DNA, 31 bp, Artificial Sequence
  Primer_Bind: Synthetic primer complementary to human genomic EGR-1 promoter sequence (Sakamoto et al., Oncogene 6:867-871 (1991)); includes a Hind III restriction site.
gcgaagcttcgcgactccccggatccgcctc

SEQ ID NO: 8 - DNA, 12 bp, Homo sapiens
ggggactttccc

SEQ ID NO: 9 - DNA, 73 bp, Artificial Sequence
  Primer_Bind: Synthetic primer with 4 tandem copies of the NF-KB binding site (GGGGACTTTCCC), 18 nucleotides complementary to the 5' end of the SV40 early promoter sequence, and a XhoI restriction site.
gcggcctcgaggggactttcccggggactttccggggactttccgggactttccatcctgccatctcaattag

SEQ ID NO: 10 - DNA, 256 bp, Artificial Sequence
  Protein_Bind: Synthetic promoter for use in biological assays; includes NF-KB binding sites.
ctcgaggggactttcccggggactttccggggactttccgggactttccatctgccatctcaattagtcagcaaccatagtcccgcccctaactccgcccatcccgcccctaactccgcccagttccgcccattctccgccccatggctgactaattttttttatttatgcagaggccgaggccgcctcggcctctgagctattccagaagtagtgaggaggcttttttggaggcctaggcttttgcaaaaagctt

SEQ ID NO: 11 - DNA, 2610 bp, Homo sapiens
gcctgaaggactgcctcgtttcaacaacaactttatggctcccggaagtgcctcctccccgtccccttcctttccagcctcacgcccgtgggctgcagttggaacgatggcggcggcagctgccgccgggcctagcccggggtctggacctggggactccccagaagggcccgagggggaggctccggagcgtcggcggaaggcgcacgggatgctgaagctttactacggcctctcggaaggggaggcggcgggacgccccgcggggcccgaccccctggacccgactgatctgaacggggcgcacttcgacccggaagtttacctagacaagctgcgtagagagtgccctctggcccagttgatggacagtgagacggacatggtgcggcagatccgggctctagacagcgacatgcagaccctggtctatgagaactacaacaagttcatctcagccacagacaccatccggaagatgaagaacgatttccggaagatggaggatgagatggaccggctggccaccaacatggcagtgatcaccgacttcagcgctcgcatcagcgccacgctgcaggaccgccacgagcgcatcaccaagctggcaggggtccacgcgctgctgcggaagctgcagttcctctttgagctgccctcgcgcctcaccaagtgcgtggaactgggcgcctatgggcaggcggtgcgctaccagggccgcgcgcaggccgtgctgcagcagtaccaacacctgccctcgttccgcgccatccaggacgactgccaggtcatcacggcccgcctggcccagcagctgcggcagcgctttagggagggcggctcaggcgccccggagcaggcagagtgcgtggagctgctgctggccctgggcgagcctgcggaggagctgtgcgaggagttctggcgcacgcccgcggccggctggagaaggagctgagaaacctggaggccgagctggggccctcacctccggctcccgacgtgttagagttcaccgaccatggaggcagtggcttcgtgggcggcctctgccaggtggcggcggcctaccaggagctgtttgcggcccagggcccagcaggtgccgagaagctggcggccttcgcccggcagctgggcarccgctattttgcgctggtggagcggcggctggcgcaggagcagggtggtggtgacaactcactgctggtgcgggcgctggaccgyttccaccggcgcttgcgggctcccggggccctgctggccgctgccgggctcgcagacgctgccacggagatcgtggaacgagtggcccgcgagcgcctgggccaccacctgcagggtctccgggcggccttcctgggctgcctgacagacgtccgccaggcgctggcagcacctcgcgtggctgggaaggagggccctggcctggccgagttgctggccaatgtggccagctccatcctgagccacattaaggcctctctggcagcagtgcaccttttcaccgccaaagaggtgtccttctccaacaagccctacttccggggtgagttctgcagtcagggtgtccgtgagggcctcatcgtgggcttcgtccactctatgtgccagacggctcagagcttctgcgacagccctggggagaaggggggtgccacaccacctgccctgctcctgctgctctcccgcctctgcctggactacgagacggccaccatctcctacatcctcactctcactgatgaacagtttctggtgcaggatcagttcccagtgacgcccgtgagcacgctgtgtgcagaggccagggaaacggcgcggcggctgctgacccactacgtgaaggtgcagggcctggtcatatcacagatgctgcgcaagagcgtggagactcgcgactggctcagcactctggagccccggaatgtgcgggccgtcatgaagcgggtggtggaggataccaccgccatcgacgtgcaggtggggctcctgtacgaagagggtgttcgcaaggcccagagcagcgactccagcaagaggactttctccgtgtacagcagctctcggcagcagggccgctacgcccccagctatacccccagtgccccgatggacaccaacctcttgagcaatatccagaagctattctctgaacgtattgatgtgttcagccctgtggagttcaacaaggtgtcggtgctgaccggcatcatcaagatcagcctgaagacgctgctggagtgtgtgcggctgcgcacctttgggcgcttcgggctgcagcaggtgcaagtggactgccactttctgcagctctacctgtggcgttttgtggccgacgaagaactcgtgcacttgctgctggacgaagtggtggcctctgctgccctgcgctgcccagaccctgtgcccatggagcccagtgtggttgaggtcatctgcgagcgcggctaggcgcagccgctgccatgcaccggtctgtccctgcaccccatggcacccaggatctggtctcggtggtccttccccgcaggcaggtgtcaggaccggcctaataaacatgtgtggcctcctcaaaaaaaaaaaaaaaaaaaaaaaaaaaaaaaaaaa

SEQ ID NO: 12 - DNA, 951 bp, Homo sapiens
ggcacgagccaaggtctaccttctctaccggcctggacactacgatatcctctacaaatagggctggctccagcccgctgctgccctgctgcccccctctgccaggcgctagacatgtacagaggtttttctgtggttgtaaatggtcctatttcacccccttcttcctgtcacatgacccccccccatgttttattaaagggggtgctggtggtgagccgtgtgtgcgtgtccctgctctgctgcccgcctggctgctctgtctgctgccccctccccccaggtgggtccccctgcttttcacctatctactcctgagcttccccaacaggagcaggtttgaggggccaggcctcttggaggcccctcctgcttcgttgggttctgcttccttcccttcttagctggctcaggggcttctatgggatcctggaagttccttagggacttgcccagggtcccagggccacccacacttcatctgctccctcataggccccacctccacgtcccggctgggccccagaccccagcttcctgccctccaccgggagtctgcatggttgggagtcctgggtggaggggcctttgtgaggctggacccggctcagggcaggtggaggagctgggcctcccacagggtgcccgggcagtgccatcctggtgggggagggcagccttcaaacgtgtggggtctacagtcctcaggtctaggcagggctgccggttctccacctccccatccgccccaggccccctgcctgtgcctgccttgcaccccctctgcttgggccacggtgtctctgcattgcctgcctttttgccttcacctcttttcttccccgccccctgcacattcggggtctcagcccccaggctgtgagctccttgggggcaggccctcaataaatgtgaactgctgctgccgcaaaaaaaaaaaaaaaaaaaaaa

SEQ ID NO: 13 - DNA, 888 bp, Homo sapiens
ggcacgagctcccgtggcgtgggagctaaagagaggctggtgaattaaggaactttcaggtttacttctcagtgtgtcttctctgttccaaaccacagttgtgaatgggagagttcacatccgcgactggcgagaggagacactgtggaagacaaagcaaccggaagcgaaacagagactgctctctgaagcctgcaaaacccgcctctgctggttcttcatgcatcaccctgatggctgcgctctgtccacggactgctgcccgtttgcccatgggcctgcggactgcggccaccccggaccaccccgaggaagaagatttcatgagctgcatccttgccagccgaggcctggttggggaggccaaaccaaggagagcttccccagcagtcgtcagtgctgtggtctctgctctggctgtgtttcagcccacctcctcccagctttctccacatcctcacagtgatgaaccgtatttcataaacatcacacgccagagaagccacagttactcggaagcccccagctgactgcctggcttgtttcagatgcagccgcttgaaacgtgcgcagcatcttcatatcataaagattgtgcacggatccttacaatgtctcctgggggagagcggctgaggctgccttgcacaggcccttcccagggcgctgtccgacgcctgccccaccatgtccacatctgtgaagaggatggggctcctcgagaagtaagaccgtatctgccagcgtttctcaccacactggagagcagctgctctggagcagggatccaccagattggtatttttaaaaaaggtgtcaggcttgctatgttgaggttgtttttagagttacagagaataaaaacactcataatttcctgaaaaaaaa

SEQ ID NO: 14 - DNA, 3239 bp, Homo sapiens
ggcacgagctgtcttctgcctgcagtgcccaggagcttgtgaagctgctcaacgagctctttgcccgctttgacaagctggcagctaaataccaccagctgcggattaagatcctgggcgactgctactactgcatctgcggcttgcccgactaccgggaggaccacgccgtctgctccatcctcatggggctggccatggtggaggccatctcgtatgtgcgggagaagaccaagactggggtggacatgcgtgtgggggtgcacacgggcaccgtgctggggggcgtcctgggccagaagcgctggcagtacgacgtgtggtcgactgatgtcactgtagccaacaagatggaggccggcggcatccctgggcgcgtgcacatctcccagagcaccatggactgcctgaaagggagtttgatgtggagccaggcgatgggggcagccgctgtgattacctagaagagaagggtattgaaacctacctcatcattgcctccaagccagaggtgaagaaaacagccacccagaatggcctcaatggctcggccctgcccaatggagcaccagcttcctcaaagtccagctcccctgccctcattgagaccaaggagcccaacgggagtgcccacagcagtgggtccacgtcggagaagcccgaggagcaggatgcccaggccgacaacccctcattccccaacccacgccggaggctgcgcctgcaggacctggctgaccgagtggtggatgcctctgaagatgagcacgagctcaaccagctgctcaacgaggccctgcttgagcgagagtccgcccaagtagtaaagaagagaaacaccttcctcttgtccatgcggttcatggaccccgagatggaaacccgctactcggtggagaaggagaagcagagtggggctgccttcagctgctcctgcgtcgtcctgctctgcacggccctggtcgagatactcatcgacccctggctaatgacaaactatgtgaccttcatggtgggggagattctgctcctcatcctgaccatctgctccctggctgccatctttccccgggcctttcctaagaagcttgtggccttctcaacttggattgaccggacccgctgggccaggaacacctgggccatgctcgccatcttcatcctggtgatggcaaatgtcgtggacatgctcagctgtctccagtactacacgggacccagcaatgcaacggcagggatggaaacggagggcagctgcctggagaaccccaagtattacaactatgtggccgtgctgtccctcatcgccaccatcatgctggtgcaggtcagccacatggtgaagctcacgctcatgctgctcgtcgcaggcgccgtggccaccatcaacctctatgcctggcgtcccgtctttgatgaatacgaccacaagcgttttcgggagcacgacttacctatggtggccttagagcagatgcaaggattcaaccctgggctcaatggcactgacaggctgcccctggtgccttccaagtactctatgacggtgatggtgttcctcatgatgctcagcttctactacttctcccgccacgtagaaaaactggcacggacacttttcttgtggaagattgaggtccacgaccagaaggaacgtgtctatgagatgcgacgctggaacgaggccttggtcaccaacatgttgcctgagcacgtggcacgccatttcctggggtccaagaagagagatgaggagctgtatagccagacgtatgatgagattggagtcatgtttgcctccctgcccaactttgctgacttctacacagaggagagcatcaacaatggtggtattgagtgtctgcgtttcctcaatgaaatcatctcagattttgactctctcctggacaatcccaagttccgggtgatcaccaagatcaaaaccattggcagcacgtatatggcggcttcaggagtcacccccgatgtcaacaccaatggctttgccagctccaacaaggaagacaagtccgagagagagcgctggcagcacctggctgacctggccgacttcgcgctggccatgaaggatacgctcaccaacatcaacaaccagtccttcaataacttcatgctgcgcataggcatgaacaaaggcggggttctggctggggtcatcggagcccggaaaccacactacgacatctggggcaatacagtcaatgtagccagcaggatggagtccacgggggtcatgggcaacattcaggtggtagaagaaacccaagtcatcctccgagagtacggcttccgctttgtgaggcgaggccccatctttgtgaaggggaagggggagctgctgaccttcttcttgaaggggcgggataagctagccaccttccccaatggcccctctgtcacactgccccaccaggtggtggacaactcctgaatggcctcgagcctgcaacagtccaaaccggaagggagaatttattttttgaaactgaaggaagtcccgaccttcctggattgaagtgcacactcatggactttaggtttagaaacctcctcagccttcatttgttcgtggatgtgtgagctctgagggtggccctgctattcctgtgtgtgcctgtagtgtccccagcataggggtcttaggcatagggctgaacagtccttccagagccctcgttccaatccctgccgtccttgcccctgaggggccctgaccactgtgagcaggagggtggcagagctgggacaaagctgcctttgccgctgggctttccgggactgtggagggagcacaggcggggaagctccacttcagacagggcttggtggggcaggacatggctcccattttgaagggaggtctccatgtggtccgagtgaggtgagacggccctcgtcctggtgttcctgatcatcttgaaaggttcttctggaactcctgtccccttagtcatgagaacagaaagtgcaatatttcctttcacctggcaggggaggggggatttatttctgaaagaaaaatatataaacagatcttctacatttatatttttaatcttctgttaaatacactttccgatattgccttgccttttgagctcttgctacagtcgcctttgctactgctttaagagaatttacaggtattgataaagaacaagactgttttattaaaagctttattcaacttgaaaaaaaaaaaaaaaaaaaaaaaaaaa

SEQ ID NO: 15 - DNA, 841 bp, Homo sapiens
  misc_feature (23)..(23): n equals a,t,g, or c
  misc_feature (45)..(45): n equals a,t,g, or c
  misc_feature (69)..(69): n equals a,t,g, or c
  misc_feature (84)..(84): n equals a,t,g, or c
  misc_feature (762)..(762): n equals a,t,g, or c
  misc_feature (767)..(767): n equals a,t,g, or c
  misc_feature (782)..(782): n equals a,t,g, or c
  misc_feature (789)..(789): n equals a,t,g, or c
atttttgggaatttggcggttanatttacccggaacggttttccnttgttccgcaagtcgaattacctncctaagggaacaaangtggagttcaccgggttgcggccggttttaaactagtggacccccggggctgcaggaattcggcacgagatcctgacccaagctcaggcacacccaaggcacctgcctctctgagtcttgggtctcagttcctaatatcccgctccttgctgagaccatctcctggggcagggtccttttcttcccaggtcctcagcgctgcctctgctggtgccttctcccccactactactggagcgtgcccttgctggggacgtggctgtgccctcagttgcccccagggctgggtgcccaccatgccccttcctctttctcctcctacctctgccctgtgagcccatccataaggctctcagatgggacattgtgggaaaggctttggccatggtctgggggcagagaacaaggggggagacacaagtagacctcaggtagaacgacactgggcggagccaccccagggcctgctcccagggagtgctcgaggcgcatcaggcccgttttttaccagtttatatcacggtcttcatttttaaaagtaacgctaactttgtagggacgatgtctcatggattaaataatattctttatggcagtaaaaaaaaaaaaaaaaaaaaaaaaaaaaaaaaaaaaactcgagggggggcccggtacccaatkcgccctrkagkgmktcgnattanaattcactggccgtngttttanaaattcgtgaatggggaaaaccctggggttacccaacttaaacgccttgcag

SEQ ID NO: 16 - DNA, 2318 bp, Homo sapiens
ccacgcgtccgcccaaagttctggggtgacaggcgtgagtcactgtgcctggccacttcctggttcttagatgctgtctttttccctgtgtcctcccatagtaaaggggcagacaagctcccctgggtgtcttataaaggcactgatgtcactcacaaggcttctatgcccaataactaatcacctcccaaaagcctcctaataaaaccactttgggggttaggatttcaacataggaattttggggagggacacgaacatttagtccttaacagtgatgtatttatttcccatgttgtaaaggattgggcatggcttattttttgtcacatttgttccttattacatgctaatgatgggaaccctggtgttgatattactacatgatgttattgtcacatttactgagttttataatgctcagaatttaaaatggtgattaatatttttgcaggtaattcatgaatattgtactttttttctgaacccttattcagaaaaggggctctgccaagtggaaaaaaattatttttcatcattaaattttgaggtagtacttttgtgaatgtatggttttaataagtaggactatagacatacagcccccctttttttaacctttacagctggtaggtattttcctattttggttaatattggctttgttgcttgattatagcacactgctttgccgtgtttaactttgagggtgtgttgtgttgttgaacagaaactgaccttttcagatatttcttctttggtgaagatcagacagttgaagttgaagtattcttcccatcaaattatcctgagggaggactacagagccagtttagtgaggattaaaaaggaaaaaaaaaataggtgaacctttgtaaatgccatcctggactctgccaactgcttttccggggaatactgtggtggtctgtggccttgtcacaatcagggatattggtgaaaggcattccctgaactgggggccgacagcaggctgacttttgagcagtcctgccaccactttgattttttatcttcttcctgtgccatgacttttatgcattgtttatccagctccaaccagggggagacccactcgaaagggtcctccagaatgaatggagactttccatgaggagtccctgtcatgacagtgacctggtgtgtgcaagctctccccacttactgatggctggaaggcagtagtgcctgcaggtttgcccttgccgaacagtatgatgtcagtgtgaatcgggaccaggcctcatccaggctttaatcttttttttttttttttttttttttgagactgagcctgggtgacagagtgagactccatctcaaaaaaaaaaaaaaaaaaaaaaagtaaatagctttattgagatagaaatcgagtcacacacttgtgtatccatcaccacaatcaatttcagaatattttcagcaccccaagggaagaagcctttagcgatcgcaatccctccctattctctccttccccaacccccggcaaccactactgtattggactctctgtctccatgggttcacctattccggatatttcatatgagtggaatcatacaacatgtgttcatttcttatccggcttctttcactgaggatgttttcaaggatcatccatgttgcagcacgtgtcggttctttttatggccaaataatatttcattgtatggctagaccacattttcctgattgatgcatcagctgatagacatttgaactggttccaccttttggctagtatgaagaatgctgctgtgaacagtcaggcacacatttttgtgtggccatcggttttcgcttatcttggttctataactagtggtgaaattgctcagtcccatgggaattctgtttgttgagtggacaaggattccacttgtttctaggatttggagtgtgaggaaattgggagaaaaggcacattgttaaaaggtacataaatgtgttctgtgaaggagggctttgttgagctaggtcctaatgataactgctttccattactattttttctttattttctttttagaaggaagagattgttgtgactctcttaccagctggtcactgtccgggatcagttatgtaagggggtcatttattttgtcattttattatatgtagacacatattgtatttgtagaaataaatttttagggtctaaaattaatagggggctgggtgcagtggcacatgtctgtaatcccagtgctttgggaggctgacgcgggaggattgcttgagcttgggagttggaggctgcagtgagtttttttttaaaaaaaaaaaaaaaa

SEQ ID NO: 17 - DNA, 1913 bp, Homo sapiens
  misc_feature (12)..(12): n equals a,t,g, or c
  misc_feature (14)..(14): n equals a,t,g, or c
  misc_feature (398)..(398): n equals a,t,g, or c
ctcgcaagagantntttgtgtttctaatacaggatctggaagtagtgctttctaatcctcatttcctgtaggatgttcctgcactataacaagattatgttttcttccttctgcagcagctttctgcttcttgggtactactagctattgttcaattcaggtgaggcctgtgatgacatatatgtagcatgtgctctgcgctccctgcaagctgagcagatacaaccaatgcatcactgtatactcttgctgagaatgtggatgcagcctcacagatctttgcaacactccaaccagccaggaccagttgatcagaactgatcttattggtctgataaccaatcttatttgtgaactgattcatatctgtctttccactcttggttctcttgccgtangaacaaaaacagtttaggaagcataattacgaacatttaggaaccaatatgtataagtaattcggagactccaattcacctgcccctcccccatcccaggttgtggaggctcgaggaagctgacttcttaggctaaaggacaaaaaaatctctttacctccttggccattttcatgttctctgccaattactataggcagtcttcattttgcagaggtgaggtaagacttcatcttattcttcatgtaatcccaccttctaacaaaaaataaataaatatttaaattccaaggagaagtgttctttgtgtatttctagcagaaaacagatgcttaagcctaagaaggaagatccgtccatgacaaaggaaagtggaaaactgaaccagttatctgaatacttcatgccaggacagttgctattagcaactgttttgcaccttcagggctttaaaatgggctctgcagacagcatttgcatatgcaagactcagtagccaagcctccactgccaattgttgaaggcagtttcagatcgccaccttttgaggtacatttctttaagcacaagagaagtagaaatggcctttgccttgtctccagtggtttgtccctctggtgcctcagcagataccagagcttattcttatgaccatttggaagtagtcctcaaagtaaagatcaagaaaaaattggattctttttccattttctcataatagtagcctagtcaacacaagactcccataaaatatgactcactattgggagccatactattttataagcttacttcctgctgacaaaactagctttcctcaaggaaatataaaggaggggaaagtcacatagtgttaggaaaacattcctgtgttttgaatacgatgaatccataggatagagaaaaatctgcttgttctattctgagagttctctgagatatcccttcactctgcttggcatttggccattgatattcaacaggtcactgaccaagcttttctaaatttttcagagagagttacttaccaataaggtctgttcttaaacctacctagttgattttcatatctttccataaagtgtcatgattctatcatagaccctgacttaacattgtaaggactatgagtcctcccattttttaattaatttttttttagcaaattaggacttcggcaggttttcctctcctaaactcattctttcctccacaggattgctttgtccatctcctgctttcatttcaagtgcataaacaaaacctcaaagggcctgggaaggtgaggcaggccagagtctgtgttctgtgttgagtgtcaagctatttgttaagaaggtctgcaacaggcctttggtgtggctctgccagagactgttctgaacactttgcttgagatccgtgccctgtaaaatggatatgatgttttactgatgtctgtaatacatttgtaaacttccaataaaatttgaataaaaaaaaaaaaaaaaaaaaaaaaaaaaaaaaaaactcgag

SEQ ID NO: 18 - DNA, 330 bp, Homo sapiens
ggcacgagccagcaccagcgtcctagatggccccagcaccagctccaccatccggaccagaaatgctgccagagctggcgccagcttcttctcctggatccagcaccgttgacgaactgcagcgatcttactggccaagccagagcgcctcctctcagattccttctcgacacagcaccctaggcggcttcttcctgtcagtcggaggtggcatgcaagatgaagctctctttgctcttcctgctttcattttgtgcttttccttgtgttttcatgttttgggtatcagtgttacattaaagttgcaaaattaaaaaaaaaaaaaaaaaa

SEQ ID NO: 19 - DNA, 743 bp, Homo sapiens
gattggtcagatttgccttttttcagaatctgaagtcattccgtactgtatgtacacatttgtgtctggcttggctccagataaagtttttgggattcatgaatgttgttgcacgtattaggagagactcctttgtattgctgagtagtattcccctctgtggttagaccatgatttatttatccatctacctgttggtgaacattttggctgtttctaattcttggccatcatgaataaaactgctgtgaatgttcctacaataataattgtctaaacatatgtttttatttcttttgtgtcttagtccgtcgggctgctataactaagaaccacagcctgggtggcttataaacaacagaaatttatttttcatggttctggaggctgggaagtccaagatcaaggtgccagtggattcagtgtctgttgagggcccatgtcttgattcatagatggcggtcttcttgctgtgttctcctagacatggcagaaggggcaagggagctctctggggtctcttttataagggcaccaatcccattcatgcaggctctgccctcatgacctaatcacctccgaggaggcccaaaggccctacctccaagtaccatcatatgagggattaggtttcaaggtatgaacctggggaggacataaacagtcagtctagctttttgggtaaatgaattgctgggcttaataataaatgtatatttaactgtaaaaaaaaaaaaaaaaaa

SEQ ID NO: 20 - DNA, 1592 bp, Homo sapiens
  misc_feature (5)..(5): n equals a,t,g, or c
  misc_feature (805)..(805): n equals a,t,g, or c
  misc_feature (857)..(857): n equals a,t,g, or c
  misc_feature (1587)..(1589): n equals a,t,g, or c
ccccnataacaatgcataagttatagattacataccattcagtgtagcatgatgaaatctcttgccaatctgttccatccacctgggatgtgaatcatccctctctctggtgtattcayactgtatgtgctagccgtctctgttacgagatcagctgtcgtggaatcagtgctagtgttcaggtaactcttatttaataattgcctcaaagtgcattgtgctgtgcctaatttataaaataaacggtatcataggtatgtatgtatacgaaaaacatagtatatgcagggttgggtactatccacagtttcaggcatctactggggggtcttggaatatatccccagaggtaaggggtgactactgtatacagccatgccaacatgctggttctcagagagttataagagagattaaaaatacatgcagctgtttgggcactttcttcccaaataaaatacccagtaaaatgtaacatactacctatagcttgataatctatctgaggatgtttatgatgtctgtctatatactttaatttggccttagcttctttgtaggtatcaagttatcacttgcaaatttattttcaaaaagcatagtttcttgtacattttagaagattagtttttcttattttgggacacctacaccaatgttttaaatgtggataaattttaatgtggaatttcttttaaaaataatcctcttcatagagcaatacaacaaaaatgtgttgtatcttggagatttacattataaatgtagtaacatttatgagcttaaatttaatgaaacctttttntttttttgagacagtcttgcactgtcgcccaggctagagtgcagggcatganctcagctcactgcaacctccgtctcccgggttcaagcaattctcgtgcctcagcctcctcagtaactggcattataggtgtgcaccaccacacctggctaatttwrgtatttwtcataaagacgggggtttcaccatgttggccaggctggtctcaaactcctgacctcaggtgatcagcctccctcggsctcccaaagtgctgggattacaggcatgagccatggtgcctggccaaacgtttttattacaaatattacattaaactaaagctcacaactgttactatgcatcaggaattaacagtcatttctcatttgtgttatycyccwattkgatamcatatagtgactatctctttatgggttaaatatcagtttcttggccagaattcaagatctgcccctaactaatcctacttctcccagtacccttacagcactcctaccctactagtaactctgatatctcatagtcctcagatttatcaagcaaacgaaactgaatgagcactactataaggtaccacaaactacaaaaggagacagttttgcccttgttgctttcagttaaattattgtgctattttttgcttaatttctaggttttttttgcgtgtttatcatgtctccgtaggtaaagtggccagaaatctttttctactttacatttcctgtaagtgctgtttgtttgaataaagttaatgtgtgaggttaaaaaaaaaaaaaagnnnaga

SEQ ID NO: 21 - DNA, 2122 bp, Homo sapiens
ggcacgagggagatcagtgtgaagggcattgccaaagtggaatcagtaaggcttggcagttgaccttgtttgttggagagaagggataagattttaaagctacatgtctgaaagaatgatgctgctgattgaaataaaggaagaaaggatgcatttcgggctccaacctgtcctaggaaggcctagacctcaaacaccaacacctccatgcatttcctctttggctactatgtcttttccctgacttctgcctctccagctctctgggctgctgcttccacctgttcatctgacttagacsctccctgctgggtccttgttcacctactcatttggtgcttcgtctgccatcagtacctccattgcagctggtgggatgtcagtcaccatctcttatatttgcttcccactagaaagatcaagagaagttatttctttcccttgcgctccaatttttctctagacagttggtatccacaattttaaaaaatgttccatgttgtataaacaagcattcgctgagaggggctgttaatacacatcgtgccccttttataaaaattcatgcatggaatcctacattattatgcatcaaaatctccagaaatgtcttaggatttttgcagggagwwtwttaaatgcattgttttgctttgttttgaagagactagatgtgcagaggaagagaggtggcatggtgggagggtacatttgagttgtcaacagtctctgcagtgtcaggtcaattacatcagcacttggactggaccagggaaaggaatgattctgcttcctgggaatgtcagaaggacctgatgattatatttggcaaagccaggaggagtggctttgaatgtcattgctaagaattacactttgagtagcatttctggatgtctgagcttttcaaatgatacttcttttctgctgtggctttcctttctgttggactggttcccagagggtcctcttgtttgtccttgccctcgcttttatatcagttcatgttttctcttctgtcatcttccttcccagcgctgtttctccaccccctcctgctgcactcacaacagcttcccctctcctgtttagaggtggaagcatgtaagaatgcgtttgagggggatgcttgccaaaggacagcatattcaacatctggtatcaacaaggtaatgtttaaccttagactagccaaactagtgatgacctgcttccatgctgcatctgctgctttttgtgttgatgggactcagaaatcatgagaaaggtcttcagtgatccatgactgcaacaaattcttttcctaattgtgccgtatattatgcccctcaatacaacttactaatctctgcctcagtttctccatctgtgaaagtggtgtaatacttatctacctcccttgaatgttgtgaagattagtatatgttggtaaagcacttttaaaataaagaatgatataaagcaaaaaaaaaaaaaaaaaaaactcgagactagttctcctcgtgccgaattcggcacgagtgtcatcgggctcacagctcagagacatctgcatgtgatcatctgcatagtcctctcctctaacgggaaacacctcagatttgcatataaaaaagcaccctggtgctgaaatgaacccctttcttgaacatcaaagctgtctcccacagccttgggcagcagggtgcctcttagtggatgtgctgggtccaccctgagccctgacatgtggtggcagcattgccagttggtctgtgtgtctgtgtagcagggacgatttcccagaaagcaattttccttttgaaatacgtaattgttgagactaggcagtttcaaagtcagctgcatatagtagcaagtacaggactgtcttgtttttggtgtccttggaggtgctggggtgagggtttcagtgggatcatttactctcacatgttgtctgccttctgcttctgtggacactgctttgtacttaattcagacagactgtgaatacaccttttttataaatacctttcaaattcttggtaagatataattttgatagctgattgcagattttctgtatttgtcagattaataaagactgcatgaatccaaaaaaaaaaaaaaaaaactcgag

SEQ ID NO: 22 - DNA, 874 bp, Homo sapiens
ggcacgagtttattagatatattttcactaagaaaagaaagcagagtgaggttgaagctgatctgggctatccaggtggaaaggcgaaagtcatccataaggaatctgatatgatcatggcattttctgttaataaggcaaattgtaatgaaattgttttggcttcaacacatgatgttcaagaacttgatgttacttctctactggcctgtcagtcatacatatggatcggagaagaatatgacagagaatccaaaagttcagatgatgttgattatcgtggttccactacaactctttatcaacccagtgcaacatcctattcagcaagtcaggtgcatccaccttcatctctgccatggctgggcactggacagactagcactggagctagtgtgcttatgaaaaggaatctacataatggtaagagaatgacttcacacccagtccatcaatactatcttacaggtgctcaggacggcagtgtacgtatgtttgaatggacgcggcctcagcaacttgtctgctttcgtcaagctggcaatgcaagagttactagattatattttaattcacaaggcaacaagtgtggtgttgcggatggagagggttttctgagtatctggcaagttaaccaaactgcatcaaatcctaaaccttatatgagttggcagtgccacagtaaagccacaagtgactttgcatttattacctcttcaagtctagttgccacatctggacactccaatgacaatagaaatgtttgcctctgggacacattaatatcacccggaaacagcctcattcatggtttcacgtgccacgatcatggtgccacggtactgcagtatgcacccaaacagcaactcctaat

SEQ ID NO: 23 - DNA, 2440 bp, Homo sapiens
tacggctgcgagacgacagaaggggccttctagcagaaatggcggctgcggcggctcgagtggtgttgtcatccgcggcgcgcggcggctctggggtttcagcgagagtcttctaatccgaggcgctgcgggacggtcattatattttggagagaacagattaagaagtacacaggctgctacccaagttgttctgaatgttcctgaaacaagagtaacatgtttagaaagtggactcagagtagcttcggaagactctgggctctcaacatgcacagttggactctggattgatgctggaagtagatacgaaaatgagaagaacaatggaacagcacactttctggagcatatggctttcaagggcaccaagaagagatcccagttagatctggaacttgagattgaaaatatgggtgctcatctcaatgcctatacctccagagagcagactgtatactatgccaaagcattctctaaagacttgccaagagctgtagaaattcttgctgatataatacaaaacagcacattgggagaagcagagattgaacgtgagcgtggagtaatccttagagagatgcaggaagttgaaaccaatttacaagaagttgtttttgattatcttcatgccacagcttatcaaaatactgcacttggacggacaattttgggaccaactgaaaatatcaaatctataagtcgtaaggacttagtggattatataaccacacattataaggggccaagaatagtgcttgctgctgctggaggtgtttcccatgatgaattgcttgacttagcaaagtttcatttcggtgactctttatgcacacacaaaggagaaataccagctctgcctccctgcaaattcacaggaagtgagattcgtgtgagggatgacaagatgcctttggcgcaccttgcaatagctgttgaagctgttggttgggcacatccagatacaatctgtctcatggttgcaaacacgctgattggcaactgggatcgctcttttgggggaggaatgaatttatctagcaagctggcccagctcacttgtcatggcaatctttgccatagctttcagtctttcaacacttcctacacagatacaggattatggggactgtatatggtttgtgaatcatccactgttgcagacatgctacatgttgttcaaaaagaatggatgcgactctgtacaagtgtcacagaaagtgaggttgcacgagccagaaatcttctgaaaacaaacatgttgttgcagcttgatggttcaactccaatttgtgaagatattggtaggcaaatgttatgctataatagaaggattcccatccctgagcttgaagcaagaattgatgctgtgaatgctgagmcaattcgagaagtatgtaccaaatacatttataataggagtccagctattgctgctgttggattctttcttcttaggatataatcacagaagtgaacttcatgaatggaaatggaacaagttattttccaaaaggcaaactatttcatactcctacgtgaacatccttttaccacagcctcagccacagtacgtctaattatttaaaatttgtgattatcgctggtggtcaacaatttttttgtttttcatcctttaactggaaaaaggaggggctgtctcagtttttcttctgactctgtgtgtcacttacaattaataatgctagctgttaacatctacatagcagttgacatgtgccaggcctgtttaccagttaatcttctccatgatcctatgaggaaagtgctattgctgtctccatttcatagatgaggaaaatgaggcacagaggagacgttatgtagccactaccactgcaacttgctcaaacttccggccaagtcggctctagtccagacagcctgactcctcagcctgcgtctgtatgctgcctctcctaattcattatgtttattaataatttttccccgttttgttaacacttatgtttcaaaaacagtcatctttatttacattgactgatcatttcttttgtaatttcttctagtacttacaatagttctagtttcattaacatttcctatagactgaaaaaattttttaatctttttggaattttaatatagtcaagaaagtatctaaacttctcatttttcaaaatcttactgtcatttaataatccttcccttttccactgawwwgtgacactataatagtaaattttacaagggcttgttttggttacttattcttgccctggggttatctttaaactgaccacagytttctaatatatttgatcgtaacttccaaaaactgtgtaatttttgcttatttgtcttgcatctagtcacttaactctcttttgcttttctaggcagatcctatattatctacaaataatatatttatttccttctttccaaaaaaaaaaaa

SEQ ID NO: 24 - DNA, 1142 bp, Homo sapiens
gaggcaataggtcggggaaggtgatgaatgttctgtggggcatgtcaaattgggtggaacctctggggccttctgtgggaratgcccagggagcacagatttaggagatgggagcaactagtgtgatggtggtgagggctggttgaaaccctggggagtatgtggagctcatctgtgtttccacagagcttatctcccaggagatagccatcgggagtgccttgcctggcatgttcccctgctgaggtctgttacccaggagcctgcagacacaaagagcaggctggtaatgctgagaagcgaacattcagtacctgtcaccagaacccagcatgggtgttcaacactatctggtgactctgtgagaagaccctatgctcaggggatgaagtgtgttgcttgtgcaagagggatggagagagagtgttttccaagtatatgtgtgtgtgcatgtgtgtgtacccaggtggaaccctcctgcatgctcacatatgcctttatgaatactggaatctctaaacctaccatcatgcatctcgtcttagcttcctacctctctctttctacccctgcaacagccatgttattgccagtaacacatgagaagagtgagggagacctgtctgtagacaagctcagtgtgctgctaaggaagcaggcagcagttctgtcctcatgcgttcccattgtgccctgtcctgggatggcaaatgcaaggccagacaggctctgggstctctggtctgaccactaatagcatcttctcctcccgctaggctgaccagcctccaaggcaggactctgacaccagggttataaatgcatctgtctgggcacattatctaaattgttatgtatcaccctgggtaatggcaaaagtaaaaaccgctgttagctcagtgaataaatccttggtgctgatcaatcattgcacgacatagactcttttaataggcacaatttacacagaggcttggcagactgcttcgtcttctaattgctgatggaaaatggatgccgagctctgctgtgccgtaaaaatgtaaactataaatgacttaaaaacttgtgtgctcccttctccacccagcactcattttaaccttttatttagaaacaaaaaaaaaaaaaaaaaactcgag

SEQ ID NO: 25 - DNA, 1237 bp, Homo sapiens
tcgacccacgcgtccgggcagccatggagtctctgggatatttatgaaatatgatctcagttctcttatggtgacagttactgaggagcacatgccattctggcagttttttgtaagactctgtggtattgttggaggaatcttttcaacaacaggttaacaaccatttcctttttgtctaatttctgaaagtgttgcttatacttaagttgcttcttctcaaaggggcaagaagtatacagattttcatgtttcggtgtttaatagcttttgctttaattacaaaactccaaaattatatggactaaccagtaaacataactaatttcattgtattcaatgatgtaaggtagattatataatggtgagttggaaagatcctgggtgttaacatcagattgaagtagaattgaatgtaagttctgtcatttacttggtggtagcttggaatagatcacctaccttttctgaggttttctaatcagtaaaaatagcaataataatacctaatttgcaagtgtgctataggattaaatatgaaaatgcctagaaggcatttaagacatttttaactgtacagtatgtaaaatcatatgttatagtactttgaattatgcaatacatgaaactagatttgtaatcagtaacatgtttatgatttttgtcctgagatcctggaattcgctaagattatttgtcgaattgtaatgatgaaaattgggagttaagtccatagagaaaaaggaaacaatcctattttcaccttcagtccttattcagtattaatggagctggggtatttattatacttagaatcatatttttaaatgaatgaatagctttcttcgaaattcttgttagtgctcatttcatctatttaaatttgtgtggttgactcattattccaaatgtttgggtggaactgaaaagattgtgtttaggcccggtgcagtggctcatgcctatatcccaacactttgggaggccaaggctggcggatcaacttgaggccagaagttccagatcagcctggccaacatggctaaaccccgtctctactaaaaatacaaaaattacccggttatggtgtgcgcatttgtactgttagctactcgggaggctgaggttggggaatcgcttgaacctgggaggtagagattgcagtgagccaagatcatgccactgtactccagcctgggcaacagggtgagactctgtctcaaaaaaaaaaaaaaaa

SEQ ID NO: 26 - DNA, 2345 bp, Homo sapiens
  misc_feature (1088)..(1088): n equals a,t,g, or c
  misc_feature (1909)..(1909): n equals a,t,g, or c
  misc_feature (1913)..(1913): n equals a,t,g, or c
ggaactcctcgatgaggaccatctacagtgcttttttttttctatctctctgtctctcagttctgctttcttctacagtatttgatgactggcatcccatttctataagctgggtccagaactttgggctcacaccttcctttgacgtgcaagtgccacagaccctgagatgtttcttcagatcagggtgccgctggcatccactgaacttgcttcagtttaagctgagcaccttcctgagaatcatttcattttatctttcattctgtagtgagaagaggcttcagcatgaatagtctagggacatgcaagatgtataaaatagaatggagttgtgaattaggktatatgagggrgaaatttataaaaaatataaagcattgtaaagacaaatgcatgttacacaaaaccaggrgaccacttcattttaagaggtacctgctggtctcagaagctttaagtgatttataatctagtcaacaataagtggcagatgaactgaaaatatatttgcatgaagttcttagttcagaggtaaagctagggatgctatgcatggcaacactggaagggaaagagcttttgawatccaggtctgggcatttgcyctaatcagaggtcaacatcttctctgccctcataacccamtccccgccaggggtcctgtctcctagaccacacattagcagatataatayckgkcawtctggkttctcattctctttccagaaaaatccagacatgattttattgcaagatggagagaaaaggagacagcatcacatgtcttatattagtcacaaaaactggatgggttttatttcaggcgctaattcttttgagaacacaagggaaactttgatcttaatctatttgatgtggttttaagtaaaggagcatcttgtgcttactttgaaagtgtttttttacttcgggcttggtcaaatattacattttgttccagagaaaaactcatttggaaggcagcatggagtatagaattagacatccctgggcttgaagcccatctcagccatgaactacctttatgactttcagctagttacttttcctcactcagcttcagnttcttcatttataaagyaagtgcctcaacatcgctttttgactttcttaatcttgtctacgcatctacaagtagcccttttattactgatttttaactactcctggccattggaatgaccgagaagcccatgtctcattctcagacgggggattttgattctaatgacagtcatggttgagagtccactgtgttaaagtctcttcatttgaagcatctgatgtgaattctattttctgcttaaaccccagacatagatgttaagtttcaaaattatgtcgtacattcactcccactacatactcattgaatgcttaccatgtacagactctgtgatagactatggaaatacatagaaagaaattccctgtttttaagaactttacctagtgtttagaaattgcatttaaaactgataattaaaatactatagaccttggcttaaaggatgcaccttgtaatctgtaatcatatttgtagttatatattgctttgaaaatacactgtagacagtaagacaaaaaaggaaataaaaagtacatgaattgcgaaggagaaaataaaattggctttggtcacagatgacatgattggctatgtagaaaatcccgaggaactgacaaaacaaacaaacaaacaaatctagaactaattagttctagattatagcaaggktgcaggatcaagcttaatacctgaaagwaaattcctttcctatataccagccmtgaaccattggaatttgaaatcaaaatacmacaccattaatawtattaccaaaagagagagagggagamaatatgtattatgctaacaaaagangtanaaaaggtatgtgagaaaaactacaaatctctgatgaaataaatcaaaggagatctaaattaatggaaagacaaactatgctaatggataagaaaactcaatcttgttatgtgtcagttcattccaatttgatccatagattcaatgcaatcctagaaagctactttgtggacatctgcaaactgattctaaggtttacacgaaaaggcaaaaagatgcaatagtcgaaacaatattgaagaagaacaaagaagtcggactcttcttgacttcaagtctttctataaagctacaataatcaaaatagtgtggcattggtgaaagaatagatagatcaaaaccaattcaatggagaaagggaaaagacagtctttttaacaaatggtgctggaactggagttccttatgaaaaaaaaaaaaaaagggcggccgc

SEQ ID NO: 27 - DNA, 2536 bp, Homo sapiens
ccacgcgtccgcacgtatcaagataaagaggaagttgtcttatggatgaatactgttgggccctaccataatcgtcaagaaacatataagtacttttcacttccattctgtgtggggtcaaaaaaaaagtatcagtcattaccatgaaactctgggagaagcacttcaaggggttgaattggaatttagtggtctggatattaaatttaaagatgatgtgatgccagccacttactgtgaaattgatttagataaagaaaagagagatgcatttgtatatgccataaaaaatcattactggtaccagatgtacatagatgatttaccaatatggggtattgttggtgaggctgatgaaaatggagaagattactatctttggacctataaaaaacttgaaataggttttaatggaaatcgaattgttgatgttaatctaactagtgaaggaaaggtgaaactggttccaaatactaaaatccagatgtcatattcagtaaaatggaaaaagtcagatgtgaaatttgaagatcgatttgacaaatatcttgatccgtccttttttcaacatcggattcattggttttcaattttcaactccttcatgatggtgatcttcttggtgggcttagtttcaatgattttaatgagaacattaagaaaagattatgctcggtacagtaaagaggaagaaatggatgatatggatagagacctaggagatgaatatggatggaaacaggtgcatggagatgtatttagaccatcaagtcacccactgatattttcctctctgattggttctggatgtcagatatttgctgtgtctctcatcgttattattgttgcaatgatagaagatttatatactgagaggggatcaatgctcagtacagccatatttgtctatgctgctacgtctccagtgaatggttattttggaggaagtctgtatgctagacaaggaggaaggagatggataaagcagatgtttattggggcattccttatcccagctatggtgtgtggcactgccttcttcatcaatttcatagccatttattaccatgcttcaagagccattccttttggaacaatggtggccgtttgttgcatctgtttttttgttattcttcctctaaatcttgttggtacaatacttggccgaaatctgtcaggtcagcccaactttccttgtcgtgtcaatgctgtgcctcgtcctataccggagaaaaaatggttcatggagcctgcggttattgtttgcctgggtggaattttaccttttggttcaatctttattgaaatgtatttcatcttcacgtctttctgggcatataagatctattatgtctatggcttcatgatgctggtgctggttatcctgtgcattgtgactgtctgtgtgactattgtgtgcacatattttctactaaatgcagaagattaccggtggcaatggacaagttttctctctgctgcatcaactgcaatctatgtttacatgtattccttttactactattttttcaaaacaaagatgtatggcttatttcaaacatcattttactttggatatatggcggtatttagcacagccttggggataatgtgtggagcgattggttacatgggaacaagtgcctttgtccgaaaaatctatactaatgtgaaaattgactagagacccaagaaaacctggaactttggatcaatttctttttcataggggtggaacttgcacagcaaaaacaaacaaacgcaagaagagatttgggctttaacacactgggtactttgtgggtctctctttcgtcggtggcttaaagtaacatctatttccattgatcctaggttcttcctgactgctttctccaactgttcacagcaaatgcttggattttatgcagtaggcattactacagtacatggctaatcttcccaaaaactagctcattaaagatgaaatagaccagctctcttcagtgaagaggacaaatagtttatttaaagcatttgttccaataaaataaatagagggaaacttggatgctaaaattacatgaataggaatcttcctggcacttagtgtttctatgttattgaaaaatgatgttccagaaagattacttttttcctcttatttttactgccattgtcgacctattgtgggacatttttatatattgaatctgggttcttttttgactttttttttcccaatccaacagcatccttttttttaaaagagagaattagaaaatattaaatcctgcatgtaatatatctgctgtcatcttagttggaccaacttcccatttatttatcttaaaactatacagttacatcttaattccatccaaagaagatacagtttgaagacagaagtgtactctctacaatgcaatttactgtacagttagaaagcaaagtgttaaatggagaagatacttgtttttattaaacattttgagatttagataaactaaaaaaaaaaaaaaaaaaaaaaaaaaaaaaaaaaaaaaaaaaaaaaaaa

SEQ ID NO: 28 - DNA, 1048 bp, Homo sapiens
gccgtcctgcaggtggttgccatcgcggccttcaccaggtagctacggacacccgggaataccccacactggggccctcctcctgggcctgaccagtcccccagctgtcacctccccattcctggacaggaagggcacttttcctagtgaactggccatagatggttttggatggttccatctgttctggcaggagtgggagcaggagccagggcagaacaaactgctggaggccctggtgttgggaacagctgcggggagggtagggaccagacagaactgccttcaagatgagtcccaggagcgcacactcagccctgtcagtggggtctggctttagcagccaggcctccacagacccccatgggcccccagggccgagagggaggacagagcccttcagaacagaggcctcatctcactgcatcccccatcaccccctagttccccaatggtcctaatttgtgttctgagatcccagtttactccgtggccaggccccacctgtgtttccaagtcgggctggagacgcaggatggggtaggccttgtgctctgagcaaccccagctctgcctcacaggcaggcaggcccggtgcaagagtggactctgggttcctaaagcaataaatgcaaacaagccaacagctctgctgcctagcaatttccatcttagccacacttctcccttcaggggcttcggaggagaggtcagggctaaggccggggatgagactgcaggagagagagcagcggagggccacattcggagcctccgtccactccagttttatcagcttttgccttttgcacggagtgctaaacaaattctagctctgtgtttttttcccattcccagatttactatcagttctccttaaaaagtatctaagctgttacagtagctttcccttcacttgattctattgtgtgttttctatgtttggaataattacacccaaatatctagatattttctcttcaccgcattttgtaaataaagagatgtgtatgccwmmmwraaaaaaaaaaaaaaaaagggcggccgc

SEQ ID NO: 29 - DNA, 1245 bp, Homo sapiens
gtagaatgccatggagttaatagcttctgtgatcctacatgttccaagataactgcagcagtccaaaaagccagtttcctttctggtgtttgtgggcatacactttgttctgctcctgagtaagtcacactttgtcttccaggtcctctaggatccctgcaatgttccatttgttgcctgggcattggagtaatagcagtgcttggtgctacagaaatagatggatggaagttgtggttactgtgacaccaaaaacttgtcccctgagctccctactcctctttctcctatattttttggtaattggctctgtcattcacctcactgcaggattcagaatcctggtactgggtcttgtatttctctttttcccttaccctccttatccaaattgtcaccaagttctgcttcatgctctcatgatttctcacctgagttaccctagtagcttccaaatagggccctctgatttcaaccttggacactcccactatcttttatattatggaaagatctaatcatgttaccccccatttaaaatccctcagagagcactgcagatacaattcaagccagttagcttagtgttaaggttttacatgcatttctgcagccatctgcccctattcttgcaccctaataatgccaaacttcttttaggccttaatttcatcatctgcaaaatgaggataataaatagtacctacttcatatgattgtaataaggsccctcaaaactgtttcatgcctcttttgcccactgcattaggctgttctcacattgctataaagaaatacctgaggctgcgtaatttataaagaaaagaagtttaattgactcacatttmtacaggctatacaggaagcatgatggtggcatctgcttggctgctggggagggctcagaaaacttacagtcagccgggcacagtggctcactcctgtaatcccagcacttggggaggccgaggtgggcagatcacctaaggtcagaagttcgagaccagcctgtccaacatggtgaaacctcatccctactaaaaatacaaaaattagccgggtgtggtggggcggcacctgtaactccagctactcagaaggytgaggcaggagaatcacttgaacccaggaggtggaggttgcagtgagccaagattgcgccactgcactccagcctggacaacagagtgggactctgtctcaaaaaaaaaaaaaaaaaaaaaaaaaaaaaaaaaaaaaactcga

SEQ ID NO: 30 - DNA, 1809 bp, Homo sapiens
gttaagttgacccattgcagtggattgagtggagggcaggtgaagggcaggtgttttcaagtcaaaggagttcaggtgaagggcaggtgcttttagtcaaaggagttccttagcattatttcctcctttatttggagatcagattgaagatgtaggggactagaatgcagttgtagtttgtggtgtttactttttatggaaaagtgcctcttatgtgaaaagtcttctgtgcttgatcctgggggtaggggggttataaaaatgtcatacctgggatcctgcccttaaggagttgatggtaggtaatgctttcctttggctttttgttcatcttgagtctgtgtatgttcagttatcttcagccatttcctgggcaatgggraacatttctgttaaaacaaacttctgactttgatctgtgacttatatttctttttagataatgaagaaccactgggattagagggtgtataaaatacaataataagtatagtgtatgtaggaacctctgtmcaaccaatttggtgacttttaggcaactcatttgactatttgactgtttgttacatgagtgtgcatttggcyttgtttaaaattcctctataaagcacattttaaaaaatgacccagtacttagtatataagatgaactgccatttgtataattgatcatttaaaaatgcttattatacttttaatcaatcagtttccatgtttatgaaatgggaataattattatatctagctcatagaattgtcctgaagatgaaatttatatccatatatacataatgaagctctttagagcaatgtataactacatgccaactgttcaaaaaatattaatggctacatcactattaatattttaaaattagtactgtcattttcccttcctacatgactgaatgtaggaggtgactatttttgttataaaaggatttccaatgagatacctttgaatggtaaaatttcctatgcatttatttaaatgtttatatatatatgtctttaaagtatgaaagttaagtgcacttatacaaggcagattcaggtactaattaaactgctcatttagattacagaatgagggactgaaaattatatgtatttaattaggaattggattgattggtcttgactgctgktgtctttcagttcttttttattgttatacttcccatgtgtttgtctccttttctttttatcttttaaaaattgctttctgatttatttcctgttcagttttcagtaatgggtgtagaatagggcaagaacttatgttggtgcccgttgtttgaaccaggaaggagcaactgcatcagacagcctggggctcagttgggagggacttcagatcagtccctgcagagctgcctggcccagggaaccactgaattccagtttcctaactccaaatcggacagtttgtgggtctacactgtatgtacataatgaacattttaaggctcattcatccagtgttttccacatgctcccatttgtttagttctcctttttaaaaaccaataattatggaaaaatttagctatgtacagaaatagtagtgagaaaccccccacttagccatcatgcagcttcagcagttgatcatctcatagccagtcttgtttgctcaatactcccaaccatttcttttctcccattttattttgcaggaaatcccagacattatatcatttaatctaaaagtatttcaggatgtatctgtaagagatgaggactcaaaaatgcatacacacattttgagaacttcccaaaaaaaaaaaaaaaaaaaaaaaactcgag

SEQ ID NO: 31 - DNA, 1713 bp, Homo sapiens
gtctcaatggacacttagaagaatttgatgatcttactgtcataaaatcagtaatgaaattctcagcaaaactatttggtaaacattgcaccctgtatttttacccaacatcttgttatgaaaattatcaaatacattaaaaagttaataattttatagtgtactcactacctagatgctaattagcattacctatgcttgctttgtcacatatccattcatcatttcatattattatttgatgcattttaaattgcatatcattaactagagttcattgttggcttttttacataaaattagcatgcaatgaagtgcatagaaatatgtgttcactgaggtttggcaaatgcatatagtgctatggaaataggaaacgttatcaccaccctagaaagtttccacactgccctttccagtcaattcctgtccctacttgaccctcaaaggcaaccactgttcctttttctaccataagatttttctgttctaaaactttatataaatagagtcacgcaacatgtacgcttttctacaaggcttcatttttttattgctgttcttttttattgctgagtagtattccactgtatgacaatattacagtttgttttcttaatttcctattattgatagatacctgggctgtttccaggattggccattataaataaagctgctatgaccattcttacgtaagtctttgtgaacataggttttcatttctttgcagtaaattccttggattagaattgctgggtcacagggtagttttaaaagaaactgccatacctttttccagttcagttttattgtgccctgtattttgtattttgatgtgcataaaggtgtaaactatttttatgatccatattgaagtattagaagaagtgagtttggaataacaatggcattgttcatggtcaaggatgacaattggaactatctgaggaaagcaaagacctgtctgccccagacagctcctcaaggggttcctatgcctgaaactttagcaatatttcactccttgaaaggttaaagcccaaccatggtgatatgttagctagaagaaacagcactggtttgtttatgttactaactttcaccacccgttttcagtaggtaaagtaagactgatcattgaacagaaaaggttatttctgtgatgaggttgagggggtagtggaaagcatgtattgctagtaagccccaggtacagctatgtgagagagagtcacctggacagggaagtcccccaaatggtggccagaagagcagaaaacggggtgggaaaaattctacctcacagttttgcataggggatagctatgcttttacgggacattttagcgtttaaaaatattttcaatattgtctctttattcaataccacccagctgtagttttttcacactctgatgactctcttatccactcttttacctctcccagctgttctattacatacagcattcacctgtattagtctatagaattataatcatctgtgtgtttctaatgctcattttcaaaaatatgtatggtttattcgatttttcctattaaaattttaagggctgggaaatttggcttctactgtaaatccttataatgttccacacattgtaaatatgcaataaaaatgttaacaactawaaaaaaaaaaaaaaaaaaaactcgactcgtgccgaattcggcacgagcggcacgagc

SEQ ID NO: 32 - DNA, 1856 bp, Homo sapiens
ctgactttccacctttcctacaaattccgattactgttgctgttgactttgtgcctgacagtggttgggtgggccaccatgtaactacttcgtgggtgccattcaagagattcctaaagcaaaggagttcatggctaatttccataagaccctcattttggggaagggaaaaactctgactaatgaagcatccacgaagaaggtagaacttgacaactgyccttctgtgtctccttacctcagaggccagagcaagctcattttcaaaccagatctcactttggaagaggtacaggcagaaaatcccaaagtgtccagaggccggtatcgccctcaggaatgtaaagctttacagagggtcgccatcctcgttccccaccggaacagagagaaacacctgatgtacctgctggaacatctgcatcccttcctgcagaggcagcagctggattatggcatctacgtcatccaccaggctgaaggtaaaaagtttaatcgagccaaactcttgaatgtgggctatctagaagccctcaaggaagaaaattgggactgctttatattccacgatgtggacctggtacccgagaatgactttaacctttacaagtgtgaggagcatcccaagcatctggtggttggcaggamcagcactgggtacaggttacgttacagtggatattttgggggtgttactgccctaagcagagagcagtttttcaaggtgaatggattctctaacaactactggggatggggaggcgaagacgatgacctcagactcagggttgagctccaaagaatgaaaatttcccggcccctgcctgaagtgggtaaatatacaatggtcttccacactagagacaaaggcaatgaggtgaacgcagaacggatgaagctcttacaccaagtgtcacgagtctggagaacagatgggttgagtagttgttcttataaattagtatctgtggaacacaatcctttatatatcaacatcacagtggatttctggtttggtgcatgaccctggatcttttggtgatgtttggaagaactgattctttgtttgcaataattttggcctagagacttcaaatagtagcacacattaagaacctgttacagctcattgttgagctgaatttttcctttttgtattttcttagcagagctcctggtgatgtagagtataaaacagttgtaacaagacagctttcttagtcattttgatcatgagggttaaatattgtaatatggatacttgaaggactttatataaaaggatgactcaaaggataaaatgaacgctatttgaggactctggttgaaggagatttatttaaatttgaagtaatatattatgggataaaaggccacaggaaataagactgctgaatgtctgagagaaccagagttgttctcgtccaaggtagaaaggtacgaagatacaatactgttattcatttatcctgtacaatcatctgtgaagtggtggtgtcaggtgagaaggcgtccacaaaagaggggagaaaaggcgacgaatcaggacacagtgaacttgggaatgaagaggtagcaggagggtggagtgtcggctgcaaaggcagcagtagctgagctggttgcagstgctgatagccttcaggggaggacctgcccaggtatgccttccagtgatgcccaccagagaatacattctctattagtttttaaagagtttttgtaaaatgattttgtacaagtaggatatgaattagcagtttacaagtttacatattaactaataataaatatgtctatcaaatacctctgtagtaaaatgtgaaaaagcaaaaaaaaaaaaaaaaaaaaaaaac

SEQ ID NO: 33 - DNA, 690 bp, Homo sapiens
  misc_feature (142)..(142): n equals a,t,g, or c
  misc_feature (525)..(525): n equals a,t,g, or c
  misc_feature (677)..(679): n equals a,t,g, or c
  misc_feature (682)..(684): n equals a,t,g, or c
  misc_feature (686)..(686): n equals a,t,g, or c
  misc_feature (690)..(690): n equals a,t,g, or c
ggcacgagtgctttcaggcaacctgaaatggtttttcttcgagtacctgtaaagtactgactctgaagcaggagcgccttaatagttttataaactcaatcaatagaatgaattttttcttttctccctttctttctctctncttccttcctgcctttctttctctcccttcttttcccttcccttcccctcccctccctccctccctccttccctcccttccttccttccctccttcttggtcttgttctgtaacccaggctgcagtgcaatggcaaaatcatagctcactgtaacctcaaactcttgggctcaaggaatcctctggaaagctttttcaaagagatggtcgtaggtcttctcctcaaagatgtttaaaaatgggatcaggctgggctcagttgctcatgcttgtagtcccagcactttgggaggccgaagcaggcagatcacatgaggttgggagttcgggaccagcctgaccaacatggagaaatcccgtctctacttaaaatacaaaactanccaggcgtggtagcacatgcctgtaatcccagctatttgggaggctgaggcaggagagtcgcttgaactggggaggtggaggttgcagtgagccaagatcgcaccattgcactccagcctgggcaataagaatgaaacaccatctcaaaaannnaannnanaaan

SEQ ID NO: 34 - DNA, 1647 bp, Homo sapiens
ggcacgagatgaagccctgtccaggctatgggcatcaagacagcattgccggcggctgagctgggcctctactctctggtgctgagtggggccctggcctatgctggccggggcctccttgaggcttcacaagatggggcccacaggaaggccttccgggagtctgtgcgacctggctgggagtacattggccggaagatggatgtggctgacttcgagtgggtgatgtggttcacctcctttcgcaacgtcatcatctttgccctctccggacatgtgctgtttgctaaactctgcacgatggttgccccaaagctccgctcctggatgtatgctgtgtacggggccttggctgtgatgggcacaatgggcccttggtacctgctgctgctgcttggtcactgtgtgggcctctatgtggcctcgcttttgggccagccctggctctgtcttggccttggcttggccagcctggcctccttcaagatggaccccctaatctcttggcagagcgggtttgtaacaggcacttttgatcttcaagaggtgctgtttcatgggggcagcagcttcacatgctgcgttgcaccagctttgcactggagagctgtgcccaccctgaccgccactactccttagctgacctgctcaagtacaacttctacctgcccttcttcttcttcgggcccatcaatgacctttgatcgcttccatgctcaggtgagccaggtggagccagtgagacgcgagggtgagctgtggcacatccgagcccaggcaggcctaagcgtggtggccatcatggccgtcgacatcttctttcacttcttctacatcctcactatccccagcgacctcaagttcgccaaccgcctcccagacagtgccctcgctggcctagcctattcaaacctggtgtatgactgggtgaaggcggccgtcctctttggtgttgtcaacactgtggcatgcctcgaccacctggacccaccccagcctcccaagtgcatcaccgcactctacgtctttgcggaaacgcactttgaccgtggcatcaacgactggctttgcaaatatgtgtataaccacattggtggggagcattccgctgtgatcccagagctggcagccacagtggccacatttgccatcaccacactgtggcttgggccttgtgacattgtctacctgtggtcattccttaactgctttggcctcaactttgagctctggatgcaaaaactggcagagtgggggcccctagcacgaattgaggcctctctgtcagtgcagatgtcccgtagggtccgggccctgtttggagccatgacttctgggccatcatcatgtacaaccttgtgagcctgaacagcctcaaattcacagagctggttgcccggcgcctgctactcacagggttcccccagaccacgctgtccatcctgtttgtcacctactgtggcgtccagctggtaaaggagcgtgagcgaaccttggcactggaggaggagcagaagcaggacaaagagaagccggagtaggagggagcgggtagagggatgggctctgctcagctattcttgggccagatggggcctgaccgatagaataaaagacttttctacaacaaaaaaaaaaaaaaaaaaa

SEQ ID NO: 35 - DNA, 1693 bp, Homo sapiens
gatccggggtcaccagttattagaggaagtaacacaaggggatatgagtgcagcagacacatttctgtccgatctgccaagggatgatatctatgtgtcagatgttgaggacgacggtgatgacacatctctggatagtgacctggatccagaggagctggcaggagtcaggggacatcagggtctaagggaccaaaagcgtatgcgacttactgaagtgcaagatgataaagaggaggaggaggaggagaatccactgctggtaccactggaggaaaaggcagtactgcaggaagaacaagccaacctgtggttctcaaagggcagctttgctgggatcgaggacgatgccgatgaggccctggagatcagtcaggcccagctgttatttgagaaccggcggaagggacggcagcagcagcagaagcagcagctgccacagacacccccttcctgtttgaagactgagataatgtctcccctgtaccaagatgaagcccctaagggaacagaggcttcttcggggacagaagctgccactggccttgaaggggaagaaaaggatggcatctcagacagtgatagcagtactagcagtgaggaagaagagagctgggaacccctccgtggtaagaagcgaagccgtgggcctaagtcagatgatgacgggtttgagatagtgcctattgaggacccagcgaaacatcggatactggaccccgaaggccttgctctaggtgctgttattgcctcttccaaaaaggccaagagagacctcatagataactccttcaaccggtacacatttaatgaggatgagggggagcttccggagtggtttgtgcaagaggaaaagcagcaccggatacgacagttgcctgttggtaagaaggaggtggagcattaccggaaacgctggcgggaaatcaatgcacgtcccatcaagaaggtggctgaggctaaggctagaaagaaaaggaggatgctgaagaggctggagcagaccaggaagaaggcagaagccgtggtgaacacagtggacatctcagaacgagagaaagtggcacagctgcgaagtctctacaagaaggctgggcttggcaaggagaaacgccatgtcacctacgttgtagccaaaaaaggtgtgggccgcaaagtgcgccggccagctggagtcagaggtcatttcaaggtggtggactcaaggatgaagaaggaccaaagagcacagcaacgtaaggaacaaaagaaaaaacacaaacggaagtaagcagagctgccaggctcccaggagagcatggggactaggaggaagggtgtggcatggctcagtctggcccccttgattaccggcctagcccctgctcacatcacagctgtctgaagaacagtgaggtggagtgcctagaactcccgtggtggtcctgagcagagaggaggatgtcctcctgcctgcctgaaggtctcccatgaaaacactgctgaactgtgttgacactcatgaccctttttttaaaccgttaaagggaagttcggtgttggagcgatactcaatgtagtcagtctacacctggacgtgtgggccacttaagccctccccacccccatcctattcctaaataaaaccaggataatggaaaaaaaaaaaaaaaaaaaaaaaaaaaaaaaaaaaaaaaaaaactcgagggggtcc

SEQ ID NO: 36 - DNA, 1767 bp, Homo sapiens
  misc_feature (183)..(183): n equals a,t,g, or c
ggcagaggagccgccgggtcacccaatgccccagcctggcttcatcccaccacacatgagtgcagatggcacctacatgcctccgggtttctaccctcctccaggcccccacccacccatgggcttactaccccccagggccctacacgccagggcccctaccctggcccctgggggcaccancagccacagtcctggtcccttcaggagctgccaccacggtgacagtgctgcagggagagatctttgagggagcgcctgtgcagacggtgtgtccccactgccagcaggccatcaccaccaagatctcctacgagattggcttgatgaatttcgtgctgggtttcttctgttgcttcatgggatgtgatctgggctgctgcctgatcccctgcctcatcaatgacttcaaggatgtgacgcacacatgccccagctgcaaagctacatctacacgtacaagcgcctgtgctaacggagctgggactcgggactcccccgcctgtcagtctggccccctgtgctttgctccctgygctcagtggtcactttcccgctcccacttggggctgggagccgtgccaccatcccctagaagtcctgtcctcttcaccctgccctacctgagccgctgactcttctggcaaaaattctgttgggatttaaggccaagggtcagtgggtggcagggggctgrcaatgagcttgtgtgttgttggtctgcttggtgtgtgtgatcgggaagataagctgggaggggtctcctgctggggtcctgatgcctctgtttccaaacaaggtacaggttcagtccagactctttccccctgggaccaacagcagccagagcagttagccagttagtccccaggcctgtggcacaggcgtttctgacctgctgggccgagaatgggtaagttgtctggagtcaggtgggcccacgtaggacagggtcacaaagcctgggtttgtttctgggtactttgcgcctctggggtgctagaggtggggcatggtggctggaagtaaaactgccaactctggccctcagaactctcaggtatagaagcccaggatgtctaataccctgtcccagtgcccgagagctgcctggtgtcaggtagagaggacactgtacctgggtgaatgatcagaccctggtagctaagaaggaacttgtccctttgagtcagtgtgcagaccccctttcaggccatgcctctgtgaaccctgtattgctggggccggaaggagcccctgagcctagccccttcccgtctgccctgtgtcctcactgcgtgtgggtatgacctctgcctggtggctggtgtatcccaactgggcaagagatggcagagggtcccccttgtgggtgcgcttggatgtgcagagccttctccatggattttcttccctgtaagtgccgggcccctcaccccagctgacaggctgttgctgtgcctgctcacacctgctcctgcaggcacactgggctagggacgaggaaggagcagccacaagtggtagaactgccttggtggacaccagcctcgccctgtctttatttcctgaatggtttgtgaacttgctcacctggaccactgtatcctgccactgtccttcctggtctcgcactgccactgcatggcctcctgtcactgtgaatcgtggcccagtctcagtttgtagtttctcattaaattggccctttcactcccccgcaaaaaaaaaaaaaaaaaaactcgagggggggcccggtacccaatc

SEQ ID NO: 37 - DNA, 3208 bp, Homo sapiens
ggagagtatgaggcgagctccggcccgggtgcggccgggcttcaggggcccaggcgccgctgctgccaccgccatctaacgctgcgccctggaggcccggcgcgcggatggtgccggtgcggctcgggtgttgaaacgggtgtgccctccccctcctcccctcccccacgcggtggtctcccctcccacccggctcaggcagagccatgtctcggggtggctcctacccacacctgttgtgggacgtgaggaaaaggtccctcgggctggaggacccgtcccggctgcggagtcgctacctgggaagaagagaatttatccaaagattaaaacttgaagcaacccttaatgtgcatgatggttgtgttaatacaatctgttggaatgacactggagaatatattttatctggctcagatgacaccaaattagtaattagtaatccttacagcagaaaggttttgacaacaattcgttcagggcaccgagcaaacatatttagtgcaaagttcttaccttgtacaaatgataaacagattgtatcctgctctggagatggagtaatattttataccaacgttgagcaagatgcagaaaccaacagacaatgcccaatttacgtgtcattatggaactacttatgagattatgactgtacccaatgacccttacacttttctctcttgtggtgaagatggaactgttaggtggtttgatacacgcatcaaaactagctgcacaaaagaagattgtaaagatgatattttaattaactgtcgacgtgctgccacgtctgttgctatttgcccaccaataccatattaccttgctgttggttgttctgacagctcagtacgaatatatgatcggcgaatgctgggcacaagagctacagggaattatgcaggtcgagggactactggaatggttgcccgttttattccttcccatcttaataataagtcctgcagagtgacatctctgtgttacagtgaagatggtcaagagattctcgttagttactcttcagattacatatatctttttgacccgaaagatgatacagcacgagaacttaaaactccttctgcggaagagagaagagaagagttgcgacaaccaccagttaagcgtttgagacttcgtggtgattggtcagatactggacccagagcaaggccggagagtgaacgagaacgagatggagagcagagtcccaatgtgtcattgatgcagagaatgtctgatatgttatcaagatggtttgaagaagcaagtgaggttgcacaaagcaatagaggacgaggaagatctcgacccagaggtggaacaagtcaatcagatatttcaactcttcctacggtcccatcaagtcctgatttggaagtgagtgaaactgcaatggaagtagatactccagctgaacaatttcttcagccttctacatcctctacaatgtcagctcaggctcattcgacatcatctcccacagaaagccctcattctactcctttgctatcttctccagatagtgaacaaaggcagtctgttgaggcatctggacaccacacacatcatcagtctgataacaataatgaaaagctgagccccaaaccagggacaggtgaaccagttttaagtttgcactacagcacagaaggaacaactacaagcacaataaaactgaactttacagatgaatggagcagtatagcatcaagttctagaggaattgggagccattgcaaatctgagggtcaggaggaatctttcgtcccacagagctcagtgcaaccaccagaaggagacagtgaaacaaaagctcctgaagaatcatcagaggatgtgacaaaatatcaggaaggagtatctgcagaaaacccagttgagaaccatatcaatataacacaatcagataagttcacagccaagccattggattccaactcaggagaaagaaatgacctcaatcatgatcgctcttgtggggttccagaagaatctgcttcatctgaaaaagccaaggaaccagaaacttcagatcagactagcactgagagtgctaccaatgaaaataacaccaatcctgagcctcagttccaaacagaagccactgggccttcagctcatgaagaaacatccaccagggactctgctcttcaggacacagatgacagtgatgatgacccagtcctgatcccaggtgcaaggtatcgagcaggacctggtgatagacgctctgctgttgcccgtattcaggagttcttcagacggagaaaagaaaggaaagaaatggaagaattggatactttgaacattagaaggccgctagtaaaaatggtttataaaggccatcgcaactccaggacaatgataaaagaagccaatttctggggtgctaactttgtaatgagtggttctgactgtggccacattttcatctgggatcggcacactgctgagcatttgatgcttctggaagctgataatcatgtggtaaactgcctgcagccacatccgtttgacccaattttagcctcatctggcatagattatgacataaagatctggtcaccattagaagagtcaaggatttttaaccgaaaacttgctgatgaagttataactcgaaacgaactcatgctggaagaaactagaaacaccattacagttccagcctctttcatgttgaggatgttggcttcacttaatcatatccgagctgaccggttggagggtgacagatcagaaggctctggtcaagagaatgaaaatgaggatgaggaataataaactctttttggcaagcacttaaatgttctgaaatttgtataagacatttattatatttttttctttacagagctttagtgcaattttaaggttatggtttttggagtttttccctttttttgggataacctaacattggtttggaatgattgtgtgcatgaatttgggagattgtataaaacaaaactagcagaatgtttttaaaactttttgccgtgtatgaggagtgctagaaaatgcaaagtgcaatattttccctaaccttcaaatgtgggagcttggatcaatgttgaagaataattttcatcatagtgaaaatgttggttcaaataaatttctacacttgccatttgcatgtttgttgctttctaattaaagaaactggttgttttaagataaaaaaaaaaaaaaaaaa

SEQ ID NO: 38 - DNA, 637 bp, Homo sapiens
agtccactttctgaagtttcagttatggtcaacagtggtccaaaaatattaaatggaaaacttcagaaataaacagttcataagttttaaattacatgctttctgagtagcatgatgaaatcttgtttcaacctgcttgggacatgaattatccctttgtccatcatatgcacgttgtatatgttactcacccgatagtcacttagcagctgtcttgattattaggttgactctcgtggtattgcagtgcttgtgttcagttcaataaagttaaggttcaataaagttaaaataaaggttcaataaagttaacctttattttacgtaatgaccctagggcacaagaatagtgatgatggcatattgtcatgattttttttattatttaatatcttattgtgcctaatttacaaattagactttctcataggtgtgtatatttaggaaaaaacatagtacgtgtaaggttcagtactatctgcggtttcaggcatccactggggttctgggaacatattccctgtggataaagggggactactatagtgaatttctattttcccttgtatatgcagtttcttttgaatgcctcagtccttgatgtttggctcctaaaaaaaaaaaaaaaaaactcgta

SEQ ID NO: 39 - DNA, 750 bp, Homo sapiens
ggcacgagtttcaacatgagactaatccagggtggtgacatgccggtctttgtagttcttgcttcggggttaatgaggggcaggaaagagttccttagactcctgcatggcatcatgaatgctgctgttcttcttaccttggtttttttcctcctcctctaccttttctaccttggtgtgctgggatcagatcctgcttatcttccacttcttaagaaaagctgacatagaagacacattgggactataacagggctgggtctcctcttccactcccactagacacatgctgcagtacatcagagagtttgtcaccagttaagcaggctcctcggaagtccccctccgacactgagggtcttgtaaagagtctgccttctggatctcaccagggcccagtcatatatgcacagttagaccactccggcggacatcacagtgacaagattaacaagtcagagtctgtggtgtatgcggatatccgaaagaattaagagaatacctagaacatatcctcagcaagaaacaaaaccaaactggactctcgtgcagaaaatgtagcccattaccacatgtagccttggagacccaggcaaggacaagtacacgtgtactcacagagggagagaaagatgtgtacaaaggatatgtataaatattctatttagtcatcctgatatgaggagccagtgttgcatgatgaaaagatggtatgattctacatatgtaaaaaaaaaaaaaaaaaaaaaa

SEQ ID NO: 40 - DNA, 543 bp, Homo sapiens
  misc_feature (529)..(529): n equals a,t,g, or c
  misc_feature (533)..(533): n equals a,t,g, or c
ggcagagcgatcctcccagcaacccacaaggaagcttcacagagaggcagatgccacacaggccacccacccagatgcagagccagattccctgcgtggactggacgggagtttcccagctggagttctctcggccaagctgcctgtgacatggggttggaggtgctccagagagtcatggccacccctggaggaagtgacttgtggctgactgctcaaggggaagtcctgtggcagtggagtcgtcagcattaattcaaataagatctctccctgcacacaatctgctttcgtgttcctgatggattgaatcaagagtgaatgagctcctacttcgcgaaagcaaaacaaactaaacgcatcaaccacgaccgcagagcccccatctctcccaggagggtgagcccatgttgtgttttcatttgtcagaaatctatcttaggaagccattcctgagatctgttctaatttaggccatttttaaaaaaaataatgcagttgaaaaaaaaaaaaaaaaaactctaggggngggnccggtaccca

SEQ ID NO: 41 - DNA, 1629 bp, Homo sapiens
ggcacgagaagaaaatgatttggatgattctttaagtgtaaaaaatggtgatagtagtaatgactttgtgacttgcaatgatatcaatgaagatgattttggtgattttggtgactttggctctgccagtggctcaactccaccttttgttactggtactcaagattcaatgagtgatgccacttttgaagagtcttcagagcactttccacattttagtgaaccaggtgatgactttggagaatttggggatataaatgctgtttcttgccaagaggagacaatattaacaaagtcagacctaaaacagacttctgataatttatcagaagaatgtcaattggcaagaaaatctagtggaacaggcactgaacctgttgcaaaacttaaaaatgggcaagaaggtgagattggacattttgattctgtgccaaatattcaggatgactgcaatggttttcaagactctgatgattttgcagacttcagttcagctggtcctagccaagttgtagattggaatgcttttgaggatgaacaaaaagatagttgttcttgggctgcttttggagaccagcaggctactgaatctcatcatcgaaaggaagcctggcagtcacataggacagatgaaaatattgatactccaggaacccccaaaacgcacagtgtaccttcagcaacttccaaaggagcagttgctagtggccatttacaggaatcagccacttcagttcagacagctttattaaaccgcctggagcgaattttcgaagcatgttttccttccatacttgtccctgatgctgaagaggaagttacttccctgaagcacttgctggaaacaagcactttgccaataaaaacgagagaggccttacctgaaagtggggaattgctagatgtgtggactgagctacaggatatccatgatgcacatggcttgagataccagtggggcggctcccatagcaacaagaagcttttgtcctccttgggaatagacacccgaaacattctcttcacgggcaataagaagcagcctgttatagtgcccatgtatgcagcaggattgggtatgttagagcccaccaaggaaccactgaaaccactttctgctgcagaaaaaatagcttccatcggtcagacagccaccatgtcaccagatatgaacacatgtacatctgatcagttccaggagtctctaccacccgtccagtttgactggagtagcagtggccttactaaccctttagatggtgtggatccggagttgtatgagttaacaacttctaagctggaaatctccacctcaagcctcaaagtgactgatgcatttgcaagactcatgtctacagtagagaagacaagcacatctaccaggaaaccgaaaagagaagagcacctaagtgaagaagctatcaaggtgatcgctggccttcctgacttaacattcatgcatgccaaggtgttgatgttcccagccacgttaacaccttccacaagctctcaagaaaaagcagacggataactgatgtgaattggacagtttctattgcttttccttttttccatcccttccctaccatcaaaagcatacctgctctaattaaaaaaaaaaaaaaaaaa

SEQ ID NO: 42 - DNA, 726 bp, Homo sapiens
ggcacgagggatgacaaagctcatgaatcggcttttaagaactgtttccatgttggagtatttcatcaaccggagttgggaatggagcacgtacaatacagaaatgctgatgtctgagctgagtcctgaagaccagagagtattcaactttgacgtgcgccagttgaactggttggaatacattgaaaattatgttttgggagttaaaaaatacttattgaaagaggatatggctgggatcccaaaagcaaagcaacgcttaaaaaggctccgaaatattcactacctctttaatactgccctcttccttatcgcctggcgccttctcattgcaagatctcagatggctcggaatgtctggttcttcattgtaagcttctgttataaattcctctcctactttagagcatccagcacgctcaaagtttaagagcatttagccatcgctttttatctggaacctctcagatacctctaaaacagcaaactgtgattctcaagattagaaagtaacaaggaatatgcccaaactgtcaaatgtcacctgttatgtattcgtccctattccttaactatgtatttttatttcagtgagagaaggaaagttgtaaactagcccatagtcacctatattttagggaaaaaaatccaaattgtttcctaacattctattttatgcccttgcgtattaaacgtgaaagtactcccaaaaaaaaaaaaaaaaaa

SEQ ID NO: 43 - DNA, 1331 bp, Homo sapiens
tgccaggaattcccttaaactccacggggctcctttgtatacaacctatatttattcaacctctctcatttccattttgaaaaactggagtagtctgaaactcttttggcttatggtgaccagaaatagtgttctggctggcacctctctaaaagcatcttcttgacgagacataggttgaaatgttaaatgcatctccacttacccacaactctggtgttgtagtaatctgggagcatgcgctcacacaaagccacaagcagccagaaagcttcctcctctttggcataaagcagcagcactgaagtgacaatattcatggcctaaaaaagtgaaagaggatgtcatcaaatacagttgaaaatataagcaattctgttagcatattaaaattactcagttattctcacaagggctggcaaaccttttctgtgaaaagcgagataaatatgtttaggctttggaggctttacacatagtctctgtcatatattcttctgagttttgttttatgaccctgtaaaaacataaaaacctgagtccttgaaccagtaagtgtgcagggtcttccttaacaccaatattcaccagacagagccccgaactcatgctggcaaacccctattccaaaaatttgcccaaaggctatttcacaaagcttttaacctgttaaaatctctcagtgttcttaatccttaattcagtgaggtaaacatttcctttgtaactttccgtaatggtttctataatcaggtacacatggctccaggctctcctgagagaacaacgaaacctttcagacttggagtcctcacccaacatttccatacggagagagatggtagtgataactgagagtgatttaaattctaaagtaactgtagtttattaaaagatattatcagatacctcataaccactctagactcaactactttaatagtcttcttaattaaaaagaggaagatcaaaaggtaaatatgaactttatcatattagaggccaactacctcctgtacttcttttgatctcccagaaaccggtaactgttcatcaggcttctacaattcaatttcaaaaaaggtattttggtttaataggctctttcttgtaagtcttactcattatgttcccaagtgacatcatcatggaaattccacttgagaattaacctgctgatcctagtacatgatgatggtccctgccagttccttagtcatttagcggagataggtttttttaggggtctaccttgtaacaggctctggactaggtattggaggatgggggaggaattcgatatcaagcttatcgataccgtcgacctcgag

SEQ ID NO: 44 - DNA, 1010 bp, Homo sapiens
  misc_feature (350)..(350): n equals a,t,g, or c
  misc_feature (584)..(584): n equals a,t,g, or c
ggcacaggtttaaacgaggtgagttcacataacaggaattctggaactgcttgaaaactaggacgattgggcaatatcggccttaactccacctgatggcaggtgacccggatagaaaatggccctgcgtttagccaggatgtggctctccagcttggcttcagtgtgatcacttgtcagtgcgctttctctttcgatagtgaaatccttctctatacctatgttttgttttgtttcttaagttgggaaacagaatgggccagggaggttgagtgactgaagaccaagggttggtgcagcctcctcgccgcgctgcgggggctgggccgcacaggcttctgcccttctcnggtgtccaggctccttgggtratgctggagttktmatgsccgcagttcagtgtgagattttttaccaggtattgcgcttaaagggacatgattttccattttcttcgcccggacaacttgaatgaaatgggcactgttgattccacttctgtcragragcttcggggctcagagaggtgatgacgtgcccaaggtgacgcaactcgtgaacagccgtgcctgccttgggcgcanctccggcgccagagctgggctcttcaacacggcatttagcgcagaaagtcgtggttcaggcagtatgggccgctgtgacaaaacacctaagactgggtagtttataaagaacagacattcaggccaggcacggtgactcacgcctgtaatcccagcactttgggaggccgaggcgggtggatcatttgaggtcaggagtttgaaaccagcctggccaacatggtgaaaccccatctctactaaaaaaacaaaactagctgggggtggtggtgcatgcctgtggtcccagctacttgggaggctaaggtagaagaattgcttgaacctgggaggcagagattgcagtgagccgagatcacgccattgcactccagcctgggtgacacagtgagactccatctcaaaaaaaaaaaaaaaaaactcgag

SEQ ID NO: 45 - DNA, 1219 bp, Homo sapiens
  misc_feature (575)..(575): n equals a,t,g, or c
  misc_feature (582)..(582): n equals a,t,g, or c
  misc_feature (606)..(606): n equals a,t,g, or c
ttttttttttttttttttggacatgtctatggaaggataattccagaagtatcatgcaacggtagccaaggcacaggtcctgtctttaagcagtttatggtatagtggggaaaaggggtggtaaaaacacaaaatacctcccatgcaaatgtcctaactctcttcattaatcaatatctacatgatcccacaggtctacttctttatcttcatctctgcaggactagatatttgatagttactactttcccaatgctaacttcttcatttatcctgtcatattttgtttgtttcagtttttatttttttgtttgtttgtgttctgttttttttagagacagggtctcagtctgtcactcaggctggagtgcactggcacacaaaaagctcagcagcctgggacttctgggcacaaaccctcctcacgcatcaacctccaaagtgggtaggactacaggcatgtgccaccacatctggcaaatttttaaacttttttttttttgcaaagacagggtctcactctgttgcccaagcgagtctggaactcccgggcacaagcaatccacccacctcancctctcnaagtgctgcaatcacaggcattanccaccttgcccagcctgattttgtttttaatatatttcacagtcacattcgctgaaacttacttctcccttattctcttatatttcagtacttttcaacattctgtttggataacgtcacttatctggtgccaaatacttaaatcgtagtctgatctattcccaggaattcagcattaccagtgttctgactcctaaagctacattcttctgcttatctatactcacaaatttcagatctatatcctgttaaatatcacttgcatttttcaaagataccttaagtacaggatatcttaaccagaatcattccaaggaaaatgtgctgctctttccacttttcccaaggttggcaaatggcaccactttttcctcaccctctcgggtaggtatctttggtatctcccactgttctccatagccttatccacatttctgcttagcaaatccctacttttccacccttcaaaccacggctatgattttttgtaacccacactcaagtcctcctctacttcttgtagcatataatcagtctctccatataatgcctctcatgcctttacttttaaacatcaaatctgctcgtgtcgaattctttggatccactagtg

SEQ ID NO: 46 - DNA, 2630 bp, Homo sapiens
gctgcacttcccaggccccaccagccgcggctccggctcgtagcccacagcccactgccggcggctgggcgctgccgaggctcggggcgcgcgcagttggcgtctgccagtgccaagactgtgccgcccccacagccgaggcgcgaaagggggacgcccggcctctgggccgctgccttcgctttctcttcgttgttgcgaacgccgtccgctcaggaggcgccccgcgaccggcgcgatgagtgccaacgaggaccaggagatggaactagaagcattacgctctatttatgaaggagatgaaagtttccgggaattaagtccagtttcttttcaatataggataggtgaaaatggtgatcccaaagccttcttaatagagatttcctggacagaaacatatccccaaacacctccaattctatctatgaacgctttttttaacaacaccatatcatcagctgtaaagcagagtatattagccaagctacaggaagcagtagaagctaatcttggaaccgctatgacctatacattgtttgaatatgccaaagacaataaagagcagttcatggagaatcacaatcccatcaattccgcaacatcgataagcaatatcatctcaattgaaactcctaatacagccccatcaagtaagaaaaaagacaaaaaagaacaactttcaaaagcccagaagcgtaactggcagacaaaacagatcacaaaggagaacttcctcgaggctggaactgggttgatgttgtgaagcatttaagcaaaactggctctaaggatgatgagtagcacttggaatttgagacaaggaaagagcattctttaaagagtaaaactgggttcaaaatctttcattactattttctggtattgaggcgactttttataaaacacaattttttgtatgtttcttacattaaaaaggttgtaagttgaaagttcatgaagagatcttgttgtattaaattattttcacaaacttgccttaataaaaggtgaaaatgttactgtttagtatactttatgaagccccttgagctttataaatggacaggcatggggaataagaatcagtgttaatttaaatgatcttatcctggtggatgtgctrttttcttaaaggagtatgaagcccttttcaaactatcatcccagtggagcggagtactcagtgaacagttactccatagtgcaatccatattaataggcttcttctcttaagtcttcatctcttcttttgcttaattactgaaccgtaaattacttcagagaaatttaaatgctggtatttgaactttatacatgatactttttgtagtttcttttaatttttgaaagatgaactgcttccttttaataaattaatatctatttatacttttctcttgatttgggtcaagatgtttgatcatgagtgctttgagtggtatgtggaataggagaatataaaaacaaatctgccaaatacactagaaagcattttagtaagaaatgctggccctttcttaaaacatttctcttgcatataccaggatgggagtaaaagatgccttaatatttagtttttgtattgttggagacattgattttaataaaatcctatttatctgctgttgtgtgcttttagttgttggataactgaggtctcctaaatggttcaacataaaaccacatttcaagtcttgtttctttttggagtgtcttttcaagtattcaaatgtatttctcaacctgagcatctttttaatcatatacatgggagtcttttaaatgctgaactgttacacatgcttgatttaaaaataataataatagaggaaactattggtctagttgtgccaagaaaagtttctgatgtttatgtgtgatgtacagtgattttgtatatgcgcccagctttaagaacacataaaactattacgtctggtaggaagattgttagtgcctcaagttacacctgtgcagcttgggtctgagttttgatagaacagtaaacatttaaagaagttaagagcagtttgagctgtatccgcggtttttactcgttaactgacttcagctaaatagtttgaattatagagtaagtataattacagcaaaggagttaatctcattttcaaagctgtttctcattttatttcttgaattaatgtagagcaaaacatgttaaaattcaggacmactggaatatggcaacttatgtttcagggttgtgtgtgggtagtatttgtggttgtattggtttgttttttgtttttggagaaacatctgctagtggaataaaatactttgttttgctctgaagagactgaaattgttcaggcttattatggctcatagattacagagaatgatgctagttacatgccaatgaactatttttactctttttatatgaaatgtaaaaatttgtaggggttctggtgatggtggtacctcttattaccttatgtaaaacacttgaacagcctcatcaatattgccgtcatctgtttaacactcccagtatattttctcaatgtctgtttacttaaaattttgtggagtgacataattaataagcaataaagtctgaattatacacagaaaaaaaaaaaaaaaaaaaaaactcgag

SEQ ID NO: 47 - DNA, 1419 bp, Homo sapiens
aattcggcagagatttaccttagcttactgtaatttttttaacttaataagctttttaacttttttttaaactttctgtctttttaaataacacgtagcttaaaacagcctcataatatggatccactgtagtatatgtggtctgttgtgttgacagaaatgtcattaggtggtgcatgactaattacttttgggcctcagcctcatcttgtactgtttttccccttgctttcctttgctccagttgtgtggggcctccttcattctcctgtgctcaccatattctccaccaggaatcttggcacttgttcttttcctctgcctggaatgcctttctttgttaacagttattcctggtctttagagtttggctcaagcatcacttttaatgaaattttctgtgtgcgtgcttgcacattttcataagataaagagattggactgtactgatattcatcaccgactccaacaagagcgaaactccatctgaaaaaaaaaaaaaaacaaaaaagttacaactttggcaccaactcaggcctaagtgtcatcttccctgaattactcctgtgcttctgcatgcatctatctcttctctattatctctttggatgtctatgtccccttccaaactctactgtattaaatgtcctgttatgatggtcactcacaccctctcaggtgtttaggaagcccaataacatcaattgaggacgtaagtaagagatccagtcctcagcctgtaatcacacctttctgccccctgaaaagatttaccaccataatctgaagcatgtcctcctaaatggacccataactaatcatagttcactcattagctttcatatattggatgtctccagtatcaacaccctcccagataccccatccagtatgtctagttatcgatttgatgccaccacttattggtctctgattcttcatatggccaaaacaaccctctggatatccacagtgaatattatgtcaataccaacgtcatctcagctgaagcagtgtgcatggttacagctgctaagatcaaaaaccttgggctcatgcccgattcctctttcatgctcctatcatccacattagaaaatctagctgtctgcaaggcatggtggctcgtgcctgtaatcccagcacttggggaggcagaggccggcgagtctcctgaggtcgggagtttgagactagcctggccgacatggtgaaaccccgactttactaaaaatagaaaaattagccgagtgtggtggtacatgcctgtgatcccagctactcgggaggctgaggcaggagaatcacttgagcccgggaggtgaaggttgcagtgggctgggattgtgccactagactccaggctggacaagagagtgaaactccgtctcaaaaaaaaaaaaaaaaaaaaaaaaaaaa

SEQ ID NO: 48 - DNA, 1052 bp, Homo sapiens
gctgccgtgtgcacggccgtctggtctctctcccacacgtgtgcgcaacctgtcatggagatgtgagggccttgtgtgtgcttctgtgtgtgactgtgtgactgcgggtccagacccccgcctggcggtgatgtgggcccttaaatcactcttcctgctcaccccctccccagtgattcggttttactttgcagcactgtggatccgggcagctgggcggcttctcgggggtgggggatcccccaccccgcccacaagtctggccccagggttctcggaggcagggggtctctgttagtgcgctccctccagctgcaggcacatagcccgagctcacagctcgcctgagtcgacgccggctggggtgaaagctccaagtgggcctctggccttcccgctgctctgggtccagagtgtctggagcatgtggcacagaccagggccccttgtcctccgaggagggtgggacatcctctctgtctcacgcccctgggtggagattctggctggcctcctctccctgtttgccaaggtcaaagtgggccaagggtgcaggtgcttagcctggttccctctcccgggccccgaggttctgtgggttgggcagattggagacaggactcgtgtaagggctctgctggggtgaaggatggagacagagaaaatcaagatcctttcacaagttaattctacgtctgctgagccccagcccccgacacatcaccctgaggaggtgctaggcttctctgggccccctgtgccccatccacatgttgcagagtaaatctggccccttggacctggggtccgagatggacgcctggctgcccctcctggactgcgggtgacagctggcgagacactgcggggcttgggtgcggggagatggagtggggctgagctgcatttttccagccaccccacatcccacagaaggggagtcatggtcagtgccttgagctggaaagacgggcaatgcttccggcccacaccaaccaagaaaaccaccaggggctcattcatcctctcaaaaaaaaaaaaaaaaaactcga

SEQ ID NO: 49 - DNA, 2280 bp, Homo sapiens
ggcacgaggaattatgaagttgtgtgccccatgatggggagtggactttgagatgagacactggcctgcattataagggacctgtcatttccactggattttagtttgtgtggcttaaagagaatgcctttccagttaggtatgctcgtggctttgaatataaatgggaacagtctaacgctagctattttgctcctttccttctgattcccagctggtggaaatcggtgctgcgtactcagcaaccttacatagggcaggtatggtctcatgagctgggagcaagacaggttttctttcttgaaatgaggtccccccacttccctttgtctttgctgctttgctgctttctttccattgtcttgctgctttccttccttggatctgtagacactcagagaactgcctggccagaccctatagaggtacaattaggtcactctagggcatctgaccatgggtggcagttttccacaaaattcacttgttctgtgggttgaaggaaatatcaaaccagctggcaagttctaggcctcttgtcttcttggtatcttctagtcaaatttacagtatatcccttctgatttaatatttgcaggaaactgatgcatggagatgctgacatcccacgtgttaattctggggcaccctgatcctattctctaggatggcattgcccctttctgagccatcaatccaagtcctttccccgtatttctatgtggttggtatataattcagtgagacactctttcttgctcctgtacttgaatgtaggagtgtattgcagtggccctgaagatcccagtagagtctggggagggttgattaggacagagtgatttccaccctgcccctcctcaagcagaggagctttcttcaacctttttctctttgaagaaattgagactcagggaagaagtattgtcgcagatgtgatgcggtgagtcactggtttttaaacctctgttttggcgatgggctgggtatggatgagttaaggtttattcccctaaatctgtattacactctaagtcaacattgtgtccttaggctgggcgcagtggctcacgcctgtggttccagccctttgggaggctgaggcgggtggatcacaaggtcaggagatcaaggccatcctggctaacacggtgaaaccccatctctgctaaaaacacacacacacacaaaattagccgggtgtggtggcaggtgcctgtggtcccagctgctcggggggctgaggcaggagaatggcgtgggcccgggaggcagagcttgcagtgggctgagatcacgccaccgcactccagcctgggcaacagggcgagactccgtctcaaaaaaaacaaaacaaaaaaacaaaaaaaaccattgtgtccttaaattgaatatccttgatagaaaagggtagggccttagcgtactggctctatggaatacgtactctctgtctttcagtagaattcagcagtcattgttcacctgctttttgccagatgttgagctaattgctattggagtaggatggtaaagattggtcttggtatgcttggttgagaaggcacaactttttacacatgtgggcctgcaaatatctatgcagatttttttgagactttaaaaagcatgtttaaaagattatttcttctaatagagactccaaaagtactcaattactgtcttatcctctgggatcctagttcctattacttgtgcttgatttccctctgctgattagataagttaccttgaaagaggcaaagaaagccaaatgggaattgacttgtttttcttcctgtcattaaaaaaaaatggaaataatttcaaatttatagaagttatacaaataaaattatacaaagaatatttgtaatcctttttatccagaacctcctattgttcgtgttcattttaccccatttgctttatcatttgcacattctctctccatgtatcaatacataattgttttctgaatcattaagaggagagataattggcccaggcacggaggctcacacctgtgacctgagtactttgggaggctgaggcaggaggattgcttgagcccaggagttcaagaccagcctgggcaacagagtgagatcctgcctctaccaaaaaaaaaaaaaaaaattagtcagacatggtggcatgccgctagctactttggaggctgaagtgggaggttgagactgcagtgagctgtaattgtgcactgcgctctagcctgggttacagagggagacccttgctcaaaaaaaaaaaaaaaaaaaa

SEQ ID NO: 50 - DNA, 1811 bp, Homo sapiens
  misc_feature (1804)..(1804): n equals a,t,g, or c
tccacggattctctgccacaaggatatgtggctcagtgtggtcaagttccttccaaagaacctgcacttggtctgcgtggacatgccaggacatgagggcaccacccgctcctccctggatgacctgtccatagatgggcaagttaagaggatacaccagtttgtagaatgcctgaagctgaacaaaaaacctttccacctggtaggcacctccatgggtggccaggtggctggggtgtatgctgcttactacccatcggatgtctccagcctgtgtctcgtgtgtcctgctggcctgcagtactcaactgacaatcaatttgtacaacggctcaaagaactgcagggctctgccgccgtggagaagattcccttgatcccgtctaccccagaagagatgagtgaaatgcttcagctctgctcctatgtccgcttcaaggtgccccagcagatcctgcaaggccttgtcgatgtccgcatccctcataacaacttctaccgaaagttgtttttggaaatcgtcagtgagaagtccagatactctctccatcagaacatggacaagatcaaggttccgacgcagatcatctgggggaaacaagacgcaggtgctggatgtgtctggggcagacatgttggccaagtcaattgccaactgccaggtggagcttctggaaaactgtgggcactcagtagtgatggaaagacccaggaagacagccaagctcataatcgactttttagcttctgtgcacaacacagacaacaacaagaagctggactgaggccccgactgcagcctgcattctgcacacagcatctgctcccatcccccaagtctgacgcagccaccactctcagggatcctgccccaaatgcggtcggagcgccagtgaccctgaggaagcccgtcccttatccctggtatccacggttccccagagctttggggaccacgcgaaaacctccaagatatttttcacaaaatagaaactcatatggaacaaaataagaaaccccagccatgaaatctaccatgaagtcttcaagttcatgtcactgacaagcttgtgcaaagcagccaccttggaccataattaaatcaaggacattttctttgagacattccttatagttggagactcaagatatttttgttgcatcaggtgtattcccttgcatgggcagtggcttttataggagcattagtcctcattcgctgaaccctgttgtttaggtctaatttaagttttacatagagacccatgtatgactgcagcccattggctgcaagaccagggaggaaagtggcaagctgtagaaaatgtttacacgcatggaggggcattgctccagccctcagagcgtccggagcagcaggrtacatgggtgggaggttcattcagcacccaccagtcaggtatgttctgagtgaacccacagcagtcgcagaatgagcacctggcagggtgggtttcctaggaataatttattatttttaaaaataggcctaataaagcaataatgttctagacatctgtctaagtaatcagactcaggttccacacacaagcaacaactcgtgggcctcttttctatttcaatgtgctactaagaacccttggatgtaacatactagttagttaatgaattctgtgaattctgtgaagagtaatgtgattgaaaataagtctaaacagctgtaaaagtgaccacaatgacatgaaataaatttaataagtctagatcagcaaaaaaaaaaaaaaaaaaaaaaaaaaaaaaaaaaaaaaaaaaaaaaaaaaanaaaaaaa

SEQ ID NO: 51 - DNA, 1434 bp, Homo sapiens
ccacgcgtccggggagattgagttagagttgtgatgtttgggctagaggatgacaagatgagctgctttgtcggttccagatatctccagcccagcagagatggccctctgcagtctagccgtattttgcccttccaccattcttggctgtgacctggtccagctgggccctgaatgaatgtttgcttctcaggccagtattctcccctcctcaccaagccacctccacacagctctaaggaagctcccccaggtccaggcctcaggggagccctgccctcaggccgaccctactgccttttcagagccctccctgccctcctcggaagttgctgatgaacctcctaccctcaccaaggaagaaccagttccactagagacacaggtcgttgaggaagaggaagactcaggtgccccgcccctgaagcgcttctgtgtggaccaacccacagtgccgcagacggcgtcagaaagctagcaccatcccggccctccgcctcctggccctgcctctatttattgcattctggttctggccgcgccgcgttgctggggtaagggcaagcactggggtcaagagcctgcacacatgagccttccgggctggaaggctggcgtaggacttggggctgtagcatcatcttcctgaccctggcacctgtgtctacttgctcccgagaagaggagcgctcatgtcttttttgcaccccaagttggctggagcatcggccaccccaagattcatctgtgacctccaggcagcagtctctgctccagaatctctggacggagctgctggcagcttctgcgagaagagagagatgtggaaggcaccttttagaagagagcgtgcctcaggttactgaacttgaacggagactgtagactcccggactttcccctaggactgggggccctgtaggctgctgttggaggactgggtagagacattggagggaagggaagggcttttctccacacaagggcagagagtccgtctagatttcttgctgtcctgccagctctgcccatgcctgaggtggtcctacctctcacgggcaccctagctgctgacagccctttgtggccgccgtccccatcccctgccctcagcacacacatctgcacacacgcagctttgttctcacctctacctgtcattccagcatccctgcctcttgtcacaaactgccccagcaagaatttgaggttctgacaacagtacccatcccccacagtaccccttcagctcagtttctagaaagctcccttttctttgaaatctgcatgttgaattgaactttgtgattttattttttgtttcaaaaaagtttaagaaaatggaaatgggcaacagtgagtgaagacatattttagcactgaatagaatatttttaaaattaaactatttgaaatatgaaaaaaaaaaaaaaa

SEQ ID NO: 52 - DNA, 1359 bp, Homo sapiens
  misc_feature (1005)..(1005): n equals a,t,g, or c
  misc_feature (1128)..(1128): n equals a,t,g, or c
  misc_feature (1342)..(1344): n equals a,t,g, or c
tcacgcgtccggggctgcagtaggtcccggcaaccgcaggctcgcggcgggcgctgggcgcgggatccgactctagtcgtaatggaggcgggcggctttctggactcgctcatttacggagcatgcgtggtcttcacccttggcatgttctccgccggcctctcggacctcaggcacatgcgaatgacccggagtgtggacaacgtccagttcctgccctttctcaccacggaagtcaacaacctgggctggctgagttatggggctttgaagggagacgggatcctcatcgtcgtcaacacagtgggtgctgcgcttcagaccctgtatatcttggcatatctgcattactgccctcggaagcgtgttgtgctcctacagactgcaaccctgctaggggtccttctcctgggttatggctacttttggctcctggtacccaaccctgaggcccggcttcagcagttgggcctcttctgcagtgtcttcaccatcagcatgtacctctcaccactggctgacttggctaaggtgattcaaactaaatcaacccaatgtctctcctacccactcaccattgctacccttctcacctctgcctcctggtgcctctatgggtttcgactcagagatccctatatcatggtgtccaactttccaggaatcgtcaccagctttatccgcttctggcttttctggaagtacccccaggagcaagacaggaactactggctcctgcaaacctgaggctgctcatctgaccactgggcaccttagtgccaacctgaaccaaagagacctccttgtttcagctgggcctgctgtccagcttcccaggtgcagtgggttgtgggaacaagagatgactttgaggataaaaggaccaaagaaaaagctttacttagatgattgattggggcctaggagatgaaatcactttttattttttagagatttttttttttaattttggaggttggggtgcaatctttagaatatgccttnaaaggccgggcgcggtgctcacgcctgtaatcccagcactttgggaggccaaggtgggcggatcgcctgaggtcaggagttcaagaccaacctgactaacatggtgaaaccccatctctactnaaaatacaaaattagccaggcatgatggcacatgcctgtaatcccagatacttgggaggctgaggcaggagaattgcttgaacccaggaggtggaggttgcagtgagctgagatcgtgccattgtgatatgaatatgccttatatgctgatatgaatatgccttaaaataaagtgttccccacccctgaaaaaaaaaaaaaaaaaaaaaaaaannnaaaaagggcggccgc

SEQ ID NO: 53 - DNA, 1588 bp, Homo sapiens
  misc_feature (1586)..(1586): n equals a,t,g, or c
ggaagggccaggggatcccgcggcggcgccacggaggcggaggagcaggcggtggaggcgaggcaggaagaggagcaggacttggatggtgagaaggggccatcatcggaagggcctgaggaggaggacggagaaggcttctccttcaaatacagccccgggaagctgaggggaaaccagtacaagaagatgatgaccaaagaggagctggaggaggagcagagaactgaagaataacgaaktatccttagcgtcctcctaaaggcttttccttttggcatcttaaaagcttgagagataaaacggaaaccccagagaggagtctgggcaggctcccagggtgcatgctgcctccataaatctgctgagctctagaccctcaatcaggacttgtcccttggctagcaggatcctgggaacacctttggccctgccctgtgtagagatgttcatgtctgttcctgtgggtcactttgttaagctgaagagttttaagaggtagagctcagaccctggactgggatttttcttaccactcaaacttgctatccacacaccctgcacaccttagataaaaagaacattttaaaagcagagttcactttcactccagtctcccctcttttgccctcactgaagccaaaccacagaagactttgaggaatgagagacaaatgaggtagagctcacctgtgctcaccagctccgtcagggtggtcagccgacccctttccctgggaaccccacttctctctgtggctggcttggttgtcgggggtgagatgccatattgattacagggcagcaaagaaccagtaccaggaatttacttgaccattccccttatttttcatctagaggaatctcggattcagccctttcattgctaagacaccttttcactgaggttcttaccagctcagccaaatctccactctgctatagcagaagcaataatgtttgctttaaaaagatttcttgacctatgccttttcttagaaagtttgatagattagttagaacttcagatcatcagatcagtctcaaatgggtttcttggaattttatatttgacaatatttatactataccaaactcatttgcagttcttaggtttgttggttaaaacatttttttaaagcagtaagtttatagaaaatgttttcatttaatggaaggctggggaatgtccagcatcaacccctatggcatgcattcccagtggccttctcatctgggcctggaacctttggttcagggcttaggggagaacaggccacatggcaacagccacacagtcattgccttcaacacagagccacgtgtccccaaacagcaatagtcatgcccttgtccaggctgggatctaattgatacaataggtcgttgactccctcctagtagagctatctaggtttgtctggaaagtttccgaccctggcttataggcaccacacctcatgtactcctcatggcttggatctctgtattcagcctttgttcagtccaataaactttgagtagatgatctcaaaaaaaaaaaaaaaaaaaytsggggggggcccgtacccattggcctttagggngc

SEQ ID NO: 54 - DNA, 2253 bp, Homo sapiens
  misc_feature (28)..(28): n equals a,t,g, or c
  misc_feature (100)..(100): n equals a,t,g, or c
atctgtgtgcagcaaccagaaagggatnaacttggccctcttgcgggcgtggacaaggtctcttccttaccctttctgttgccagtcagcaacctgtaantcacattctcttcccagtgaatccctgggagcgcctgaccctggtgggctgttcagcttcctgctgctggggccagcaatttttgaggatttatctttaggccaggcttgctccgtacttatccctgctctcccatttctctcttgtttgagagagaatgaggaagcaaagagtgagaaagaataggggctgaagacgccactcccagatggctctttctatcctgctcttctgttgaaacacacgtgctgtgggcctcaggcgtttctgaagtgctctttcttggattggacaggagatcagcagcgtgcacatctgctgtggtctgaagtggtttgcaggtcagcctcctctccctagtgtagagcaagccagtgtccttcgaggaacccacccggctggccgggaagttttacagcaaggcgcctgccttgggataattccttggtgaaattcaccttccccccgcctctgtctggagccccatcctgtgttatctgtggtttttggacccctaatgtcagcttggctgtaggactccccgaggtttggtatgtgctagaacaatgggaggctgtgatttgctgtgtaagctcacatccagccttggaatctaacgggcattcacaacccgagttaccactttccactccctgcttaggattctgttccctgggctgaaactgaaataagctaattttttgggtcayggtggcagtaggggaacctaggagggtgtgagtggcatttgtcagggatttagcccatgacgtgtttcttgaaccctactttctggaagtggagttgactctggaagttttctagcaactgaacaaaagctcaggtttgtcctggtcatgcacatgccttaagccagttccgtcttccctagaccttggcatcctgtgcttctatttcttggaatacgttctcctctgacctgcctgtaccacgtgggtcctcttcaagtactgttttgaagctgggctcttttgtgtagctcccacccacctgtagggctagctcggcttaagggaactctccccattggcaaaccggacccggccgccgccaggactgtgtttccaaaggttccccgcccccaaccccagcatcagcctgtagctcccctgctgaggcagtgtggttatgttcccagcagtgggggtcagacgcccttcctcagaactttctagttgccctctacctgactcctgacttgtattccttttagcagtagccttcttccctcggggagccaaagagtgtggtgtgtggcgctatattgtggctgctatttcatctggtttcttttaatgtgaggaactcacatactgacttcagtgggactcggtgagccggggccgtctgtgtggtgggaccccctttagcgggactcagtgagctggggccgtctgtgtggtggagccagggcctctccctttagtggagccaggttgtcgggccccgaatgtcactggtggatctaagaagggctgagtggtctgacaccaaaacatgccgcagggagggctgtggtgccggtgcttccaacaaggacagccctccttgaccctgaaaggaacactggcttgaaggactgcagacaggctctgaggggcacgccctcctcagcgagaggcagcaaggtggccacagtgtcactggtcaggtgcttctcaccacgggaaagccgccgacctgtgactcgcttgagatgggaaagcggcgccacagaccccgggtctccttggctgtctgtgggccgcccctggccaccttgtcctggctcgcagggtgcaggagcgcctcgttctctgggtggccggcttgctgctccggtttgggctgtcttaccataamaccgtcccagggctctgcaggccactgtgaacgctggctccctgggcagtgctcctccgtgtggactgtgcctcaggccagggctcaccagctggggtcctgtccggaaggatgggatctttctgggactgcgccggacagagtggggagctcctagtttgtggggggaagctttgatatccatgccacgtccatccaccccaccccttttcgtcacgagcacaatggtcttacattggatttttgtaaaaaaataaaaataaatggagactttaactcaaaaaaaaaaa

SEQ ID NO: 55 - DNA, 746 bp, Homo sapiens
  misc_feature (662)..(662): n equals a,t,g, or c
  misc_feature (672)..(672): n equals a,t,g, or c
gttaagactcttttgattcctgatttagaatgtataataggtgctttataattgattawgtccccagtragactcttaagcttttttgagtacaagaacaatgccttatatgtattcatcgcccctgccaatattttacacatagtargtcttgtcctagargcagaaccaatttggacagcagttttamcaattcagacaccctgtaacatgttgcttctgtaacaatccatggctttggacttaagcccagtgaaagcacattagtggttatgagtttctccctgtaaggtttttcctctttgtctcctttctattttttggtacgtgagcagcctctgtctctctgtagggaagcaacagacagcttcagtgagtacaaatgttatattcacatgtggaacatagccccagagataatcatatgtaccagtgatccgtcagtagatgctattacccgtgtggttcttttatcaaaggaattaagttctcttgatgtgttaataaacagtacttttttggccagctctggagtggatgaataggtgtttggatgtctgtctagattgacagctttagattgcttttttcctgaaatctggtgattccagatttacagtgaattttctcttaagttgtgttttcaagtgatcacaccgaantggtgggcancaattctttcttttaccaaaaaaaaaaaaaaaaaactcgagggggggcccggaacccaattcggcctatagtga

SEQ ID NO: 56 - DNA, 1728 bp, Homo sapiens
  misc_feature (165)..(165): n equals a,t,g, or c
  misc_feature (167)..(167): n equals a,t,g, or c
  misc_feature (198)..(198): n equals a,t,g, or c
gcggagatcgaaccctctcctccgaacccctcctttcgccttccccgcctcctcccctccgcctcgagcaccgcgcgcgcgcattcggtcccagccaccgctaacactacaggctgcttacccccgccccctccaccctacccctggcggcctcaggcgacgccnantgaggctgaggctgggggcgaatcgccgcanagctgggtgtcggcggcgcattctgattggacagcggggaagcccgtcagcctgttggccccgctgatcccgccccgtagcgcagggcagcctttaacctttagccccagtgggcgccagccactcagatcgcttcttgttggtatgtgtagcggcagtggccgccggcggagcagtctgagcccgacgatgaggccggggacgggagctgagcgtggaggcctcatgatggggcaccctggcatgcattatgccccaatgggaatgcaccctatgggtcagagagcgaatatgcctcctgtacctcatggaatgatgccgcagatgatgccccctatgggagggccaccaatgggacaaatgcctggaatgatgtcgtcagtaatgcctggaatgatgatgtctcatatgtctcaggcttccatgcagcctgccttaccgccaggagtaaatagtatggatgtagcagcaggtacagcatctggtgcaaaatcaatgtggactgaacataaatcacctgatggaaggacttactactacaacactgaaaccaaacagtctacctgggagaaaccagatgatcttaaaacacctgctgagcaactcttatctaaatgcccctggaaggaatacaaatcagattctggaaagccttactattataattctcaaacaaaagaatctcgctgggccaaacctaaagaacttgaggatcttgaaggataccagaataccattgttgctggaagtcttattacaaaatcaaacctgcatgcaatgatcaaagctgaagaaagcagtaagcaagaagagtgcaccacaacatcaacagccccagtccctacaacagaaattccgaccacaatgagcaccatggctgctgccgaagcagcagctgctgttgttgcagcagcagcagcggcagcagcagcagcagctgcagccaatgctaatgcttccacttctgcttctaatactgtcagtggaactgttccagttgttcctgagcctgaagttacttccattgttgctactgttgtagataatgagaatacagtaactatttcaactgaggaacaagcacaacttactagtacccctgctattcaggatcaaagtgtggaagtatccagtaatactggagaagaaacatctaagcaagaaactgtagctgattttactcccaaaaaagaagaggaggagagccaaccagcaaagaaaacatacacttggaatacaaaggaagaggcaaagcaagcttttaaagaattattgaaagaaaagcgggtaccatcgaatgcttcatgggagcaggctatgaaaatgattattaatgatccacgatacagtgctttggcaaagttaagtgaaaaaaagcaagcctttaatgcctataaagtccagacagaaaaaraaraaaaagaagaagcaagatcaaagtacaaagaggctaaggaatcctttcagcgttttcttgaaaatcatgagaaaatgacttctacaaccagatacaagtaagatgtttagtgt

SEQ ID NO: 57 - DNA, 1796 bp, Homo sapiens
aggggcaaacctaacctgggatctgacgggatgcgttttgccagctcagatctcctctgctactggaaacttgcattatttacagccattaggagctccctggcttccattccactcatgactagctttacctctttgaccccactgtattattgtctagcccagttcagctgaatctttcaacacaaaatatacagggaaccccttcctggggaacttcctttgttattgaggtcttcgctgatggcttcttccatttgatactcagtctcagtcacagtaggattacggaatcttttgccagagtatcaatctacatgggtgctacacattactgaaaaaaattaggaacatggtgctagttaattcaagtcttcatgtaaaacttcttctatcatagtggacattaaaaaaaatctctctgcaaagtgcattgaccctacctctagtagatgaatgttgaacaagtagcctatctaggaagcaagtgactagcatccatgggcatcccacaggttgtagtccagccccgatcttggtggttgggattgatgttgctgccaagtccctccgtttcatgttcaggctctgcctatgttcctggtgtctggtacctgatttttcaggatgctgacatttacttcttgcccacaacaccatataccctaagtcttgccaacatctttgaatgtcttctgctggtctgtctctcctccgttgttcttttactatgtcccaagtgcatgctttgttcagtatctgcctaagtctcaggatamtgattttagctttttactaggtcctgacattcccgtagtttcctcttacctttctggacatgccagacaaactctgaccttaggttctgtgaaaactggtacctgcagaattcctcagtgtttgtttatatgaaagttcattgtgcctcttgattgtgggtgagttgaggaaaagaggtaaagcagtgggcagaggttgcaacatttatttggttataggacacctttgctactggagcatcttgtagggtaatgtagttcagaacatgcatggagaaatgctgccatagagtagtagtgacatttgggacttgaaaaaaatcttaagagcaggtataattccctcaacaacagaagaacatcagtgctttagaatgtttgattttgaactttcttgatgttttctctgccgttctgtagtgttattctaattaaaatctttcctctaaactctgctcttttttttccaattgagcaaattcggcatttattgaggccctactacatgtcatatgctgttctatttgctggaaacacaaatgtgaatatggtaggcctgcccttaaacaatgaattacagtgtaaaatgaaccttttataaagctggtcctatatcaatctaattattttgtttttcttcatttcaggcctaagacagctttattttctttccactccaaataatgaagaatccccttagggcaaagaaggaatttctgagcatgttataaaaaaatagaaaataggataagttgcgtgaagatttaatatttctatacatcaaaacctaccataaacaaaattaaaaggcaaatagtaaacttggaagaacatttgtaacataaaagacaaaagtttaatatcataataaaataagcacatagtagcttttagtaaatcattgctgaatgaatgaatacatatatgaattcaaagcaatgaaaaaatcaccccaggaaaagatgtaaacatttgacataggacaagtcaccaaaaaaaaaaaaaaaaaaactcgta

SEQ ID NO: 58 - DNA, 2166 bp, Homo sapiens
  misc_feature (20)..(20): n equals a,t,g, or c
  misc_feature (2164)..(2164): n equals a,t,g, or c
ttggcacatacattacctgntttctcatcaattgctaaaycatcaaacatttattgagcatctcctctatgtagggtataagtaatgctgaggtagtactcgtgacttacagtggtaaaagacttaagttttaggccgtgagccactgcgtctggccagaaatctcttaaccatgggagttaagtctcaaaattctggtgatacaagtggttgaaacttaaaactgtatttaaaaaataggattcgtgaatttgagatagttcataagtctgcaaaaggctgtataaatacatattttacatttactattattaattttgtagtaaatttgagtacagcactctctttatctgtggaaacttcagactctcccctattactttaatttcagtgagacattattaaatataagtgggcttacacatttgttttgctttactgacaaataatacacaacttggaggcttttttttcctttctattcttcctctaaatgttcaacacttttctgattttgtgatttgaggttgtttaatagcttcctgaggctccattgagaccgtatatacgtgacacttaacagtctagccttcctcggtacatatagatatatgatggtggctttgcctgtagtaaattcatgccaaaacataggctttcagtgcctattacatatggctttcagctctctctactgagggatgtaggagtttatttctgaggtctgagcctcttttcctttacttcctttactctttcctaagccttctttataaaaactatgcatgttctattgttttcctttttgattccctttcttttattatccccagtaggagtgacttgtaattctcatatgttagaaaggcagrtctcctggttgaagaaaagatccacccaagcaagtcagcatgtttaataatttttgagggggatctcaaatgtgggaaggattgttatataagacaaccaaatgatgacatgagacaataaatgctataggaattatggaggaataattagctatttattttcttggttagggaagagatattattagttgtagaagtaattactaacttctacattttttattgtggaaatcaaaaatatatatatgaaaataaaatgttataattgacttcagtgtcccataaaccagcttcaacaattaccaaattgtgaccaatctttacacacatgcacaggtgtccctcagtatctgtggggcattggttctaggaccacttatggataccaacatctatggatgctcaagtccctgatataaaatggtggactatttgcatataacctgtgtacatcccgtattatttaaatcatccctagatcacttataatacgtaatacaatgtaaatgccatgtaaataactgttatactgtattaaggaataacaacaagaaaaatgtacatgttcagtacagacgcaattttttttgtgtgtggaatattttcattccaaggtcagttgaacccatggacataggaggctgactgcgtgtgtgtgtgtgtgtgtgtgtgtgtgtgtgtgtgtgtgtgcatacagacacacatatttctgaaatgtaaatattctctttttaaaaaaattattatcacagctaaacaaattaccagtaattcttttatcctcatatacccggtgttcagattttctagattggctcctaatttttttacagattatttgaatctgattcaattcatgtactgtaatgtttgataacttaagtaccctttataggttctcttttacctcttctttattaaattccttgtaatttgttgtactaaatagattgtcttctagaatttcctgtagtctgaattatgtagtattgtttcacatgttccagtgtcctcttatttcctgtgagttggtagttagatctagaagcttgattaaattcagattttctctctttagatcatcaactttagatcatcaacttggatcatttgtttcattttgcttttgatatgttgttttttagaattacctcttaaaattttgatttaattttataatcatgtaaaatgtttataaatttccaaattcagatcagcaaaacacaataaaatctattcagagaaggcaaaaaaaaaaaaaaaaaaaaaaaaaaaaaaaaaaaaaaaaaaanaa

SEQ ID NO: 59 - DNA, 402 bp, Homo sapiens
  misc_feature (373)..(373): n equals a,t,g, or c
  misc_feature (397)..(397): n equals a,t,g, or c
gcccccgggtctgcagtaattcggcactagcacagcctctgcatgggcccagagccgggmcccccccagcccagccccgccctccccagactccgcgcaatcacatactgtatatagacgtgaatcgattttatttttattctttaaattaaggtcgtgataaagtgttgccaaagatacctgctgaattctcgcgtttcaggaaacaaacaaacaaaaaaaaatgatatttgaggagggtcgtgttgactccatatgaaaggacacagctcaaagcttttttgtttggttgtttggggttttttgtgttttctttttttggggtgttttttttttaactgcctggtacaaaaaaaaaaagagaaaaaaaacncggggggggccccggaaccaaatnccccc

SEQ ID NO: 60 - DNA, 471 bp, Homo sapiens
ggcacgagccagcacccacttcccacaggccttccctcctcccctgcctgctgacccggcagctcccgacagcacggccttgtttcccagggaacaatgcatctgtgtcacggacaacaatgtcctttcatgtcaggcgcactggccccggtgcacgccgggacgtggcacaaagggtgctttgtgcagctcagggatgtgagttcctggctttgccatgttggtgctgccgacccggggcctctgtccttgggtcccagttatgcaacagtcagtcgaggctgtggggctggcccaggggctttatctgtctccctctccaacttttgccaagttacccttctgggcttccgccagccaggagcccacactccctcagccctcccacacgctcctctcaactcctagctgggcttcgctgacttgaacctggccgagtttgcgggctcggggctccaaggtgcgctgctg

SEQ ID NO: 61 - DNA, 1536 bp, Homo sapiens
ccacgcgtccgcacatctcccccatagcaccctgccctcatgggacctgccctccctcagccgtcagccatcagccatggccctcccagtgcctcctagccccttcttccaaggagcagagaggtggccaccgggggtgctctgtcctacctccactctctgcccctaaagatgggaggagaccagcggtccatgggtctggcctgtgagtctccccttgcagcctggtcactaggcatcacccccgctttggttcttcagatgctcttggggttcataggggcaggtcctagtcgggcagggcccctgaccctcccggcctggcttcactctccctgacggctgccattggtccaccctttcatagagaggcctgctttgttacaaagctcgggtctccctcctgcagctcggttaagtacccgaggcctctcttaagatgtccagggccccaggcccgcgggcacagccagcccaaaccttgggccctggaagatcctccaccccatcactagagtgctctgaccctgggctttcacgggccccattccaccgcctccccaacttgagcctgtgaccttgggaccaaagggggagtcctcgtctcttgtgactcagcagaggcagtggccacgttcaggaggggccggtggcctggaggctcagcccaccctccagcttttcctcagggtgtcctgaggtccaagattctggagcaatctgacccttctccaaaggctctgttatcagctgggcagtgccaccaatccctggccatttggccccaggggacgtgggcctgcaggctgcaggagggcactggagctgggaggtctcgtcccagccctccccatctcggggctgctgtgtggacggcgctgcctcaggcactctcctgtctgaacctgcccttactgtgtttaacctgttgctccaggatgcattctgataggagggggcggcagggctgggccttgtgacaatctgcctttcaccacatggcttgcctcggtggccctgactgtcagggagggccagggaggcagagcgggagggagtctcaggaggaggctgccctgaggggctggggagggggtacctcatgaggaccagggtggagctgagaagaggaggaggtgggggctggaggtgctggtagctgaggggacgggcaagtgagaggggagggagggaagtcctgggaggatcctgagctgctgttgcagtctaacccactaatcagttcttagattcaggggaagggcaggcaccaacaactcagaatgggggctttcggggagggcgcctagtccccccagctctaagcagccaggagggacctgcatctaagcatctgggttgccatggcaatggcatgccccccagctactgtatgcccccgacccccgcagaggcagaatgaacccatagggagctgatcgtaatgtttatcatgttacttccccacccctacattttttgaaataaaataaggaattttaaaaaaaaaaaaaaaaaaaaaaaaaaaaaaaaaaa

SEQ ID NO: 62 - DNA, 1550 bp, Homo sapiens
ccgggctaggagacctgttctgatgatgtgtgtggtcctcaccacactgccctgcctcaccttttccatagcagtgactgaggttcaaaagagcattaatgggtccgctgatgtcttacctgatatgttacctgacctgcccgtatctctggttctgttatccctgatcatggttgatattattgaaaaactcaggatatatcctcttagagggagtcaaaagagtaagtgttcttttaaatgtgaatattttttaaagtttgatatatttttcacatttctgccactgtgttatctgacaacatgtttaatgataccttttcttagggctaacattactgatagaagattgcaaatgaagatatctaaacataattatttttaaacctaccttgatagctagatagctgcttttgtttgctattcgcattttagtagtactgataaattaaaaattatcaaatagttaataccaaaaaccttaatgtttattccagcaagaaattatccaagtaaattattatagatgtatatttttctaggaagtctcttaaagcttatgtttaaatggattaataaaaagcttagtttggagacttttactacaggaattaatatgactgtggtagttgtgtcctagataatcatgtgtttaattgtgaattataaaaatgccaaagatcacactaataaaaccaagatatggctgggtgcagtggctcacacctgtaatcccagcatttttggaggccaggatgggaagatggcatgagctcaggagtttgagaccagcctgagcaacatagcaagacaccatccctataaaaaaataaaatttaaagaaaactcaacaagatgtgtcacatctcctccaaagtgatgagttgaaactaaatacagattggcccttacaaaaagatattttgttaatggaatattttatttatttagtcgtaaattactccagcctgggtgatagaacatacctctgtctcaaaaaaaaaaaaaaaaaaggaaagaaaatttgcatgcgtgtgtgtgttgaatgtgtgtgtttgggagaagggagagcttcatcatgatcaacaatatttttgtgtgtttaagagtggtgttttatgtgagatttcatttgggggaaaaaaaagcttcctctgctaaatgtttaaaaatcattaacctagggcttcattcagcattgtaaccgcacctgtttctaggacactaccatttctatgaagagatagataggttgccaactctctctccaggcccagctccctggcaatcatgactgcaccacctagaggcaaagtgagcccccatctaaggtcttgtgactactgctgctgctctgggcagtttcagctttgtaggcagagtgacccgtcttggtggggtacaaactggcttgaggctcaacacctttgaaaaacagataaaccttttaacatgccatgttgaattttttctttccaatgttgcatttttccaaaagaacacatactcatttaaaaaagttataaaatagagataaaaaaaaaaaaaaa

SEQ ID NO: 63 - DNA, 2625 bp, Homo sapiens
  misc_feature (780)..(780): n equals a,t,g, or c
  misc_feature (1594)..(1594): n equals a,t,g, or c
cccacgcgtccggtaagatgagttagggtgacttgctaatagacattgtaaatcttaatatttatgtatgtattttattattaccggttttccatttatgatggtaatattgtttcttctaagaatatttatttttccttctaaatattgagataaaattcatgcttttgaaatgttctattcagtggcttttagtatatttgctatgttgtgcaaccatcgacactatccatttctagaactttttcgtcatcccaaacagacgctctgtattcataaaaaaataacttcctacctgtctctccccctagtctttggtaacctttgttatactggtaaactttgttgtgctctctgtctgtgtgaatttgcctattctaggggcctcatataagtgtaatcatacagtatttgtctttttgggtctgtctgatttcacttagcgggttttcaggggttcattcatgttgcagcatataacagtactgcgttcctttttctgggctgaataatattccactgtatggatagaccccattttgtttattcacacatcatttggacatttggaataattctggtttttggctattatgaacaatggtgctatgaacagttgcgtacaagtttttgtgtgaacatatgttttcaattctctcattatatacctaggagtagaattactggggtcatatgggaactggtatatttttggagggactgccaaactattttcccacggtccatgcaccatttcacattcccaccagtaagtaaganggttccaatttctgccattcttgccaacactagttattatctgactttctggttataatcattctaatgagtgtgaagtagcctctggtgtcatttggatttgcatttctctgatgaatgatgctatcaagcacctttgctggtgctgttggccatatgtgtatgttccctggaaaagtgtctgtgctgagccttggcccactttttaattaggcgtttgtctttttattactgagttgtaagagttctttatatattctggattctagacccttatcagatacatggtttgcaaatattttctcccattctgtgggttgtgttttcactttatcgataatgtccttagacatataataaatttgtattttaaaagtgacttgatttggctgtgcaaggtggctcacgcttgtaatcccagcactttgggagactgaggtgggtggatcatatgaggaggctaggagttcgaggtcagcctggccagcatagcgaaaacttgtctctactaaaaatacaaaaattagtcaggcatggtggtgcacgtctgtaataccagcttctcaggaggctgaggcacgaggatcacttgaacccaggaggaggaggttgcagtgagctgagatcatgccagggcaacagaatgagactttggttaaaaaaaaaaaaaagtgacttgatttaagggaaaaaatgactggctatattcagtcagatatggcaaaaagtctcaaggtggtaatgtgaatgattaaggtcttggggggggtgtcccctatcagactacaggtggttaaaggcacagaaaaaggtncagttgggttcttaatgtgaaatgatgagaagcacaactccagtgtgtctctttgtgtagaatgtcagcagacaccccctgctagatgtgctggatcatgggaaagcatttccatttgttactagattgttcagaagttttaatttatgatgggtgtggtggctcatgcctgtagtcccagcactgtgggaggctgaggcaggaggatcatctgaggccaagagttcaagatcagcctgggcaacatagtgataccctatctcttaaaaaagaagaagtttttaaatttgaaataataataggtactggatttatgcaaatgtcttttctgcgtcttttgagatgagtatcaggtttttttttttccttttatcatctgatgatgaacttaatgtttccatttgtattaatggaatactaagtccctctgtgatttctgaaccaagctattcctaggcctgagttttattttgttgacacagaaataaattagaagsccaagcgtggtggcatgtgcctgtagtcctagttgctgaggtaagaggattgcttgagcccaggagttcaaggctgcagcaagctttgattgcgcccactgcactccagccttggcgacagactaagacgctgtctcaaaaaaaaacaaaaacgacaaaaaaaaaacaaaacagaaaaaataaactaaggcaatgacagtccctggcaaatgctgggagggaggcagcagtggtcagggaaggtaaccctgaagcaggacttgtaaagcaaataagattgggaggccaaggtgggtggatcacgaggtcaggagttcgagaccagcctggccaacatagtgaaaccccgtctttactaaaaatacaaaaaaattagccaggtgtggtggtgggtgcctgtagtcccagctacttgggaggctgaggcaggagaatctcgaacccaggaggcggaggttacagtcagctgagaccgcaccattgcactccagcctgggtgacagagcaagattccgtctcaaaaaaaaaaaaaaa

SEQ ID NO: 64 - DNA, 4115 bp, Homo sapiens
gcctgcaggaaccggtccggaattcccgggtcgacccacgcgtccggcgcagacgaggcctgaggcggcggcgcgaggcagtatggtttgaagtggtgaacatggatttttctcggcttcacatgtacagtcctccccagtgtgtgccggagaacacgggctacacgtatgcgctcagttccagctattcttcagatgctctggattttgagacggagcacaaattggaccctgtatttgattctccacggatgtcccgccgtagtttgcgcctggccacgacagcatgcaccctgggggatggtgaggctgtgggtgccgacagcggcaccagcagcgctgtctccctgaagaaccgagcggccagaacaacaaaacagcgcagaagcacaaacaaatcagcttttagtatcaaccacgtgtcaaggcaggtcacgtcctctggcgtcagctacggcggcactgtcagcctgcaggatgctgtgactcgacggcctcctgtattggacgagtcttggattcgtgaacagaccacagtggaccacttctggggtcttgatgatgatggtgatcttaaaggtggaaataaagctgccattcagggaaacggggatgtgggagccgccgccgccaccgcgcacaacggcttctcctgcagcaactgcagcatgctgtccgagcgcaaggacgtgctcacggcgcaccccgcggcccccgggcccgtgtcgagagtttattctagggacaggaatcaaaaatgttacttcttgctgcagattctgcgcaggatcggagctgtgggccaggctgtgtccaggacggcgtggtcggccctttggctggccgtggttgctccagggaaggcagcctctggagtgttctggtggctggggattggatggtaccagtttgttactttgatttcttggctgaatgtgtttcttcttaccaggtgccttcgaaacatctgcaagtttttagtcttgctcatcccactcttccttttactaggtctctccttacggggccagggcaatttcttttcgwtcttgcccgtgttgaactgggcaagcatgcatagaacacagcgggtggatgacccccaggacgtgtttaaacccacgacttctcgcctgaagcagcctctgcagggtgacagtgaggcttttccgtggcattggatgagtggcgtggagcagcaggtggcctctctgtctggacagtgccaccaccatggtgagaatctccgagagctgaccactttgctacagaagctgcaggctcgggtggaccagatggaaggcggcgctgccgggccgtcagcttcggtcagagacgctgtgggacagcccccgagggagactgactttatggcctttcaccaagaacatgaagtgcgtatgtcacacttggaagatattctgggaaaactgagagaaaaatctgaggccatccagaaggaactagaacagaccaagcaaaaaacaatcagtgcggttggtgagcagctcctgcccacagtcgagcacctccagctggagctggatcagctaaagtcagagctgtccagctggcgacacgtgaagaccggctgtgagacagtggatgccgtacaagaaagagtggacgtgcaagtcagagaaatggtgaaactcctgttttccgaagatcagcaaggcggttctctggaacagctgctgcagaggttctcatcacagtttgtgagcaaaggcgacttgcagacgatgctgcgagacctgcagctgcagatcctgcggaacgtcacccaccacgtttccgtgaccaagcagctcccaacctcagaagccgtggtgtctgctgtgagcgaggcgggggcgtctggaataacagaggcgcaagcacgtgccatcgtgaacagcgccttgaagctgtattcccaagataagaccgggatggtggactttgctctggaatctggtggtggcagcatcttgagtactcgctgttctgaaacttacgaaaccaaaacggcgctgatgagtctgtttgggatcccgctgtggtacttctcgcagtccccgcgcgtggtcatccagcctgacatttaccccggtaactgctgggcatttaaaggctcccaggggtacctggtggtgaggctctccatgatgatccacccagccgccttcactctggagcacatccctaagacgctgtcgccaacaggcaacatcagcagcgcccccaaggacttcgccgtctatggattagaaaatgagtatcaggaagaagggcagcttctgggacagttcacgtatgatcaggatggggagtcgctccagatgttccaggccctgaaaagacccgacgacacagctttccaaatagtggaacttcggattttttctaactggggccatcctgagtatacctgtctgtatcggttcagagttcatggcgaacctgtcaagtgaagacactactcattatttttgtacatttttgtatatactgggacagcgtgaaacactggaatccttcatggacgagggcatatacaatgatgggacagtgccacactccttcaataaacgtggctgctggccagaggacgtgagcgtgtgacgggcgccttggcgccacctgttgggtgctcactgcctctgcaggtgcagaggggtcagcagcaggagaagcgtgttgaacacgtggctctcagacactccttgtttttaacgggaagctctttgcatttgcatttcctcaacaaaggagcaaagcagaggaagctgagagtctggcgtgttcttgacgctttggtcttcagccttgcactggctcttctaaaggacttttggagggcagataatttcatctgttaaatccaacacacatttctttcagggaaaaacaatgtcaccaaattttcagagttctaaactcctttccttcaagccggaattttccttttttcagcaccagtaggtactaagtctccagatggggaaataactaaaatgtgtttttctgctttgttcgctcttacttctgaggaaggtttccagtcaggactcgctgtaccaatatccatggaggaatatgggagcgtttcgctctccttgtaggctgaagtcagtctgacttgaaggggcctggtttggatctaagcaaacacccagatggggttctctggtctcagcaaggcttttcctgttgggagtcacagtaaacagaaacccaaaaatctcatcttgggtgttttcagggcttgttttgagttttgctgaatagggagcgcaagacgccctgagcctccctctcactggtggtgataagaggagccgtctggtgtgtcagggtcacgaacccgttacatttcaggacgatcctttttccttcagcagcatttcttactggctgtggctggaatctgccttttatcacagctgtcaccattctcacgtgattcttgtgagactctttttggttataattactatttaatatttagactattttactgagcagactttataaatgagatatctacaaggcacttaaagtgttacagatgttttaccttaagaattatttaagttgtgttgggttaagacagttttcagtgtaccgtaaatgttgtgttttcagaaaaagacaaaacgatggtgctgactggttttctgtatattgcacaacagtcctcaaatacactgatgtatgaaactattcatacatcaagcagcatttttttcactctccttagaattggaactatgcagttaaggcagataaaatgtacagatgtttcatatattacaggttacatatataaatcaaaatttcctatataaaactgatttgggatttggggtggaaatattttgaatattaatttatttttaaagatgcaagataggactttgtgcaatgtatttttgtaaatgcttttcaaaatatctgtctttggtagtgcttctgctgctgccaccaaattgataagatgctattaagaggtttaaataaagagttttaatttttaaaagggaaaaaaaaaaaaaaaaaaaaaaaaaagggcggccgctctagaggatccctcgaggggcccaagcttacgggtgcattcaacgactaag

SEQ ID NO: 65 - DNA, 2196 bp, Homo sapiens
  misc_feature (1921)..(1921): n equals a,t,g, or c
ggcacgagctgagtttgtggctgcatttttatctctggtggctctgctacggcggcgcagaaatgaggcagaagcggaaaggagatctcagccctgctgagctgatgatgctgactataggagatgttattaaacaactgattgaagcccacgagcaggggaaagacatcgatctaaataaggtgaaaaccaagacagctgccaaatatggcctttctgcccagccccgcctggtggatatcattgctgccgtccctcctcagtatcgcaaggtcttgatgcccaagttaaaggcgaaacccatcagaactgctagtgggattgctgtcgtggctgtgatgtgcaaaccccacagatgtccacacatcagttttacaggaaatatatgtgtatactgccctggtggacctgattctgattttgagtattccacccagtcttacactggctatgagccaacctccatgagagctatccgtgccagatatgaccctttcctacagacaagacaccgawtagaacagttaaaacaacttggtcatagtgtggataaagtggagtttattgtgatgggtggaacgtttatggcccttccagaagaatacagagattattttattcgaaatttacatgatgccttatcaggacatacttccaacaatatttacgaggcagtcaagtattctgagagaagcctcacaaagtgtattggaattactattgaaaccagaccagattactgcatgaagcgacatttaagtgacatgttgacctatggctgcacaaggctggagattggggtgcagagtgtttatgaagatgtggytagagacaccaacaggggccacactgtgaaggcagtgtgtgagtcatttcacctggccaaagattccggttttaaagtggtggcccatatgatgcctgacctgccaaacgtgggactagaaagagacattgaacagttcacagagttttttgagaaccctgcttttcgtcccgatgggctgaaactctatcctaccctggtgattcgtgggaccgggctttatgagctttggaaatcaggaagatataagagttactctcctagtgacctggttgaattggtggctcggatcctagccctcgtgcctccatggactcgagtgtaccgagtacagagggatattccaatgcctttagttagctcaggagtagagcatggtaacctgagagagctggcacttgcaagaatgaaagacctcggaatacagtgtcgagatgtgagaaccagagaagttggaatccaagaaattcatcacaaagtacggccataccaggttgaattggtaaggagagattatgttgcaaatggtggctgggaaacattcttgtcatacgaagacccagatcaagacattttgattggcctcctacgattacgcaagtgttcagaagaaactttccgtttcgaattgggtggaggtgtctccatagtacgagagctgcatgtgtatgggagtgtggtccctgtgagcagccgggatcctactaaatttcagcatcagggatttggcatgctgctgatggaggaagcagaaagaatagctagagaagaacatgggtctgggaaaatcgctgtgatatcaggggtcggcaccaggaattattatagaaagatcggctacagattacaaggcccgtacatggtgaagatgctgaaataatggccacaccagtccactcttctgcagtatcctccctggcagaacacggagaatcaggatttcttaaatactcaacagagaggctgagcagagcaaatggggggcttcaccctcatcccgcagctgcagagactggaaactgccttcaaggccacggctggtcatctgctgaccacaccccagatccgccctctcctgcgtgcaccccaaaaaantcacttgcgtttttgaggcttaaatcatctatccagtttctacattttgcatgaggcctgcaggtggcctattttgactcagacggtgaaaaaagcaaattaactcatttggacaccataactcatgcaataaaactgattgtcattcgaggaaaaaaaaaaaaaaaaaaaaaaaaaaaaaaaaaaaaaagggcggccgctctagaggatccctcgaggggcccaagcttacgcgtgcatgcgacgtcatagctctctccctatagtgggtcgta

SEQ ID NO: 66 - DNA, 1978 bp, Homo sapiens
ccacgcgtccggagccggctgccagcactaggtcctgggcagctttgtttgtcccacttttctttgtttcttctcactaaaatgatcacgaagacctttgacaagaggagagatatgcactgtgatattaaattagaaataatttatcaaaatcagacctctcctaaaagaataagaaattcattgtttggcccatcctgaaaggtgaggtggcgagacagtggggtgcctccgtgccgcttcgtgcagcagcaagttcagcctgagatgctggctgtactcagcctttgcaatttttgtagatgtagcttaggacgtgagttatttttccgcagactggccaagagccaggttctaagcttggacctaaggtagaaagctgcccatcgggggccctagctcagccccaccaggccctctgttgggcctgcacacagctctgtggctagaacactccaaggcccttcggtacccatcagagtgggccccttgccaggtggcttttcagttacagagtccagtggaccattttgtagaaccatgcagctccctgcggaaggtggggtagggtgggaaagaggagcaggtctggaggtttgtggaacccagtcccctgcagaatctgtaaaacctaataaatcatggttgtggccattctcacggtggtgattgtgattagacgacccccgggaagcccagacactcggggcctggagttcctccccctgcctgacctagaagcagaaccgttttcagcgctctgccctgttggctttaaggctttgtcttaatttaaggaaaaagatcctcccgggttttatttctctctttcttgagtggactgtttccctataattaaaagaggtggtgagtcctggggcagcttccgcgcctccctgtccacgtgctaacagatcaggacgcccccagcacccctgcctgcttttgctggtggcagtgacgggaccccgactcctcactctcgggccgcagacaatgctgtgagcaagtgtggccatgggcacagaatgtccctttggacgccgctgctgggggctgccaggggccctctggggtcgtgctttgaggcccgtccggttcacgagggggtccgggcagcactgactgcttccgacctgcaggaggcgtaggagcggccctgcgggccctttcacggcagctgctgctgtatagatttgtctccactcagtgacgtgggatttttttgtcttccttttggctttatttttaaactgctttagatattactgctcagtgtttgtgaactttcctagttctctatgttgttagtgcagccagcacccagtggggacctactagaaaaaggaactggcatgcacacgtgcccagcaggaaaagcttcgtcttcacgtcggctgctgccatccagaagaggccctggagcctcacgccgtcgaggctgctctcaggcgttctgttccgggcgaggcttgtgctgcaaggaagggcaccagcatgcaggctgcactggagggtccgggtgctgcgggcagagttcagcgcttgtccaccctcccttagctctgactcagtgcatcctactgtggggacatctcgtgaggggacacgaaatgactgatctcaccctttcccagtattcagagctgtgaacccctgtggcgcaggactggcctgtgtctgttattttggttgtaaatcattctcctgtggaattggcaaaagctacatttttactgtccttaccagcaacagtttgcgtcgtcacatgctgtgagtgtgggctgtggtgtgtccgtgtgtgtacatatgtgtatatgtatatatcacgcagcaggagtgtcattcatgctgctgtcccctggtgaagtgacaagtacaattaaaggtggctctgaaaaaaaaaaaaaaaaaaaaaaaaaaaaaaaaaaaaaaaaaaaaaaaaaaaaaaaaaaaaaaaaaaaaaaaaaaaaaaaaa

SEQ ID NO: 67 - DNA, 1777 bp, Homo sapiens
  misc_feature (1066)..(1066): n equals a,t,g, or c
  misc_feature (1764)..(1764): n equals a,t,g, or c
cgctggggagagtccccagcctaaggccgcccccgaggcckcctcgccgcctgcctcacccctccagcatctcctgcctggaaaggctgtggaccttgggccccccaagcccagcgaccaggagactggagagcaggtgtccagccccagcagccaccccgccctccacaccaccaccgaggacagtgcaggggtgcagactgagttctaggccagtgggtccctgactgctgcacatggcacaggccgttcccttccggacccaggcaggctcagctctggggagggcaccctggtctgtgccttgtgggtggaggcggggcagggctgtgtggcaccgccagggagcgggcccacctgagtcactttattgggttcagtcaacactttcttgctccctgttttctcttctgtgggatgatctcagatgcaggggctggttttggggttttcctgcttgtgccaagggctggacactgctggggggctggaaagccctcccttcctgtccttctgtggcctccatcccctcatgggtgctgccatccttcctggagagagggaggtgaaagctggtgtgagcccagtgggttcccgcccactcacccaggagctggctgggccaggaccgggagagggagcactgctgccctcctggccctgctccttccgcagttaggggtggaccgagcctcgctttccccactgttctggagggaaggggaaggagggggtcttcaggctggagccaggctgggggtgctgggtggagagatgagatttagggggtgcctcatggggtgggcaggcctggggtgaaatgagaaaggcccagaacgtgcaggtctgcggaggggaagtgtcctgagtgaaggaggggacccccatcctgggggatgctgggagtgagtgagtgagatggctgagtgagggttatggggagcctgaggttttatgggcctgtgtatccccttctcccggccccagcctgcctccctcctgcccgcctggcccacaggtctccctctggtccctgtccctctggtggttggggatggagcggcancaaggggtgtaatggggctgggttctgtcttctacaggccaccccgaggtcctcagtggttgcctggggagccggacggggctcctgaggggtacaggttgggtgggccctccctgagggtctggggtcaggctttggcctctgctgcctctcagtcaccaagtcacctccctctgaaaatccagtcccttctttggatgtccttgtgagtcactctgggcctggctgtcgtccctcctcagcttcttgttcctgggacaagggtcaagccaggatgggcccaggcctgggatcccccaccccaggacccccaggccccctcccctgctgctttgcggggggcagggcagaaatggactccttttgggtccccgaggtggggtcccctcccagccctgcatcctccgtgccstagacctgctccccagaggaggggccttgacccacaggacgtgtggtggcgcctggcactcagggacccccagctgccccagccctggtctctggcgcatctcttccctcttgtcccgaagatctgcgcctctagtgccttttgaggggttcccatcatccctccctgatattgtattgaaaatattatgcacactgttcatgcttctactaatcaataaacgctttatttaaagccaaaaaaaaaaaaaaaaaactcgrgggggggccsgtaccmaattcgccanatagtgatcgtat

SEQ ID NO: 68 - DNA, 701 bp, Homo sapiens
  misc_feature (670)..(670): n equals a,t,g, or c
ccacgcgtccggttgcttctcagtatcatgttgcttctcagtattgtgttgcttctgattctatgaatgttcattttaagaccccttgttgaaatgggacagttggcagcggctctgatgagcccgagaagaggcctgcccttgggtgcggagtctccctccgcacgatgctcccacgcgtccaacttgcacccaaggggcttttccctcttccaagtggactccttcaaggaagctgcagctcggtcagcagagaaggggcctgccgccagcgccctggaggaagaggaagaggaacccaagaggatggcttgtctcccagcagccacaccggctttgtgctcagccagttcatttgagtttgcatgtttctctgcactatggattttgagcatttagatttctttaatcaaaagcgttttagtgactccagcagacccactgtcccagaaaagcctgatcctgtagtttatgtagaatgccacatctgcgtcctcaagacctgtttcatccatttgggaaaagatgttgggaaaggccactttgctcgcaggggtgaggggaaggatagagaatctatttttaataaataacattctagaaagaaaaaaaaaaaaaaaaaaaaaaaaaaaaaaaaaaaaaaaaaaaaaaaaaaaaaaaaaaaaaaaanaaaaaaaaaaaaraaaaaaaaaaaaaaaaaa

SEQ ID NO: 69 - DNA, 1063 bp, Homo sapiens
acgcgtccgctaattcccagagcccctggggagaccatgggctgcaggagagcagatgagactgtggctgggtgtccagagctgctgcctgctccggcaccttcatggaatggcattggcctcaagtcctcgctgcctcttactggctgtgtgaccttgggcaggccaggtagcctcagcttcctagagaatgtatgtaatgggcttggcatacagaatatggcacatagtaggtactcaactattattattctgtatttaatagctaattggctggcatttgctcagcactctgcatacattgggccattgcgaggtctctcgcctgcatcttagtttgctaattaggtgcttatctgggaccttcctggagcaggcattctctgctccattctctcctctgtacgcgtgacagccccaacccttgttcccccagcaggagcaaaaggggttgggtatgatgacctccagctcaatgtctaaggatctctgggtttcagtttccccctcggccagctcctcctgcccctaccagccacctcccaagctggggatttcactggcccacccttgttccctgcagaatcctagagtcctccagcccttccctctctggccttcacactccacatcctcagcccagcacaggagccaattttgcaaagaggtaaagagacctcaccactgctgcaccagtctgtccatttcctagcaggcaactggcacttgtttggttttataaattaaggtttcgattcttggccaggcgcgatgcctcacacctgtaatcccagcactttgggaggccaagggttggtggattacctgaggttaggagttcaagatcagctctgccaacatggcgaaaccctgtctctactaaaaatacaaaataattagcagggcgcggtgatgcgcacctgtaatcccagctactcaggaggctgaggcaggagaatcgcttgaacctgggaggctgcagtgagccaagatcacgccattgcactccagcctgggcaacaagagcaaaactccatctcaaaaaaaaaaaaaaaaaaaaaaa

SEQ ID NO: 70 - DNA, 1547 bp, Homo sapiens
gcattttttaacctgaagtatctcaccagggttccactggggaccttcctatcttcccaccctgtcatctacctaggtgacccagcctgttctgttggctttaaaaaaattaaaagaaaaatttttttatggctacacagcagtgtatatatwwrtwgctctgttggctttttatatactctctatatagaaggaagttgaacatggatcataccttctccccagagttctcctttagcttgcaggtgccacaaaattactgtgtcctgaactgagcttctgggcctctcgctgtccccagttcctgtgcctgccgtcacgaggtgtggttgagtcttcatgtggtcttctgtctccattctgtagccaccccatcctgttctcctcacgtccatttgtcctacatcctttcctgtcatccctttggaagaacagccttttatggactgcagtaccttgggggacgaatgcagggtcctgagcatggcatcagtgatgtagaagccctttggggattgaggcctcttcaacctcttcctccagtctcactttctgatcattcacctgggctctctttttttgccaaaacacttttctcttccccagccatctccctccatcctgctttccatagcaccctggcacttatcttagcagaaggccgttactcctctgtttggaaattacctttctcagggtacccaagtttctgagtctcatgcacctgtctccctagcacctaacctcatacctgacacctgggtgaagagctgaaggaatgggtgaagggctgacaactgggtgaagagctgcagaaggaatgcaagctcatgcttttacatttaragcttttacattgattacttgtatgttttgcagtcctccacgttcaacctgcaaccatattgccattgaaatacagactagtattkgtgtttaaggctgtatcttttatttttagttttattttttgagacagggtctcagtctgtcacctaggctttagtgcagtggcatcatcttagctcactgcaacctccgcctcctgggcttaagggatcctccaacctcagcctcttgagtagctgggaccacagtcacctgccaccacggctggctgatttttgtattttttttgtagagttggggtttcacgttgttgcgcagtcttgtctcgaactcctgggctcaagtgatccacccgccttagcctcacaaagtgctgggattacaggcgtgagccactgcgcctggcccagagactgtattattattattatttttgagacggagtctcactctgcactccagcctgggcgacagagcgagactccgtctcaaaagaaaacaaaacaaaacaaaaaccaaaaataagccgggcgtggcagcatgagcctgtagtcccagctactccagaggctgaggcaggagaagtgcttgaactcaggaggtggaggttgcagtgagctgagatcgcgcaactgcactccagcctgggtgacggcaagactccatctcaaaaaaaaaaaaaaaaaaagggcggccgc

SEQ ID NO: 71 - DNA, 525 bp, Homo sapiens
aattcccgggtcgacccacgcgtccgcagtataatgcttgccagaaaaaaataggttaggagatcttgataatagtttaatatgatctgtatttttaaaatactagaaggttacttaatataccacatttccaagtccaaacggtgatcagagaaccccaaaataaaattttggcactgaattcataggaatacaattattttaaagcattagaaggaaagagaactcatagtctgtgttactgtgctgggtgggcttaggtttggggcttgtttgtattttgttttaccaatttagattcctttccacacttgcctgctaccacaagtaaggattgaggttaaatgggttttcatcttttattgggattggtgaaccttttaggattggtaaactgctttctcttgggcaagccaaactatctctcactaattgtttcaatagtggcccctttgaccttcctcttttcctttatctcaaacattaaaaaaaaaaaaaaaaagggcggccgctctagaggatccc

SEQ ID NO: 72 - DNA, 566 bp, Homo sapiens
gagcagtgatgcactcacccagcttctggtcctctttcttccacctcttagagtgccttggctccctcctgtcgtcctggggaacctcggccccagccctgcctccccagccagtcacagctcctccctggtcaccctgagggagctcagggcccggctggtagctgggttgctctgcttctgtccccgactcctgtggagcctggcaggcaactccatgatctgaccccggttaccttgacagccctgcctggcctcccctctcatggcccagccaccccagaacctgaagaggttttctagctgccgtgcatttgccaggctgggttacccaccctactttccctgcctgccctccagtgctgccaggcctagtgtgccagccagcgctcagccttcagtaaagggttcccctgcttccaacctccattgcactgcttcccctaagactgtgacctcctggaaggctggagcacaactgcctctcaataaacgtgttgcaaaaaaaaaaaaaaaaaaaaaaaaaaaaaaaaaaaaaaaaaaaaaaaaaaaaaaaaaaaaaaaaa

SEQ ID NO: 73 - DNA, 1526 bp, Homo sapiens
aattcggcacgagcgaaagcccacagttatggaaagaattactgtctagatggtctgcagaacgtgtttggggtgagtgggagtgaggggcaatgttactttttctccctgtagtttggagtccattatgagctgctgctttttcttctcatcttgtcatcttctggggatgtttgaaggctgagttccaacagaattcacaaagggaataaaacaggattgagattttgaggtgtgcacaaggtggtaagataaagggcatatgagcttcaaaactaatgctgttgcatacatgaagccttttgttttttgaggagctatttttgttattcttgtaacgctccaccttacatgccacatctgtgtgagtcaacagggatcaggtttggtcaccacacatgtctgaagctgggcagcgtctgctctgtgttctgtgtggaatggagaaaaaaacgcctgccctgctgccttccatgttcataggcccagcccaagagagtgacacacagtgctggccctgagacatttccacaaagtggtcaactctgccttgcatcctaaaactttttgggcatctattttgaaaactataggagcctttggaaggcctcttatgtttggaggggaagggtgttgagattgtcaccatccttcaagctgagactcctggtgagcctttgccaccatgaaaaccacatagctgaccagggctgtgcttgaggtacagaggacacacatcgtagacaggcctgtgtcatgtttccttacagtcgttttttacagagaaaaggggcattggtttttcactgctttctcaacagttcctgtgaataaatgaaacatttcggagctccctgagagcaagagccttcacttcttcttgcggtgccgggaccatgtgttggtgaagctggtgctgtgggggccactcactcgaatgacacctggaggcctgttcctcccttaccactcccttccccagcccgacttcttggcctcctgcccaaccagacacctcaaactctgtcagtgccctggcattctggcagagaatcctcaccagttctcaccaaccttccccccaggcaagggcagctgccagcatggtgctctgccaggacaggtttccctgaaggaagctgctcacactgagatgagcctctcagggcaggacctcttcccaagccctgcacacccacccctgcagcccttttggctccccttttccctgtgcctcagcactcctttcctggttgcagataacgaactaaggttgcctaaagggcagatctgccttctccatgtcttcgtcctggcaaacagggtcgtcttaaaattatgcgctaattctgtatgggagcactcaaaaggcattacttagagattgaaatttcaaactatctctagtttttcaatggaaatatatcagctagggaaaaaccatcaagctcattattattttttgatcttcagttgtatttttgtgaatattttaatacatctttttcaatttcttaaaaaaaaaa

SEQ ID NO: 74 - DNA, 2000 bp, Homo sapiens
cccacctagggcacgctgccacgccgccgttacctggtccaagtgcccgggaggctccgcctgtcggcttcgctctgcagctgcatctctgatctgtcctgcaggctcaggctctgacacctccattctctgtccccaagcgccatgagaggccttctttgctggcccgtgtwgctgctccttcttcarccctgggaaacccagctccagttgacaggtcccaggtgtcacactsggmccctggatctggtgtycgtgattgacagctcccgcagcgtgcgccctttcgagttcgagaccatgcggcagttcctcatgggcctcctccgaggcctgaacgtgggtcccaacgccacgcgcgttggcgtgatccagtattcgagtcaagtgcagagcgtcttccctctccgcgcgttctctcgccgcgaggacatggagcgcgccatccgcgacctggtgcctctggcgcaaggcaccatgacgggactggcaatccagtacgccatgaacgtggccttcagtgtggccgakkkcgcgcgaccgccagaggagcgcgtgccgcgtgtcgctgtcatcgtgacagacgggcgkycccaggaccgcgtggccgargtggcggcacaggcgcgcgcccgcggcattgaaatttacgcggtgggggtgcarcgcgcggacgtgggctccctgcgcgccatggcatcgcccccgctagacgagcacgtcttcctcgtagagtccttcgacctcatccaggagttcggcctgcagttccagagccggctgtswggtccgggacctttgcaatggcgtggaccatggctgtgagttccagtgtgtgagcgagggcctctcctaccgctgcctgtgccccgaggggcggcaacttcaggcagatggcaagagctgcaaccggtgccgggaaggccacgtggaccttgttctgctggttgatggctccaagagcgtgcgtccacaaaacttcgagctagtgaagcgcttcgtgaaccagattgtggacttcctagatgtgtcccccgagggcacgcgggtggggctggtgcagttctcgagccgcgtgcgcaccgagttccctctgggtcgctacggcaccgcagccgaggtgaagcaggcggtcctggccgtggagtacatggaacgcggcaccatgacagggctggcgttgcggcacatggtggagcacagcttctccgaggcgcagggtgcacggccccgtgcccttaacgtgcctcgtgttggmctggtcttcacggatggccgctcccaggatgacatctcggtgtgggcagcgcgcgccaaggaggaaggcatcgtcatgtacgccktgggcgtgggcaaggcggtggaggcggagctgcgcgagatcgcctcggagccagcggaactgcacgtgtcctatgccccggacttcggcaccatgacgcacctgctggagaacctcagaagcagcatctgtccagaggagggcatcagcgcagggacagagcttcggagcccatgcgaatgcgaaagcctcgtggagttccagggccgcacgctgggggcgctcgagagcctgacgctgaacctggcccagctgacggcgcgcctggaggatctggagaaccagctggccaaccagaagtgagggtcacggacggcccagacccgggctggggcgcggcaccacggacggtgccccttgcgcgccatcggtgcgccggggccaggcagaacctgggcccgtccggcttgggctgtcggggcggaggcgctggcgggcttccggcattgagctgagttggcctcgcccggaccattaggcggactgcggcgtcagggggatagcgggtggtgagggaaggggcacgtgctagaccggcacgccctcgccgcgtgtgcgctcagttctttgttggatttcttgtttgtgttcttaaaaaaataaaaaaaactgatttccaaaaaaaaaaaaaaaaaaaaaaaaaaaaaaaaactcgtag

SEQ ID NO: 75 - DNA, 1526 bp, Homo sapiens
ggcacgagcaggggttgaccaggacagttccccatctcagctggtgattgggaacagagactcccttgttctcctgcacaccctggctcatggctcttacttggtgtgtggaggaaggaaaaaagaagaccttcaccatcacctctccccattcatttattcacagcacttaccaccctctacagtgatccccttggaagatgagctccatgagggcagggattgtgtgtatcttgtatatcttcatatgctcagtgtttgcacaatgtctggtgcacagcagggtttcaatgtatgaatgtgtgggatagtggcctggtagggcaaggttacacagcaagtccaggacagagcctaactctggagcctcagactatattctgccagtccaagcaagggaatcctgatttcggcctgagagatgcatcttctagcaaagtcaacatcgggatggctcctgagctttccttctcagaggggtgggcttcctacttccccctcccagactcccagtctgcaaggccaagatccatttccaggagaaaatcaatatttgatgttcccttccttccccagcattggttcagagctctggaaatctcctgccctccttacaccacgcagataggaaatctctcctttggcttttaccttctgggcccaggccacccactgctgccgtggattttagccatattattttctgctgctctgagtgccaacagcacactcagcactagacacaaacatgcaaagacgcagctcttgcctgccccaaaggcttgctgggtaagttaaacagactgtaaaatgcagacttcaaatatgccagaggcaaaggcatttaaaattctcagcgggggctggaaagagaacgcttttaaagtcttttcatttctccctcttcctttgccttcagcatcgagctgcctgtgagttgtcctgcctcttctgtctatgaccatttaaggatgactggtccttttgtgagcaggcaaaggctttgagatgttggctgtgaatgtggacagctcttcccaggctgcctgaaagagcggaggcagctaaacttggcaacaaatatttccaagcctgctttccattccatcatgcagaatggtgttattaaattgatgattcaggatctcaaaccagcagagctctgtcctttgggagaaacataatccatatgacaggtttcaccagggctatttctgaataccagaaaccagtgcctaggacagtgtagatcagagagcaggtgagctgggtgctttgggatcagaagccacctgggccagagttttgcaggtaacactctgcagtggacatgcctgggtcaacctggtgcaccgagtccatgctgtgttcactttggtgtccttttctcctgacaaagacttaacctggtgccatatctctcctaagcaatgtgaggaggatcaccttaacctggggggtcaaggctgcagtgagccatgatcacaccactgcactccagcctggacagagtgagacagtatctc

SEQ ID NO: 76 - DNA, 1875 bp, Homo sapiens
  misc_feature (334)..(334): n equals a,t,g, or c
  misc_feature (966)..(966): n equals a,t,g, or c
  misc_feature (1304)..(1304): n equals a,t,g, or c
  misc_feature (1319)..(1319): n equals a,t,g, or c
  misc_feature (1329)..(1329): n equals a,t,g, or c
aattcggcacagtcagacgtggtagaaagacagtaagagaggaacaactagaagtggagcccgaagatgtgactgaactgctgcaatctcatgataagacttgaatggatgaagagttacttaagtggtttcatgagatggaatctactgctggtgaagttgctgtgaatattgttgaaatgacagcaaaggatttagratattacataaacttggttgggcagagtttgagaggattgactccaattttgaaagaagttctgctgcgggtaaaatgctgtcacacagcatcacatgctacagagaaatctttcatgaagagtcaatcaatgangacammcttcattgttgtcttatttcaataaattggcacagccactctagccttcagcaaccactgatcactcagttcagcagccatcaacatcaagacaagaccctctaccagcaaaatgattacaacttgctgaagggctcaggtgatcattagcgttttttagcaataaagtatttttagatataatgctattacatgcataatagactagagtacagtatagtgtaaacctaccttttatgtacactggggaaccaaaaaattgtgtaacttgctttattgtgatacttgctttattgtggtagtctggaacagatcctgcagtatccccaaggtatgcctgtatctcagtatagtcgtgatcataggtcttgcttttctttagattcactgttggtgttatcatccatgaatttcaccttcctgtgtacaaacatctcttattacagtaggagaatatgggagtcagaaaaggaagacatttattgtcattatgaactcagaaaatatgtttwctastgacattgaaacaactgagattgatattttccagccacggcagttttggtgattgaaagcaagatctgttttttaaaaattaaatataagtttgcacattcttccagggnaagggcacgggataatttcccttgccattttattttgaaaccagctttgttgtggtggcacgctccatgagatttgctccatgagatttgctccatgttgcaccacacacagtctttgctcctgtgtccttccatagaaaaaaacagtgtggggaargatttggtttgtcttaccctttaatcttctgctcctacagctctctggtctgatagttcactattttggtaataaagtcagatatagttcaaatcctgtctggtctattatttcgtgaaatttttgaacttttccatgctttggcatcctccaagaactttttcctttcwaagtttactgntttaataaatggacncctatgtgancacttttagactggagtctaaaagcscctaataggcttgctatttttagagaaggagaaagttgccttttgttctctctgtgcttttcacctcccacatgttctttagagttttttttcctgttctggtcttagtagtgacagctttctaatyccagaggctttttcctgggtctgtttctggctcattttgtctcatactcaaaatttttaatgtcagaattgggctgggctcttctctttctattatctgtaaacattttgggtttcttttcctctaatttatgaaaattatgaaatgtacacataaaggagtggaaaatatattcacccagtttaaagaagagtaataaaatggacattcgtatatacccaccatccaggttgagaaatagaacattgcttgtgtctcagaagctctctgtgttcctctcagtcacgttcccccaccccaactcctacccaaggtaacctctcatcctgaagcttacatggaagatttgggcatttttattaaaaaaaaaaaaaaaaaaaaaaaaactcgtag

SEQ ID NO: 77 - DNA, 2036 bp, Homo sapiens
aattcggcacgaggaagagtggtgtctccttcagcagggcgtgcagtggtggctctttttcttctgtgaccctttatacccattttcacttttccccattgtggacactctgagtccatgttgttcttcccacttgtcctcctgccatgtgttttcctttcttatagtaaaaggaggagagcgcagggttaaaaagacggtaactgtgtgcttctcctcccatgcagacaagcagccagcagcagctcctgagccccacgctgtcggatcgaggaggaagtcggcaagatgcagccgacgcagggaaaccccagaggaaatttgggcagtggcgtctgccctcaggtaggtccatccaggcatttctccagcgatcgaggcattttaaaggtatttactctgtttgtgtgttttgggtcttgcctttcaaaatgcaagtctgcatctacagttgtttacagacagcaacataatgaaaaatgtagtcttgtcaaaaacattgtcccccaaaataacttctctaaatatgacttacattagcccccattttccgggtacatttcaggctatcatggttgagaagccagcacctatgaaaaagacaagattcagaaagagggagaaatttccaagggctttctgtgtgcctcaaggcatgctcaaacatgggcaaaagtattcaactgaagagggagtgggcagatgcaatcattcagaaaatgccacgaagttctcaaaaaagggacaggcccccgatttctctcagcacactttgcagctgagccggtcactggctttaggcaagctgctttacctccatacaataacaaacaacaacaacaaacacttacgtagtactcactgtatgccagtcactcttctaagtgcattacttgtgttctctcattcaatcctttaataaacaatcccattattttccatattttactgattcagtaagagaattttcttctatgagcttcttctctatagggttttggaaagccaggataatcccattaagagcactcaggaatcgagggagagcaatgctccccacagcccagtgtccttgtacatgtttttttctatagataactaagttcatgctaaagcaggagctttataatgctctttaactgtgccccaacttcagcccaattgaaaggagaagatgtgtagcatatgtgttccacaaagcagatgacagcacagcttacattttgaggctgacgatgttcagtgggtcttcactgggactaccaccaaggaaagtatcccctttcatatccaggaacttatttttcagagatcagagaagatctaggttcctcctgattcaaaacacagcagagaatgacagcatcaagacaacgtagatggtggtgccaggtcataaattacaagctgagtcggttcaattttatcctgtaggcaattaggagctagcaaagatttctgagcagtatgtgacttttggaatctgtgctttaggaagttgacttggcagcaaaggagggaattgtctatgacagagcctggaggcaggttacaagctggaggaagttaccgtggtgtgagcacaaggcaacaaaggcatggacagagctgggggccagatactgcagggacagataggagaggtgacctggggagaatgcacagtccttggtattcatttaaatggacaaaagaaatgatgctgtcaaaagtacttccattgggccaggcgcagtggctcacccctgtaatcccagcactttgggaggccgaggcaggtggatcatttgaggcctggagttcaagaccagcctggtcaacatggtgaaaccctgtctctactaaaaatacaaaaattagctgaccggtagtggtgtgcacctgtaatcccagctgcttgggaggctgaggcaggagaatcacttgagcctgggaagcagaggttgtggtgaaccaagattatgccgctgcactcctgtctgggtgagagagtgagaacctgtctcccaaaaaaaaaaaaaaaaaaaaaaaaaaaa

SEQ ID NO: 78 - DNA, 2114 bp, Homo sapiens
  misc_feature (676)..(676): n equals a,t,g, or c
  misc_feature (699)..(699): n equals a,t,g, or c
gattttgaatggcagccattgttatttttcattttctccccttttgctttctctgtttccctggtttaaagtgtgcactctaataatttagaagatggcagaagcattcaagagcgggaccttctgagcagggcgaggctttgagttcggggcagttttcatggtagcatctgcctgtgctgaagcagaaaacagcatctgggacccccatgacttgggcactcttaggacagcccgcagatggttgcgtggggttcaggggcccttcccgcctggctcctcttgtctgcatcctgccctgtcatgtggacctagttcacactctgaggccctgcaaaacatgtcacctgtgggcacctccagttttccagtgcctggtccgcagctcgtctcggcagctgcatccttagggccattcccaaaacctcgggtcacggcgggggcctagggggacagcaaggcctttgccccttaagcctgatgaaaatttgtaggagagacttcagtgtccttawgaatttcagtgaagccgagtgggattaaggtgacagacagaagctctaagtgctttcttcagggagataaagcgctggcgagtgcatcatttaaaccgaagatggagtgagcgccaacaggcactggtggttgttgctgttctaatgggattgcttcgtanatggcccttcatggcggaacacncgtgtgtcagtggggttcgggctgcgggtggckgctgartgtccctgtgtgtctcttacaggaacartgtgtggtggatgcagctctggartacgttcccggcgctcaccartttggtctcacacaaaacarccatttcatcttgccttttaatcagtcggctgtcagaaagaagctctcggttgagctaagcatccgcacgttcgcctccagcggcctgatttactacatggctcatcagaaccaagcagactacgctgtgctccagctgcacgggggccgcctccacttcatgtttgaccttggcaaaggcagaacaaaggtctctcaccctgcactgctcagtgatggcaagtggcacacggtcaagacagactatgttaaaagaaaaggcttcataactgtcgacggccgagagtctcccatggtgactgtggtgggagatggaaccatgctggatgtggagggtttgttctacctaggaggcctgccctcccagtaccaggccaggaaaattggaaatatcacccacagcatccctgcctgcattggggatgtgacggttaacagcaaacagctggacaaggacagcccggtgtctgccttcacggtgaacaggtgctacgcagtggcccaggaaggaacatactttgacggaagcggatatgcagctcttgtcaaagagggctacaaagtccagtcagatgtgaacatcacactggagtttcgaacctcctcgcagaatggcgtcctcctggggatcagcactgccaaagtggatgccattggactagagcttgtggacggcaaggtcttgttccatgtcaacaatggtgctggcaggataacagctgcatatgagcccaaaaccgccactgtgctctgtgatggaaaatggcacactcttcaagctaacaaaagcaaacaccgtatcactctgattgttgaygggaacgcagttggcgctgaaagtccacacacccagtctacctcagtggacaccaacaatcccatttatgttggtggctatcctgctggtgtgaagcaaaaatgcctgcgcagccagacctcgttccgcgggtgtttgaggaagctagctctgattaagagcccgcaggtgcagtcctttgacttcagcagagcgttcgaactgcacggagttttccttcattcctgtcctgggaccgagtcctgaacttcaagcagaatcctcagttggaatcattgctaatattttgaggagaagtgtatgtgtgaattaagaatctcttcagttcatatttcatttccaactcaggttaagtgtttctggggagagatgttgtgtttacgttacactaaaaccacatgtgcaacaaatacctccattaaatggtctaaaatgtaaaaaaaaaaaaaaaaaaaaaaaaaaaaaa

SEQ ID NO: 79 - DNA, 676 bp, Homo sapiens
  misc_feature (638)..(638): n equals a,t,g, or c
  misc_feature (656)..(656): n equals a,t,g, or c
  misc_feature (675)..(675): n equals a,t,g, or c
ttcggcagagtggcccctcctcgacactaagccccccacagactcagcctccaaggaaccgctgagcacccttgaagcatgtcattgtcagtgatacctttttattctatggaactctaacctattcgtgtcatattgaccttttgctgcatgagtcataaattatgaaatcagtcttacagtttttgaaatktagccagcatttgtaaggctaaacctttttcatgaactgaatttaagtgaataaccaagccacagttcctcctcaaatggagagtgatgatcgacatttgaatctctttgccctttccaacggctatggcatcaggttctaaaataagctcgtaatttttcctgttattttaataatatggaaatattagcatagtgtttcttttgatagtgatagactataatccatatttaaattttatagagaagaaattttattgtactgtgatgtagatatttattatccaggtaaggatttgcccggtgtgtattttttacaattgagacattttactttaatctttaaaaaaaatgcattaaaaacacactcaaaaaaaaaaaaaaaaaactcgagggggggcccggtamccaattcgscctatagtgagtsgtataaaatcactggngtcgtttacaagtcgganggggaaacccgggttaccna

SEQ ID NO: 80 - DNA, 924 bp, Homo sapiens
ggcacgaggtcaggttgggtaggagagaggagagtcttggaggggctgctccatgggggtcacacctctctcctgtgggttttcgctggtgattgagttctgaggcatttgctgcattgactgttgtagctttaactcgtgtgcacgtgtgacacataaagccccaagagaagggctgcctggctcagatgcacttccatgctgattatatgcatgggtgttgaaagcagtgctggctgagcagcgatcccagtgcagtttgactttattctttgctcaaataggtgaaggcccacggtcccggcctcgaaggtggtctcgtgggcaagcctgccgagttcaccatcgataccaaaggagctggtactggaggtctgggcttaacggtggaaggtccgtgcgaggccaaaatcgagtgctccgacaatggtgatgggacctgctccgtctcttaccttcccacaaaacccggggagtacttcgtcaacatcctctttgaagaagtccacatacctgggtctcccttcaaagctgacattgaaatgccctttgacccctctaaagtcgtggcatcggggccaggtctcgagcacgggaaggtgggtgaagctggcctccttagcgtcgactgctcggaagcgggaccgggggccctgggcctggaagctgtctcggactcgggaacaaaagccgaagtcagtattcagaacaacaaagatggcacctacgcggtgacctacgtgcccctgacggccggcatgtacacgttgaccatgaagtatggtggcgaactcgtgccacacttccccgcccgggtcaaggtggagcccgccgtggacaccagcaggatcaaagtctttggaccaggaatagaagggaaaggtgggtttcatttaaaaaaaaaaaaaaaaaaaaaaaaaaaaa

SEQ ID NO: 81 - DNA, 1121 bp, Homo sapiens
  misc_feature (286)..(286): n equals a,t,g, or c
  misc_feature (1102)..(1102): n equals a,t,g, or c
  misc_feature (1105)..(1106): n equals a,t,g, or c
gtttctttattcctaatgcagttagaaagacctttctccttgagctctttgactcccagaaggtaccccagtccccagtgtacttagaaaggatctcgaacattgctggacgtcctcatagtactcacaaagggctagccttgaatgtcactcgcccagtcttcagtctcctgacttagagatacaatcacgtcacaggtctcttggcctcaatctgaaaactgctgccgccgcgccgaggagactcgcatgccgccaccacctcactgggagggcgccgagccanccgtcgccccctagaccctgacagctgcagctgccttgccttgccgccgcctccctgcagggcccctgttccaatgaaaaacagaacacaaaagagcagagcacctaagcctgtctctgcctccctgtctaccggactggccagggccaagacccccgctgctccactgcggggctgggcgggctgactccctgcttcctccargctgctgcctcccctgcagccagggtctgggcagggtgcagccggtcctcgggcgcacgcagcttccttcaagtacactgtgtgtgcttcccggacctgcggcgatgccacgggcctgccttttctatgcgcctcactagcttaccaccctgtgcaggtaatgcaactgactttgtctcatcagtctttttctttccctgccaccctttatttatcaagcgtaatgttacactttaaaggacagcaaataagaactttgtagaatcccaccaggactttgctaacaataatgtttggaaataaagaagtgctctgaaaaaatatcagccaccaaaatagttatgttggcactgtgttcacacgcatggtccccacacccccaggttgggtgggtttttttgttttttgggtttttttggggggggggctttttcatgttacatccatatctgtatttatatcttatttgtttcactttcaagtgtatcatggcaaatgtacagatttttttgttaataatgtgctaggatttgctaaaaaagaaaaaaaaaaaacccttttgagtttgccctagaataaatgagacttaattcaaaaaaaaagggaaaatgnagnnggaaaaaaaaaaggg

SEQ ID NO: 82 - DNA, 1189 bp, Homo sapiens
ggcacgagattgtttttcccaccttgtcgctgaacctgtctcctcccaggtttcttctctggagaagtttttgtaaaccaaacagacaagcaggcaggcagcctgagagctggcccaggggtcccctggcaggggaaactctggtgccggggagggcacgaggctctagaaatgcccttcactttctcctggtgtttttctctctggacccttctgaatcatagaccggacaagagcctgcagcggaagggactctgggctgtgcctgaagctggctgggggcaggacaacacagctgcttccccaggctgcccactctggggaccgctgggggctggcaaaggcatcggtcagcggggcagcggggctggccatgagggtccaccttcagccctttggcttcaaggatggagatggttttgccctccctctctgccctcgggtggggctggtgggtctgcagctggtgtgggaacttccccacggatggcggtggagggggttcgcaccgtgctgggctccccctgactgtagcacggagtgttggggctgggcgccatctccaggagggcttgagagctcagcctgcctgggagagcccttgtggcgaggcattaaaacttgggcaccagcttctttctcggtggcagaaattttgaagtcagagaagaaacggtcctttgttggcttctttgctttctcgtgggtcctttggcaggcctccctttggggagagggaggggagagaccacagccgggtgtgtgtctgcagcaccgtgggccctcaagctttcctgctgtcttctccctcctcctcctttcccctttctctttcctcatttcctagacgtacgtcaactgtatgtacataccggggctcctctcctaacatatatgtatatacacatccatatacatatattgtgtggtttcccctttctttcctttttttaagcaacaaaactatggaaataataccccaacagatgagcgaaaatgtattattgtaaagtttattttttttaatactgttgtctataatggggaaaaaggacattggccccgcagtgccctgccccagtcagcctggctgggctctggtgggggctcctgatccgcatccaagcttaaccaaggctccaataaacgtgctaggaagcaagcaaaaaaaaaaaaaaaaaaaaaaaaa

SEQ ID NO: 83 - DNA, 1573 bp, Homo sapiens
  misc_feature (1549)..(1550): n equals a,t,g, or c
gacaattcctgcccctaaagcctaggagatccctctcccttgctagagagccacccccaaatcaaaatgtgaaaatccctagaaagcaatagccttcgaggtaccttgcactgaatttcccaccccagcccttccacccgatgggaggctgtaacttgggcactggggtgactttttccatgcccttgtcatctccagggtgggaggcaggccccacttcccctcccctatcccccacttcccattgttgttgccccacccctaatctccagactgaacccagatggagatctgagtgccaaaacaattcttgatgtaactttgtacatatcttctactaccgttgggggctcttggggttagaggtgggggcggctctgtgggccattgctcccctccacctctcaaaagaccttacagtatttcacagtatctctacccgcacgcgagtattacagtatctagctggaatatccccctacagccccccaggaccctatgaggaagggaaggagccagggagagtgaagtaaggtctgggactggggaggtgggatctgaatgaactcatttgcatatcatttgcatcctccgcttggcagccgctttctacaaactcattcactggagtctgggtcccaatcagccgggtccaggactcctctcacacagacacatctccggaggctgggcctcctgaaaagtgtttgcttggggtgtctgtgtaacaacccctccctattcatatttcttggggaccccctacccagccagccagggtgatctgaaaggtatactttgctagctcagtgagctagttcactcaccatgttggtgagcagagagccacacctttccccattttaccytgggaaactcactccaccatctttgccatctcttgaaagtcccttctgcaatctgacctcaatcttttgtgctgcagtttgtccagaggggacacagatgtggggtcagggatgaggattattgraaaacccatcatctctttttttttccccgtctccctattagccaatccgatctcagagtctctgagtggcctccttgcacccttctcttcagcacccagtaggtgcttaataagtgtttgctgcattgaattatctccctattccttctcatttgccctctagcttcccataccttctccaagtgtcttcctccctttctttgtctggctccctatgactttctatttttttttcctccgtgtggttcccattgttttctgtcctgtctctatcttagtctttgtctgtcttcctcctttcctcaaatgtctcaactctctctccccaatttccccatttaaaaaaaaaaaaaagtgccaaacttccttggaactgagccgctctggggggagaggaccttggatagaggggaggaaatgggaccatttctctttgaggaggtccctaagaggcattgcaaaagtgtggacatggagctaaattgggtcccccttccacagccctcccaccctgagtttttcttagaatctttgtaaaaaaaaaaaaaaaaaacnngaggggggggccggtaaccaatt

SEQ ID NO: 84 - DNA, 1304 bp, Homo sapiens
  misc_feature (41)..(41): n equals a,t,g, or c
ggcacgaggttgggccaagggcagagggggctgcacctgcnggcctgggaagcattgctcagggtggggggctgggaccatggcccgcagaggcactgccacagctgtgagggccaagatgctgtccccccatccaaaacccgtgcgccactgcagtgagtgttgagggcacctctcctcccctcttacacctactcagatgaggcagcagcagacccatctcgcggcgggggttttgttctgttgccgcctaactttctcatcctcggtctctggaaagtcaggctgagaaatcctttcccaggccaggccgctgcggtacactggatggttctgaagctggcccattgaaagagcctcttaaggcagctgggacagaggcctggtggccctgctgggcagcccaactgctgggggagacgtttctgccaccctgggtgatgagcagcttttcccccctggctttctgggggaggagtgggcctccttagggagacaggtgaccctgggtgccacccctgccccgtgtgtgccccgggtgttctcagtggttgctgaaggcaggtagagggtgctgtccagtatcccccatgtgaaggtcacttcccttctcatggagtcagctgagcatcagctcagccctgccatgtccccactcaccctcctcgcctcctgtccggccctgggtttctagcggtgcctgaggcatcactctggcccattgacagatgagaggtctgaagccttcctggccacaggcatcactttctcctcctcctcatgccctgccttgtccttgtcgtgttgccatggggttctgagaggctgggagttcacagacctcagacacagctgagtccgacaaccattggggtggggctgcatcagtctccggagtggcccgccacctcctgaagcagggcctggcccacccaaggtgcctggggcaggcgggcaccgtcattcgctgccattggcttctcagatgtatttcaaggactaaagtgggctctaagatctaagatggcccggcgcggtggctcccgcctgtaatcccagcactttgggaggccgaggcgggcggatgagttgaggtcgggagtttgagtccccgtctctactaaaaatacaaaattagccggacaaggtggcgcatgcctataatcccaggtactcaggaggctgaggcaggagaatcacttgaacctgggaggcagaggttgcagtgagccaagattgtgccactgcactccagcctgagcaacaaaagcaaaactctatctttaaaaaaaaaaaaaaaaaaa

SEQ ID NO: 85 - DNA, 1867 bp, Homo sapiens
ggcacgagctaaccacaccatccatctgcagatagaacatcatcagcaacattgaaataccccatgtgctctctgcttcctaatctcagcgccctcctgtcctccatgatgaatgtttctcttgaaatttactttgttgtctttctttcacttttctgtgtcgttttaccattacatgcattattcctaaagtcgttcttttttttggattttgcttgctttcaaattttatgaaaatggcagcaaaatgtttatattcttctgccacttgctttttttcatttaatattgttttgaagatctatgcatactgatgcacactgatcatattttcagtgttgtactaattacagtttatgactattccacaatttgttcatccatttattccctcatttttgtgtatttggtttgttggaagatttcctggctttttttttctattatcaactgggctgccacatatgtctttatgcctgtttcatgataaatacgtgcaagaggccaggctatgcaaagtgccagctttacaagatcatgagcagctgttttgctacgtggtattgccaatttagactcacacaagtggtaaagaagcatccccagtgtcctaaatccttgccaacacttagtgtcaccaggcttcttaatttttaccaatctggccagtggataatagcattgaaaagttatttttattgtgatttggagtccaatattttttctgtaagaaatgcatgtacaatgttataagaacatgcaaaaatcaaaatactttataaatgttcactttataaaaaatgaatgagaaaaacataacgcattttacataaagaaaatctgtaatgcttttgttattggctgggtattttcacaccttccaagtggtggctgttgataaattcagcaataatacctttatgtttattaatattaaatgataatgtcgaattaattaaatgaagttcaatttattgatagttattcattatatcctgctgttctaactcatcctggaagagaatagagtgaaagagaaattgcctttatatataaatgactcatagaatttcatatactgacctaaatagatttcattgcaaaggtattatagaggtaataacacagtaactcttaggactgttttgagattttcacaatttgaaaaatccttttagatccttggttgacaaatgccctggctgtgctaattatatgacatttcctgacactagtgacgtggcatggcctctcccggcttacattatagattgttttctgcccccatgggatctgatttgttaaggctcattttctattttaatgtggtggaagaattttagaaaccctagaaccccactttcaccctccactgaaacaaatagaagcagtgtattagtcagttttctcactgttatgaagaaatacctgagactgggtaatttatgaagaaaagaggttgaattggctcatggttccacagctgtacaggaagcatggcaacatctgcctctggagaggcctcaggaaacttttactcatggtgggaggcaaagtgggagcaggtgtcttatgtgacagaagcaggaccaagagagagacgggggaggtgctacacactttttttaaaacagagtctcactctgtccctcaggctggaatgcagtgatgtgatctcggttcgctgcaaccttcgcctcccaggttcaagcatttctcatgcctgtagtcccagctactcgtgaggctgagacaggagaatcgcttcaacccgagaggtggagtttgtggtgagccgagatcgcgccattgcactccagcctgagcaatcagaacgaaactctgtctcaaaaaaaaaaaaaaaaaa

SEQ ID NO: 86 - DNA, 419 bp, Homo sapiens
cggcacgagcctccaagcccctgtacataacctggagcgtgtgaccttcagagcttttcactttatgcaaaatggctcctgtgagggctgcaagctggagggtggtgcaggccttgggccacagggaggcgcctgtggaatagggggagttcatgcaccccttttttccccagaggggctggactcaggttagtttgggggtgggggctcctgcactttgccacaggcacggggagggttttctcctcaccccctctgccctcccaacttgggttgtactttctaagaaggtgattccccctgcccttgcccccttccccagaacaaaacatgttgatcatgtgcaatatttcttactgtgccgagaagccgcaatgagcgagattaaagctgtttaacacaaaaaaaaaaaaaaaaaa

SEQ ID NO: 87 - DNA, 1125 bp, Homo sapiens
gcttaaacctgattgtagctatctaagttgtagccaatgaggtgtcagaaaatgtaccatgcagtgcaacttcttaagtagcctagaaagatggggtcacatccccctgggttgtttccttctttgtgtcattttgatctctctcgctggaaaacagaaatgatgtctggagtgtaagcagccatcttgggctaggagactacatgctgacatggtgacacaccacccagaaagaatctgagtagtcgatgatcacagagctaccatatcagcactagactctctacctccacattttatttgtgtgacatagaaataaagtttaagctttgttttttctggggtgtatgtgtgtacacatgtgcgtctctgtctgtctcacatgcagtgagacctaattctaactgatatgccggtaggatggggggaccttgccacaaggtataattgtggtgggatggctgtgtcttgctcccattcaggatccatggaaagctcctcctccttcctgttcccctggatgccaagcgatgggcctgagaccctggctttgccatgtggatgctccccctcaggactttggatgtgcagtgattgctacaaaaagggcaatgaagatgcctggaccacagccacacagtctccatcacagcagtggtattctgtggaatgagtactaattttctggccacattttctgttaaaaactggttgttgagctgcccacttgtcttggtcaagggatgctggagtggcctgggaaggcagtgttgtttgcttttcttaggatggaacacacttaggcatatttttggtcaaagcaaaagaagaattcaaaggtgagagaagttgaagataaaaaggggaaaatgagggtagcagatgaagcaaagtcacacagaaagctggcaggcgagtagtagaatcagagtacaggctgagcatcccaaatctgaaaatccaaaatcggaagtgctccaaaacctgaaacttttggagcaccaacacaatgctcaaagtaaatgctcagtgaagcattttggatttcatattttcagatttgggtttgcccaaccggtgtaatacaaatattccaaaatcaaaaaaaaaaaaaaaaaaaaactc

SEQ ID NO: 88 - DNA, 887 bp, Homo sapiens
ctgcaggaattcggcacgaggaaaatattgtcttttttctttcctcactcttattggatatttgtttagtcctaaacaaagtagctttagcttttaatcatactcattactgtatttttgttcaatgtttcttgatttctgcctactttattaataattatctctttatttcagtttggtctgttcttctctttcaatgaatctaatagaattcatggctcattttatttcaatgtctttatactttctggtcagtgtatttaaagtkatacattttcctctgatttctgctttagttgtgccctgcatgattttatatgcagagatattgttgtcattcaattctaagtatcttataatttctcttatgatttctgcttaagcccaagggtaatttaatagcaggctttttagtttcaggactaggtaacatttttggttctttttaaaattattgtttttctaactttatttcagtagagttagggaacatattctgatgttgattcattggaattgtttgagcctttctctctgtaattgttacaaatttaatttttgtgaatattccatgtgagctaaaaaaaaatctgtttttgttctctgctctccaccctaatgagactttagaaattctcagctgtaatccatgatccctggtctaataaaaagaagggtgtaaacatggacctgaccttcagatggggagggggaggcaaaagaacacaactgaaaatgctcccccagctacattgaggaggggtaaagggtaggagggagctagggagagaacatttaaagggtgttgacagagtttaaataggtggtgatagggacttgaagtgatagcaaaaacaaaaaacaaaaaaaaaaaaaaaaaactcgag

SEQ ID NO: 89 - DNA, 1153 bp, Homo sapiens
ggcacgaggagcatcaccgcagaaacaaaggctccagcctccggacaccatgtctgtgcgcttttcttctacctccaggagacttggctcttgcgggggcactggctctgtgaggctctctagtgggggagcaggctttggggctggaaacacatgcggtgtgccaggcattggaagtggcttctcttgtgcttttgggggcagctcatctgcaggaggctatggcggaggtctgggcgggggaagtgcttcctgtgctgccttcacagggaatgagcacggcctcctctctggcaatgagaaggtgaccatgcagaacctcaacgaccgcttggcctcctctctggagaatgttcgagccctagaggaggccaacgctgacttggagcagaagatcaagggtggtatgagaaatttggacctggttcttgccgtggccttgatcatgattacagcaaatatttcccaattattgacgaacttaaaaaccaagtataatttctgcaactaccagtaatgcccatgttgtcctgcaaatgataatgcaaaactaacagctgatgacttcagactaaagtttgaaaacgagctagcgcttcaccagagcgtggaggcggacatcaatagtttgcgaagagtcctggatgagctgaccttgtgcagaacggacctggagatccagctggaaactctcagtgaggagctcgcttacctcaagaagaatcatgaggaggaaatgaaagctcttcagtgcgcggctggaggcaacgtgaacgtggagatgaacgcggcccccggggtagacctcacggttctgctgaacaatatgcgagctgagtacgaagccctcgcagagcagaaccgcagggacgcggaggcctggttcaacgaaaagagcgcctcgctgcagcagcagatctctgacgacgctggcgccaccacctcagcccggaatgagcttaccgagatgaaacgcactcttcaaacccttgagattgaacttcagtccctcttagcaacgaaacactccctggagtgctccttgacagagaccgagagtaactactgtgcacagctggcacagatccaggctcagatcggggccctggaggagcagctgcaccaggtcagaaccgagaccgagggccagaag

SEQ ID NO: 90 - DNA, 990 bp, Homo sapiens
ttaagacacgcgtcccaggtgtggatgtgtgggtgcttaagacagcagactgctgctttgctgggccaggcctgggtttatttattacaagcagttcaggaagcacagacatcacgttgttcacttgcttcactgatgaatgtaataattgttctcgttcatgccctttgcccctggtgtcggggctgtccacactggggaccattggtgcccccatgattattagctccctgaagcctggtgggtcgtcagggcttctgtccggtgtttaaagacccatcccagacaagcccaaaccacctcagtttgaagagacatagagggacaggcagacggggcctcagagggatccagcctcatccagcctcccggcaacctcaggagagcaggccagatggggcctcagagggatccagcctcatccagcctcccggcaacctcaggctggttcccttccagtgccgactccacagccctgctggttcccttccagtgccgactcccaggctgagtcgctttgcagcgtttgggacgtacgcagggcctgtgctgtgggccagccacttagtgcacttcctgagctcagaaacacgcagtggttcagcactgagtcatgcttgcttctctacgcactgatttgttctattccagttttcacgtacatcgttttggtgacatctctgcgttatcatttatttatatggagtgtattttctccaaaacttctctacgagggaatgcacctgctcattacagctgctgtctgtgtattcttcacggcaatggatcaaaccagactcacacagtcttagactaagctgaacactggaaaaataatacatgcttaaagtctgctgttattctaaaatgaaagatatgaattcaacaaagttgatggataactttctttgactgctctacctgaatttagactaagcagtaaatagtttaataaaagatcactttaatataaaaaaaaaaaaaaaaaaa

SEQ ID NO: 91 - DNA, 1157 bp, Homo sapiens
ccacgcgtccgcttggcattggtttacctgccaggtgtgatagcagcaattgtccaacttcataatggaaccaagtataagaagtttccacattggttggataagtggatgttaacaagaaagcagtttgggcttctcagtttcttttttgctgtactgcatgcaatttatagtctgtcttacccaatgaggcgatcctacagatacaagttgctaaactgggcatatcaacaggtccaacaaaataaagaagatgcctggattgagcatgatgtttggagaatggagatttatgtgtctctgggaattgtgggattggcaatactggctctgttggctgtgacatctattccatctgtgagtgactctttgacatggagagaatttcactatattcaggtaaataatatataaaataaccctaagaggtaaatcttctttttgtgtttatgatatagaatatgttgactttaccccataaaaaataacaaatgtttttcaacagcaaagatcttatacttgttccaattaataatgtgctctcctgttgttttccctattgcttctaattaggacaagtgtttcctagacataaataaaaggcattaaaatattctttgttttttttttttgtttgtttgttttttgtttgtttgtttgtttttttgagatgaagtctcgctctgttgcccatgctggagtacagtggcacgatctcggctcactgcaacctgcgcctcctgggttcaggcgattctcttgcctcagcctggccaatatggtgaaaccccgtctcaactaaaaaaatacaaagagtagccgggcgtggtggcatatgcctgtagtcccagctgcttgggaggctgaggcaggagaatcgcttgaacccgggatgcagaggtggccatgagccaggatcacaccattgcactcttgcctgggcgacagaaggagactccatctaaagaaaaaaaaaaattagccgggcatggtggcgggcacctataatctcagctgtgtgggaggctgaggcaggactattgcttgaatccgggaggcagaggttgcagtgaaccaagatcacaccactgcactccagcctgggcgacagagtgagacttcatctcaggaaaaaaaaaaaaaaaaaaaaaaaaagg

SEQ ID NO: 92 - DNA, 1885 bp, Homo sapiens
ggcacgagtacaaggtggcggcgctgggcctggccaccggcatcgtcttggtgctgctgctgctctgcctctaccgcgtgctatgcccgcgcaactacgggcagctgggtggtgggcccgggcggcggaggcgcggggagctgccctgcgacgactacggctatgcgccacccgagacggagatcgtgccgcttgtgctgcgcggccacctcatggacatcgagtgcctggccagcgacggcatgctgctggtgagctgctgcctggcaggccacatctgcgtgtgggacgcgcagaccggggattgcctaacgcgcattccgcgcccaggcaggcagcgccggggacagtggcgtgggcagcgggcttgaggctcaggagagctgggaacgactttcagatggtgggaaggctggtccagaggagcctggggacagccctcccctgagacaccgcccccggggccctccgccgccttccctcttcggggaccagcctgacctcacctgcttaattgacaccaacttttcagcgcagcctcggtcctcacagcccactcagcccgagccccggcaccgggcggtctgtggccgctctcgggactccccaggctatgacttcagctgcctggtgcagcgggtgtaccaggaggaggggctggcggccgtctgcacaccagccctgcgcccaccctcgcctgggccggtgctgtcccaggcccctgaggacgagggtggctcccccgagaaaggctccccttccctcgcctgggcccccagtgccgagggttccatctggagcttggagctgcagggcaacctcatcgtggtggggcggagcagcggccggctggaggtgtgggacgccattgaaggggtgctgtgctgcagcagcgaggaggtctcctcaggcattaccgctctggtgttcttggacaaaaggattgtggctgcacggctcaacggttcccttgatttcttctccttggagacccacactgccctcagccccctgcagtttagagggaccccagggcggggcagttcccctgcctctccagtgtacagcagcagcgacacagtggcctgtcacctgacccacacagtgccctgtgcacaccaaaaacccatcacagccctgaaagccgctgctgggcgcttggtgactgggagccaagaccacacactgagagtgttccgtctggaggactcgtgctgcctcttcacccttcagggccactcaggggccatcacgaccgtgtacattgaccagaccatggtgctggccagtggaggacaagatggggccatctgcctgtgggatgtactgactggcagccgggtcagccatgtgtttgctcaccgtggggatgtcacctcccttacctgtaccacctcctgtgtcatcagcagtggcctggatgacctcatcagcatctgggaccgcagcacaggcatcaagttctactccattcagcaggacctgggctgtggtgcaagcttgggtgtcatctcagacaacctgctggtgactggcggccagggctgtgtctccttttgggacctaaactacggggacctgttacagacagtctacctggggaagaacagtgaggcccagcctgcccgccagatcctggtgctggacaacgctgccattgtctgcaactttggcagtgagctcagcctggtgtatgtgccctctgtgctggagaagctggactgagcgcagggcctccttgcccaggcaggaggctggggtgctgtgtgggggccaatgcactgaacctggacttgggggaaagagccgagtatcttccagccgctgcctcctgactgtaataatattaaacttttttaaaaaaccaaaaaaaaaaaaaaaaaaa

SEQ ID NO: 93 - DNA, 779 bp, Homo sapiens
ggcacgagatagaataatgcagtggatttctatcatgctaatttattttgctttggagcaggtacctttcctctatggcattattttcttgcatttctcataaaggggaggatgcatcccaactgaatggctcactggcatgtcttttatgtgttcagttgccattcctagctttggaaagtttctatctgtccatgtgtatacaagtcaatgccccatttttgtttttcttttaaccgaggtgtagataaggaaaagggacatttttaattacttaataaccggaaatgcagatgtgtaaggagaatgagaggaatgagttaaagtggttatgcatttttctatagatgagccattacagcaaggaattttacagttgacttctctgaacctagctttaccacagtgattaaatcctatttagaaaggggaatctgatttaaatgtgtgattccttgtatttgctcctatcacaaagatatattaaaggaggtatgccattaatgaaatccactgtcctgagtattatctttcctcctgttgtactttctcagagactatggcagaatatctggatcttccttggattttgtacacatattgtagtgaaatgtgtcctacatctgaaattgcatgggactcatgcccagcaatctggttctaggcctttgacacctgataatatgagagcaattggccagccaatagccataagcccagaggattttagagcttcatgtgtggcttttaagagcaggtttgaaaaaaaaaaaaaaaaa

SEQ ID NO: 94 - DNA, 2735 bp, Homo sapiens
agtaggaaaggcttctcagaaaaaaaaaaaaaaagtataggctgaatttagctcagtgcttgaaatgggaagatatgaattattatatacgcatctgtccacacatacacacatactgttgtgtacacacacacaacatgcctgtgcacagagccaacaacccttcaaaagtgtgctctgggtgtgtacctctggataaataagatgcatgccargccaacccacagattttcaccagtgtggggcagtcaccaggcacctgttcaatgagctgtccacatggattgaagatgttttaaaaacacagaaaactcatggcttcaatggcagacttactagtctccatttcaaatgccaactctgagctgctgtacagcacaatctattccctattctctctttgaaaacagttaacccacctcacaggtgaatgargagagaagatgtgctttctgcttcagtctcttactctgtgtgtgaccacatgcaagagtaaacttgcacctcagtgcttcagttcaaatggggtttccaaccccagtataattaggggtgtttcagagcatccccagttatttagcacaacactgaaggagcacatcccctctccattttgacttctctccccacttttacagccactgccttcatcagttttgtagaggtttgatttccatgtgggttttgttgtcattgttttgcatttttgttttgttattgatattgtttgctttcattgctaaaactcatatacgacttactatgagccaagcactgttctcagtattacataggtatgaattcatttaagtcctgaagaaaaagaaaaaaaaatacgaagtggatattacccttcccattttcaaataaggaaactgaagcacaaaaagaacaagtaacttgacaaggacaccccggtagtaaatcatggggctggagctcaaccccagggtaggctggctccagagctgtgctctccttgactcttctgatggtctcctagctggaagcctcacatttcagtctcattcccccaagtggcccatcagctactccatctctggctccccaactaaacagtttctctcatagtgctggacctccactcactagttttttttccagctgttcttctcttttcttcaggtcactcttctcgaccgagtgcaaaaattatcccctccataccagctttgatgaccttccttccatactcctcaccagacacaacataataggtcacacactcctctgtgctttctggcacgttttaaacattattattattgacctttacctatagtataccatggcctatttatgtatccatctcccctagcatttttcctcaaagacaagaaccatgtcttacccatctcttgggtaagtgcctagcatggtggctgacgcttgggagggtgtcattaaatgttgctcaaaagaacaagcaaacatttaaggtggtggagagcagcctggggacagctgacatgctgcatgcttctcagtaccagcaccatcacaatgcaaaaagcaacatctttcttaacctcagcttattctgtttttcagtctactctgtgagagagcaggaatgagaccagactagcaacaccattgccaagctcaaggactgggctcaatgcagtcactccttcagagagaccccccaccccaagcatgccccactttaaaatagcatgtttattgaagggggcatcctttacagtagctagaaaatgactgaggcccaagccagggttgatcaaggatgtgccattaaggtaaagagttacagagcagggcagagggactctgggggcagaagtggatgatttgcccggcctcttccagggggtctggatacaactgaaggagctttagctacatgaggccctcagagccaaagacaggatgcaaatagagttctagagagtggccgtggaagcagaactccaggtggggaatgttcaatctctgsctcccttaaagcagggccaggctcagctggccccattgttcacttggtcacaagtttcctacctttgtttctggatgagtcaaaggccaggaaggcagttatggagagctcctgcacctccagctgccccacagaaaagcctgcaagagtacttccaggcacaggccctctcccaccctattccatttgtaagcaagggaggtcgaggaaaaggacatctccaaaagggagcataagaatagccatatatacaggggctgaaaaagtgctcatgagtccatcttttctggaaagcaaagaccagcctgaagcagtgggagctgctgcccaagcggtagtgaactggagagaaacaggccctggattttcagtgaggatgtggatctgaagagtcccccaaatgcctctgaagtctgacatctctgcttagccctaggagtctggttccctgccttcagttgcagagtgatgtgtttgtgtcattgttgatgtcacctcctaaaaagaccttcactttctggctgccacaaagccatatgtgttgctccccatatacagcctgacagagtaaatggagaggaagtgctggatttgtgtatcactggctatcagttcctcatgttgttaagcctcacacaggtgtgctagcattgaactgtagagtgtcacatacctgagtttgaaaataaaagcacatttccaaaaaaaaaaaaaaaaaaaaaaaaaaaaaaaaaaaaaaaaaaaaaactcgtag

SEQ ID NO: 95 - DNA, 518 bp, Homo sapiens
ggcacgagcaacaatggcaccccagtcgtggccaccacatactcggtttctgctcagagctcgatgtcaagcagacagatgactgaagacttcctgtaagagaaatggaaattggaaactagactgaagtgcaaatcttccctctcaccctggctctttccacttctcacaggcctcctctttcaaataaggcatggtgggcagcaaagaaagggtgtattgataatgttgctgtttggtgttaagtgatggggctttttcttctgtttttattgagggtgggggttgggtgtgtaatttgtaagtacttttgtgcatgatctgtccctccctcttcccacccctgcagtcctctgaagagaggccaacagccttcccctgccttggattctgaagtgttcctgtttgtcttatcctggccctggccagacgttttctttgatttttaattttttttttttattaaaagataccagtatgagatgaaaaaaaaaaaaaaaaaaaaaaaaaaaaaaaaa

SEQ ID NO: 96 - DNA, 1233 bp, Homo sapiens
  misc_feature (637)..(637): n equals a,t,g, or c
gaaaggcctccttggcattggctctggctctaaggcattttatggtagagaactggctgaaagacttctcttacatccgccagcattacttatggaagctgtataccattatttcttactgctgcttttggaaatattttctgagtacttaatacttcattttctcttgagctttgccattgaattttttattccaatgattacatcttaatattttcattttcttcatctttctattttttcttagtaactttctgtcctggtttcaaagattcagttccctcctttatttcagtgagcatttgaacatacttattttacagtttattakggattactgtagctccatttcttcacaggtaactttttcagtttgtagattcttagctgtttttcttggcatgcagcccccagtgagttagcaattcaaattttagtgttcatctgttatgggagttttatatgatcccttccctgtgaagcagtttcatggttccttcacactggmtgttcacagtctctgctttcagaccaggccttacatatacagattgctctatgctttcactctgtgtatatgcacaattctgggtccctcttctatgtcccttatctgctaggtcttggtcttatagangaacaatttctgtttttggcaagctagacytgtctgcctgcagtgctatgtgatggatgcagctctttaatctcytgctcctgtgtagacagtattaccccaattcccagctttatgctggatgtttaagttcagcaccttaccactctgttgggtgctgagaatttagtcctaaaaacccatatccagactgggccctacttaccactttggttttcctttctgcttctcttgttttgactacagatctgaatatttattattaatatttcctttttttttggagtggtatgagaggtttgtgctatgctcagccttctatctcgaccctagaagtagaaaaatagcttttaaatccactacaaagagcttttacttatataaggttaataggtggtagacagtctttgacatggggtgaaaaaatctaaaagttataaaaataaaaccaacttggctgggcatggtggctcatgcctgtaatcccagcactttgggatgctgaggcagaaggatcacttgagtccaggagtttgagaccagcctggacgacatagtgagatctcatctctaaaaaaaaaaaaaaaaaactcgga

SEQ ID NO: 97 - DNA, 1316 bp, Homo sapiens
aggaattcggcacgagctttgactcccctcctttctaacagaatgttgccaccactgcttgagtgggctgtgtttgttcctctgtcccagcttctgttgtagaaaataacattgttaggggaactcaggctagtgtcagcgtcttggtttggggagaaaaaattaaatgtttcggtttttgtttcttttgctgttttgtttttaccttgttactttatcatattgactttagggtcaaaggcaacatcagaagaagtcagatatgtatagtgacattccaggggtggggaaggtgtagggatccagggttctcccggtcttggccacaggcacaatcatcaccttcatcgttccagattcctggggagaaaactgagaagatcgttacctgccagcctcatacagagcaaaagctctgtcctcagggccaagttctaaccactgctctgtagaccttctctgcaatcaagtggcctctaaggagcatgcctgaggacaaataactgtgcctcagtttcctcacctgcagatggggttatcaaataacacgaagtgtgcagcctgacctgtaggaggtgtgagtgtgttcccaaactaaagccccaggctgccatcatttacaggcttggcttgccccgggcccctcacccccgtttctgaccatcccaagtctctctgggacaggcaagtcactctggttctttaataagcttggaggtgttgggaagcttcagtggtactggccaggccaggaggaatcaggccaccagggctccatctctatcctgggatagcattcaccccactcctcctcagggctgaccccgactcatggcccctttaaaccctgaaggccgattctgccccttcctctgttatatgcacaactgaggaaggaggtaaaagtgggctcctaggtgagcccaaagtctcctgagagataagggaaaagaattggactgtaggtttaaaaaagttgctcttggccgggcacagtggctcacgcctataatcccagcactttgggaggctgaggcaggaggcagatcacctgaagtcaccctgaccaacatggagaaaccctatctctactaaaaatagaaaaattagctgggcgtggtggtgagtgcctgtaatcgcagctactcaggaggctgaggcaggagaatcgcttgaacccaggaggtggaggttgcaatgagccaaaatcgcgccattgcactccagcctgagtgacagagcgagactccgtctcaaaaaaaaaaaaaaaaaaaaaaactcgagggggggcccggtacccaattcgccctatagtg

SEQ ID NO: 98 - DNA, 1054 bp, Homo sapiens
ggcacgagtggatatatcacattttgtttatctgttcatcagttgatgaacttttgggttgtttctgctttttctggctattgtaaatagtgctgttatgaacactgatgtacaattttttggggtgaacatttgtttttattcttttgggtatatacctcggtgtggaattgcgggatcatatatggtaattctgtctttaacttaatgaggaactgccaatctgttttcctcagtgactgtaccattttatattcctattagcaatacacaagtgtcccaatttctccacatttttgccgacactgttttccattaaaaaatttttattgtagtcattctagtgggtgtaaagtggtatctttttgttttgatttgcatttccccagtaactaatgacattgagccttttttcatgtgcttgttggccatttgtatatcttctttggaggaatgtctgtttaagtcctttgcccactttaaattgtgttgtctttgtgttgtagagttgtaagagttctttatacattctgggtactagacatgattttcaaatttagatacatgattttcaaatcttttgcctmtaratgttttttacttttttatttttgatccttgaactcatctatattstakggttgtgatgwaawratgtcagaattggtgtcatttgtgtttatttaccaggttatttggaaggattatattttaggtgctctcctytcccccagtaaatggtattatgacacaagggttataaaggactgataagaaattacttaagacagaaagggaagttggcctgcttccaaaatatggtcccagcagaagtgaagttagttacacaaataactacagtcaaaaagctatttttatccatgataatgtatttgttgttattaatattaaagattatattttgccaggtgcagtggctcacatctataatcccagcactttgggaggctcaggtggatggatcacttgagctcaggagtttgagaccagccagggcaacatggtgaaaccccatctctacaaaaaaaaaaaa

SEQ ID NO: 99 - DNA, 778 bp, Homo sapiens
ggcacgagatttcttgaatgaatttcacatttgtaactatgattttggcagaatagaagattggctcatcagtgaagcgcagtatcttagctctagattctattttcatgcatcacagaagtgctatacggttaggtctgtttgtgcctcagtcaagaactaagaaatagtatgaattgtaagtcaagatgggcaactcagatggagcagcttagtctcacagtttgcttgtctatttattttatttagtgccaaatgtattccattttaaaagtaagccagagtgagtcaaggcatatacacactttctcacaaaacttcctaaacagatttgggggtttaatatgtccaactcctcatgaaatatattcaatccacttaaatatattccatctttttaacataaaatgtaaagcttagcacccatcattaatttatgtctctgttttatccagtggttaaaaaaggattctgcctctttagtcctcactgttaaataaaacccaatcatagtaagtgattaactagcaaaaagtaaagctatttatagcaaatttctagatcattagaaaagcactggtagttgtacaatatcagtgttgactttgaacttctttaacgagatcatgaattcttttcccttagccaaaacatgaaatatttaacctagttgtctctaaaagttttgtaatcatgagttagatatatgtcatctcctattcattgcttttatgtgatcaataaatcttttacaaacccaaaaaaaaaaaaaaaaaaa

SEQ ID NO: 100 - DNA, 2014 bp, Homo sapiens
tagcgcggccgccctttttttttttttttatcttaaatacaatcaaaacttcatgtttaatagggattcatctgtttcccatactttttacatgttcagttcagacagaactcatggaagaaaagacttttctgtgagatagaacagaccatctgcttgaccggatggctctgagggacagccaaactcccaatggccaaagggctgtgaggaagggcaacacatatcagaagaattttcagcaagggctgaaacacagtaaggttagccacaaaatggaatgagagaagccctaacccaatgggagtttgcctaattttaatgaacccaaactctaacattgtactggaaaagcagcattaaaatccagcctgattatcacaatttacagaatttctcaccagaggcccacaggtgaaaaagctgcttactctaaagcccttagaaccgtattgtgaactgcgcatgcgagggatctaggttgcgtgctccttatgagactctaatgcctgatgatctgaggtggaagtttcatcctccaccaccaccccgtccatggaaaaactgtgttccacaaaactggtccctggtgccaaaaaggttagggactgctgctttagaatataagaaacaactcaagcagccaacgggtctagagttaacacttccagccctcccctttgtacacactcaacacttcttgctgaactggccgttaataaccacttgtgaaatccctccccacacctgcacttaggcgtttgtctcttcctaccttcctttactgagtagtggcaaaataataggagagtggaagatggtgatgggcaatgaagagggacctatttctgaagaggagatgttttaaagatattttatttttcaataccagtaatgactgaaaattaaagaattaaagcaggaagcaaaacaaaaacaaacaagaaacccaaaacttgcaacctaaactctccgggaaaaaaaaaattgctataaatgttaaaagacttaaagagaacattgacaatgcagccctgatgtacctaatcatacttcaaactgctggatgttttaagctgagaatctccccagtgcctttctagtgctctaaaatcatctcccaaacagatgagaaatgaaacaaacaggtctcccttcttgagtacataatttttataaattgcgtcggacccacagtgaatgtattttagagagtttcaccaaaactatcaaagatcaaatggcagcaaaagatcagggaaagaaggtagaaaaactatgcagtcacagagctaacccgcaagctgcccttagtcctatacacctgaaatcaaatccatagccaatggtgaggaagaccacatcagaggttagctgcatgacagcacagctgggtcctatctccctgccaggggtctcaactgtaactcgcgctccaamtgctctgcagtcagggtgccctggatggcttcacagcctggattgaacacagagtaggcgctcttctctccctctttcttctcttcagggcctcgtgtcccgacgtacatccaatagaacaaggacaggacaaaatatgccaggccaaattccagttccacaaacagtcccagcaggaccaaccagagaagaaccttcaagaaggtgatattggtcaggaaagactggtcccagcacgacggcagaggaatggctgtgttccatggtgtctctgatgtgctgccctggggctgagccgcttcctgaactaggccgggctgggcccgggcactcgcgggcctaggtttccataccaggaaccgctttagccagcctggggctgcctttagagtcgctgctgcttccgccttctctcctggggtttgtgcgccctgactggcagcagggggttgggccgccagacccgcccgtttccgcgccgcccgaaactcagctaaccgctgttccatggcgcgcgcctcgcgtccgttggccgataagggagcgcgcgcccgcaggccgcacagcagttgcc

SEQ ID NO: 101 - DNA, 1589 bp, Homo sapiens
acgcgtccggcggggcgaggaggagggtgggtatgaggcggtacggaccgcggagtcgagacctacccgaacgacgcgggcgagcggggctttggacgccggtggagacgcaggcgagcaggaagaagatgagccttaggtctgaacgccgaggaattcatgtggatcctgtgcaagaaaggatgtggttactgtggcaaccctacctggcagggtttctgctccaagtgctggagggaagagtagcacaaagccaggcagaagcagattcaggagtactgggagctggtggaacgactccagcgggaggaagaagaggcctttgccagcagtcagagcagccaaggggcccaatccctcatattctccaagtttgaaggaaagaaaaccaacaagaagacccgcaaggttaccacagtgaagaaatcttcagtacgtcttccagggtcggatcaaagaaggatattgaaatggattccaggcgtgtgcctcgagacaagctggcctgcatcaccaagtgcagcaagcacatcttcgatgccatcaagatcacctagaacgagctggcgtcagcagatgacttcctccccaccctcatctacattgttttgaagggcaacccccatgccttcagtctaatatccagtatatcacgcgcttctgcaatccaagccgactgatgactggagaggatggctactatttcaccaatctggtgagtaagtgagttcttggcgttgtggagaaggactaggaaggtggtggttttggggatgtgataggtcactcaggcccatgacaggtgaatgcttctgtgtgagaaggcagcacggctgaggaagctcactttgcatcagggagcacaaggaccaggccgtacagacactccgcctcccagcacttgatcagagattgtgtttatcctacagaaacagatgacatgtgttgggcatcactccccacggtcctgggtagaagagtccttcacttggcagggctttttcaaccaatgaataaggcaaattatatataagttaataatgccatttcgaaccgagacagatggcagctaaatgaagtttaattaaagaatgagtgctggggccctttttattgggtactgcatctacttcgaccacaaaagacgaagtgaccccaacttcaagaacaggctttgagatggaagaaagaaacagaagcttgccaaggagagagctgggctttccaagttacctgaccttaaagatgctgaagctgttcagaagttcttccttgaagaaatacagcttggtgaagagttactagctcaaggtgaatatgagaagggcgtagaccatctgacaaatggaattgctgtgtgtggacagccacagcagttactgcaggccttacagcaaactcttccaccactagtgttccagatgcttttgactaagctcccaacaattagagaattctaagtgctcagagcttggctgaagatgatgtggaatgagaaacaaatgttaacataataaaatctcagttaaaaataaaaaaaaaaaaaaaaaaaaaaaaaaaaaaaaaaaaaaaaaaaaaaaaaaaaaaaa

SEQ ID NO: 102 - DNA, 3168 bp, Homo sapiens
ggcacgagtttgtatttatattgaatgcatcccttccttaccatatgttagcaacctgtgcagaagccctacccagacctaactgggaactggctctgtatatcatcatctcaggaataatgagtgcactgtttcttttggtcattggaacagcctatttggaagctcaaggaatatgggagccatttcgaaggcggctatcctttgaggcctcgaacccgcccttcgatgtgggaaggccatttgatctcaggagaatcgttggtatttcatctgaaggaaacttgaacacactcagctgtgaccccggtcacagtagggggttctgtggagcaggcggttcatcatcccgacccagtgccgggagtcataagcagtgtggcccatcggtccacccacacagcagtcacagcaatagaaactcagctgacgtggaaaacgtcagagccaaaaacagttcaagtacctctagtaggacttctgctcaagcagcttcttcacagtctgctaacaaaacaagcccccttgtcttagattcgaacacagtgactcaaggtcatacagcgggcagaaagtccaaaggggcaaagcagagccagcacggcagccagcaccatgcccacagcccgctggagcagcaccctcagcctcctctgccaccgccagtgcctcagccccaggagccgcagcctgaaaggctgtctcccgcccccctcgcacacccttcccacccagaacgtgccagcagcgcgaggcacagttccgaggactcggacatcaccagtctcatagaagccatggacaaagacttcgaccaccatgactccccagccctagaagtgtttacagagcagcctccatcgccattgccaaaaagcaaagggaaaggaaaacctcttcagcgcaaggtgaaaccacctaagaagcaagaggaaaaggagaagaagggaaagggaaagccacaggaagatgagctgaaggactctttggctgatgatgatagctcctccaccaccacagagacctccaaccctgacacagaaccgctcctcaaggaggatacagaaaagcaaaagggaaaacaagccatgcctgaaaaacatgaaagtgaaatgtctcaagtgaagcaaaaaagcaaaaaactcttaaatattaagaaagaaatcccaacagatgtgaaacccagttcattagaactaccatatactccccctttggaaagtaagcaacgtagaaatctcccaagcaagattcctcttccaactgcaatgacaagtggatccaaatcacgaaatgcccagaaaacaaaaggtacaagtaagttagtggataacagaccacctgccctagcaaaattcctcccgaatagtcaagaattaggcaacaccagtagctcagagggtgaaaaagactctcctccaccggagtgggattccgttccagttcacaaacctggcagctctactgatagtctttataaactttctctgcaaaccctcaacgcagacattttcttaaaacaacgccagacctcaccgacacctgcttccccgtctcccccagctgccccctgcccctttgtggcccggggcagctacagcagcatcgtcaacagcagctccagcagtgaccctaaaataaaacagccaaatggaagcaaacacaagttgacaaaggcagcctcgctcccgggcaagaacggcaaccccacttttgctgcagtcacggctggctacgacaagagcccaggtgggaatggctttgctaaagtttcttcaaacaaaacaggtttctccagcagccttggcatttcacacgctcctgttgacagcgatggctcagacagctcgggtttgtggagtcccgtcagcaacccaagcagccctgacttcactcccctcaattcgttctccgcctttggaaactcttttaatctaactggtgaagttttcagcaaactcggattatctcgatcgtgcaatcaggcctcacagaggagctggaacgagtttaatagtggcccttcatacctttgggagtcgccagcgacagatcccagtccttcctggccagccagttccggctccccgacccacacagccacatcggtcctcggtaacaccagcggcctgtggtccaccactccattcagcagctccatttggtccagcaaccttagcagcgcccttcccttcaccactccagcaaacacgctggcaagcatcggcctcatgggcacagaaaactcccctgctcctcacgctccctccacctccagtccagctgacgacttgggacagacctacaacccgtggcggatatggagccccacgattggaagaagaagctcggacccttggtctaattcgcactttcctcacgagaattaaattaagcaaaaaacaaacaaacatagtgggccctcgtctagatcatgatgtgccagtttctgagacatctttttaaggctcttactgcagctcccctccccaccctcctcttctttgcaaaacagacccaagcagggcaggctcagaccactcgcttctttcagatctttcttgcaattatgataacatgagatttgctgttgtgcttttagagaaaagtctggactcagccacaaactctaataagacctgtacatctgagaacctttcccgttactgcgttttcaccacctgtcttccccatgctttatttatctgtatgaacacagatttgacattacagctaaggaaataatttgagttgattcagaaatcctggcatgtgacaattttgttaaattaccaagtttggtttttaataatttctcaatattatgcgccaagatctaattttaaaactgtatgaggactttgtgctgaaaatagagtatttttttaaagtaaggctgtcttggtttaaaagcagattacagaaatgtaagtcaacttaagaacagtgaatgaatgtaaaaacattcagtcgagaccatatgcattttctgtgctgtttgtacttgaggtatgtaacatttgtatacctgaacttattttaaagatgaactgaaatgcacatagccaagtcttgagatacaagattgaatgtgtatttcttaaaaatacaactttgtgttgtactttgaaataaatgatgcttttttcaaaaaaaaaaaaaaaaaaa

SEQ ID NO: 103 - DNA, 1302 bp, Homo sapiens
ggcacgaggtctgtttgatttttaaaaggaaaggatttgtttcagattatacaagaataaaagtattatagacccaagggacttcttatgaggtcaaattcagatatttatatgaatatgaaataccatggtccctagtagtcagttgaagtggcaatgtctaaacagaaatgaacaaaactaatgctagcaggttaaaatcaatcaaaatgtttaaaaattgattctgtcctcagcatgttacttcctcagctctgataatttactggtcttgagtattttgagaatttgatgttgaacgttataaagtcaaagaactgcttgtttagatgaggtttatttttatttttgatattattcattcttgtcacacatcaagaagaaaacactagagtgctgctggaattccaaatctgaagaattctaacgactgcattctttgttattaaaaagggcacaatccttcctttttatttggcagtttaatttcagtaggaagcatgtcacatgtgcactgttggttagaattatgcatctgtcatgcctgactgctgaaccctacctaagccttttggcgcagtttaaaacttatactggtggactgtgaacctcaaaacaaatgggtatttttgggttttgaggatagatgttactccttaaagtttgtatttggggcatgaaaaactactgaaagaagaaaagtgctacagatactacatttcaaagagttggcattttccctttggccactcaagcagcatttgatgtatctaaagaaacaaagtcattgtttattttaaaaaattatatgcagttgtacaagatactacattccattgaaatgttggctatgtcctaaccaggcaaccagataacaaaaacattttgagtcttttatctaggtagttctaattattcagctacttagtttaacaaaggaaaatatcctgacttctctcatttcatttgtagacttttcattgtataggcacaaccaaagagtcagactggtttaaaactccagaaggaaaaaaagtatcccacacagtggatgttgtttctaagaatgctacaaaatcctgacatctcagacatctcaatgttaaaggaagaaaaaaaataccttttcatttcaaagaactaatatactttgatattgtgtaaaccttactcaagtttattgtcaagctttaactgcctttttagaactttttaaaatttcgagcccacaaatctattgtattagttgccttctataacaataaatcttcactgagcaaaaaaaaaaaaaaaaaaaaaaaa

SEQ ID NO: 104 - DNA, 1816 bp, Homo sapiens
agaaagtacaggaagccgttcttgacaaatgggtgaatgaccctcaccgcatggacaggcgcttgctggccctcatttacctggctcatgcctcggacgtcctggagaatgcttttgctcctcttctggacgagcagtatgatttggctaccaagagagtgcggcagcttctcgacttagaccctgaagtggaatgtctgaaggccaacaccaatgaggttctgtgggcggtggtggcggcgttcaccaagtaactctgctcggggtgaaccattctcctttctctcaagtaaaccagtagtttttcttctgttgacttctggttttctgtaatttgtactttcccacactataattggcttctgttttacaaaatggtgggtggctttttcttttttgtacgtgtacaggattctgctggtacgagaggccttcctctttctgtttttaaaaaaagttttactgccatattggcattccattccctgttgccatcctcactgttacctgttttgggtttctggtctactttgactttcaaagtacctccagcctcctcatacgcacagcttttggatgactcagcttgagtttctccatatgtgcatgtacatctagcatctgcctacagttcagacagaagtcacaaaaaggccttcaactcaccaaaggtaaatatctgtatctattaggacatttttttacatagacttcagttgagatgtataattagcaaaattatttttaaattgaaacagcacagtaaatacttaatataaaatgtcccttggattttgcttcccatgtaaatctattgtattattacacttgttataattttaactataaaggtccaattgtttcacagagccagtttgggatgggctgcattccatttatgctgtatatagtttgaattatatataaattaccccttcttctggccacccctgctcccatcttagtattttgcaagatctaatcagttgtacacctggtgcccctcgcttgcttcaatcatggttatttgatggcaaaatcgacctcttgtcgctgaaggagagagaaaagatgtgtgtctgattggtcctgggattttttgagctgtgccatttatggtactctttgcctatgcatcccctttttagattttttttaaattttatcttactgtttttataatttctattgggaagaggcttgtgaccagtaccaatcttgagtttctttttctgtccacaagtaaattaatatctgctctgaaatgtcatttatctactcacacattcttggggaaaaaaatcaaatgtcagtcctagcagatgttgcatgtaaattggtagcaagtaatgattacaacccagaggattaagaattttgtaacagaaagctctatgttttaattttttatatacaattaggataattagcattgtcagactataaacctttgctttttaaagtttatttttactatttctttatcactttattgtatcatcaccattggtttcataatgtaaatactatatgttgaacaaattaaatgtcaaaattttttattaccatagtccatgttaatagtggggctttcaggtgtttagagattttttttgttgttgttaacattcattgcaaaagtactagatggtgtataactctagagttgaattttaagggattccctaatatgtatactatctttttatctgaagtaataaataaacaatgatcttgaaagtgcctgaaaaaaaaaaaaaaaaaaaaaaaaaaaaaaaaaaaaaaaaaaaaaaaaaaaaaaaaaaaaaaaaaaaaa

SEQ ID NO: 105 - DNA, 575 bp, Homo sapiens
ggcagaggcttttgaagttaatccttttgtgtgatacaggatgaacttgggatgtttgaaccctggacattccaaataaagaataggcccctgcctggctcctgggagataacctctaagccattagaatatcttgcctgataagagtgtttttgtttacctgtgggccttgggccatgcagtatcagcttgaccttgcaaggtcaagctgaggagactaagttagccatgtgggcagtgaagcatgccaatgtgatcaatccctagtaaaagccctggacacctaggcatgggtgagctactctggttggtaatactctgtgcacacatcattgtagccacacatcattgctgggagaattaagcattatcctgaagactctgccaggagaggataattggaagttctcttggaccttaccttatgtgcctttcttcattgctgattttaatctgtatcctttcactgtaataaactgtaactatgagtgcaacacttaaaaaaaaaaaaaaaaaaaaaaaaaaaaaaaaaaaaaaaaaaaaaaaaaaaaaaaaaaaaaaaaaaaaaactcgag

SEQ ID NO: 106 - DNA, 2352 bp, Homo sapiens
tcattgtatcaacagtacacttgatctccagtacagacatatggtggaacagaagcctggatacaggactcagactcttactgagttggccaggagcagcaggcaccacagcctgtgtgtgtgcagatacagtgtactactaccaaatggtgcccagctggaagtttaggtctcctcctacctggatctcattacttgggccgttttcaggatcgtttaatgtggataatgattctggaatgtggctatacttactgctctattaacattaaggggttagaattgcaggaaacatcctgtcatactgcagaagctcgcagattgatgaagtttttgaagatgcttttgagcaagaatacacaagagtatgttcccttaatgaacactttggaaatgtcttgacaccctgtactgttttgcctgtgaaattgtattctgatgccaggaatgttctatcaggcataattgattctcatgaaaacttaaaagaatttaaaggtgacctcattaaagtacttgtgtggatacttgttcaatactgctccaaaaggcctggcatgaaagagaatgttcacaacactgaaaataaagggaaagcacctctaatgttgcctgctttgaacactttgccacctcccaaatccccagaagacatagacagtttaaattcagaaacttttaatgactggtctgatgataatatttttgatgatgagccaactatcaaaaaagtaatagaagaaaaacatcagttgaaagatttgccaggtacaaatttgtttattccaggatcagtagaatcacagagggttggtgatcattctacaggcactgttcctgaaaacgatctttacaaagcagttctattaggataccctgctgttgacaaaggaaaacaagaggacatgccatatattcctctcatggagttcagttgttcacattctcacttagtatgcttacccgcagagtggaggactagctgtatgcccagttccaaaatgaaggagatgagctcgttatttccagaagactggtaccaatttgttctaaggcagttggaatgttatcattcagaagagaaggcctcaaatgtactggaagaaattgccaaggacaaagttttaaaagacttttatgttcatacagtaatgacttgttattttagtttatttggaatagacaatatggctcctagtcctggtcatatattgagagtttacggtggtgttttgccttggtctgttgctttggactggctcacagaaaagccagaactgtttcaactagcactgaaagcattcaggtatactctgaaactaatgattgataaagcaagtttaggtccaatagaagactttagagaactgattaagtaccttgaagaatatgaacgtgactggtacattggtttggtatctgatgaaaagtggaaggaagcaattttacaagaaaagccatacttgttttctctggggtatgattctaatatgggaatttacactgggagagtgcttagccttcaagaattattgatccaagtgggaaagttaaatcctgaagctgttagaggtcagtgggccaatctttcatgggaattactttatgccacaaacgatgatgaagaacgttatagtatacaagctcatccactacttttaagaaatcttacggtacaagcagcagaacctcccctgggatatccgatttattcttcaaaacctctccacatacatttgtattagagctcattttgactgtaatgtcatcaaatgcaatgtttttattttttcatcctaaaaaagtaactgtgattcttgtaacttgaggacttctccacacccccattcagatgcctgagaacagctaagctccgtaaagttggttctcttagccatcttaatggttctaaaaaacagcaaaaacatctttatgtctaagataaaagaactatttggccaatatttgtgccctctggactttagtaggctttggtaaatgtgagaaaacttttgtagaattatcatataatgaattttgtaatgctttcttaaatgtgttataggtgaattgccatacaaagttaacagctatgtaatttttacatacttaagagataaacatatccagtgttctaagtagtgataatggatcctgttgaaggttaacataatgtgtatatatttgtttgaaatataatttatagtattttcaaatgtgctgatttattttgacatctaatatctgaatgtttttgtatcaagtagtttgttttcatagacttcaattcataaactttaaaaaacttttaataaaatattttccttccttttcaaaaaaaaaaaaaaaaaa

SEQ ID NO: 107 - DNA, 1838 bp, Homo sapiens
aattcggcacgaggtcagaaatgattcagggttatttgaggggaaaaaaccccatagtgccttgattttaattcaggtgataactcaccatcttgaagtcattgtccggtttccgtagcagttttgaaaccttagtacctttttaacagcatgtgggtgtcagtgtcattattagtctcctaataagttcctctgaagactgctatcagtctcttggactggaggtacaaataatttagaaataaaagatgataacctaacactatcatagttattaatgtgatcctaaaattgtttcctaaatcagcatttttctttagtcatttaagaatttaccagaaatatttgctcaatatgatcttgatattcctacaaagaaaaaagaaggggtagggatttggctatgccttcactacaacattagaatattgtaactcacatgccttctaaacgtgaactaagatttcctttggcaatatcatattctaaaagtaataaattccaatacaagttacatacatttaaaaaacattttacagattttatggtactaatgaaatttacagtgatagaacaaaagaggattagtagaaaatacattattagaatataaaaaatgttattactgaggaaagggaggagaggacaagtgtaataaatcaaaattgacctcaaaagaaaatgtgtaacagagttgaggttgttaaaacagaaaaggttctgaataatgaagattaacctaatgcagaattgctaggtaaagaggtcaggggaatgctaagccagttcttaagacttctctgtcctctgctttgctgttatccttaaggcatatactttgtctttctgcagaaaattctacctggctacaattactttgaacattaatgttgaaaaagaaaacaaccaaagaaaattggtacttacccttctacaaaagaagtgtgactagatatcaatcagtaattaacatatcaaggagctcttctagctaaatgaccatccagtagagatttcccacattcccatgaatatcaagaatagttgtcagaatatgtatgtacctgagcatatgtacacagacaagggggatgttgtggaatatggcaatagcattgttcttctcccctttcaaattgcctttcttgaccttatgccattccatatatatctgagttgtgcctcatttatttattggcaatacctagtgatacggatttagctaacaaaagatatgaagaactattatattgaggcctgtcctctacataccacacttaaaagatggtgaactgtgagtactacttaggttgacagcaacaaagcataagacaagccccaggtaaacgtctaaactgtttactcacattgtcctactccagccccttcaattatttcccatctccacaaatagtcgggggaaaaaattaaaattttcctttatgattcttactgttcttcgcagctcatcttttcctgcttagaattaaccattgctaatttaaaggagcagctagctgcttttctgtcagtctgaagcgtagtagtggaagaggtagtaagcaccagctgcctctttgctgctttgttttcctcctgattctcttaaatttgggttgcaaagctatcccgccccccaccctgccccatgaaacttgagcattcaaatgaagattcagcagtgtctgttcttcatttctatagccaaagctgttagttaaaatcccaaatctatagcatttaaagataccaaatagaaacaccttccagctttaaaaaaaaaaaaaaaaaaaaactcgagggggggtcccgtacccaatcgcctgacatgcatcgta

SEQ ID NO: 108 - DNA, 1049 bp, Homo sapiens
  misc_feature (8)..(8): n equals a,t,g, or c
taccgggnccccccccgrgtttttttttttttttttttaaatattgctcccattatgcccaagaatcaaagattcttttgtttgggtggaggactctctgtccacttagctccctcccaactcagctacagattaggtttgtttcaataacataaggactgttctccaaaagctctggcaactgtggacaaaaagggcttcttcgagctattacacaacatgtgactttgctaaatcaaacctttatttataagatatggaagaatcagttatttgtgtgataagacatgcgaattctaggatagtaggacctaggcagatgtccacatgaacttgagggactttaaaaatcttaggattttaactataacccactttactccaacaaaatagaccaaatagctaatacttacagaatacttaccctgtaccaggcactaagtactttatatgtgcgaaattaatcctctcagctctaactttacaaacgaggagacggagacacaaagcagataaggaacttgcccaggatcacaggtgaagtggcagaggctcgccctagctgccaacagacaccgcccccatgccaggctgctgcccatcgtgagcagcagtcccatgctaccaggctccgggtagtcaagaggccagcagtgttacaggtaggctgcatcatacagtcggcaggcttttgtgagctagcctgagaatctttcacaacactaaaatttgatgcgtcttcccacaggaagaaacactggacttccaatactgataataacagcagtagctaacattctaagagcattacctacgttaattctttgaatcctcagaataccatgaggtaggtgttattattacccctattttacagatgaagaaactgaggcacagagagtctttgtaagtaaccaacagtttagtaagtgggagatttgagattccaacccaggcagcctggcttcagagtcttggctaccggagtttttaaccctcacattatgctgccctcagaatgcttatttaacctttccggacgcgtgggt

SEQ ID NO: 109 - DNA, 1444 bp, Homo sapiens
actgttcagtactctaggaagtgggtcaggcaccttgggggcccaacgctgctccgtggggatgtctgcctgcctgcctggttctcttttcctgctgtttcctccagcagggaggtatcagaggcggggacacccaagtaggcctggcatgggcagaaaggaggtcacagctaaggcggtagagtggggttggcaccagccacttgtctgtttcccttgtggatcttagcctgtcgtctcccaaccccagctgcccctctgtctccccgcagctggtaggtgagtgctgtcctcggctcactttcctcaagctctccggctgccacggtgtgactgctgacgctctggtcatgctagccaaagcctgctgccagctccatagcctggacctacagcactccatggtgagccctgtgtcccaaggggccctgaaaaaacccaggccggggtgacgggtgctcttgtattggggccccaggtggagtccacagctgtggtgagcttcttggaggaggcagggtcccgaatgcgcaagttgtggctgacctacagctcccagacgacagccatcctgggcgcactgctgggcagctgctgcccccagctccaggtcctggaggtgagcaccggcatcaaccgtaatagcattccccttcagctgcctgtcgaggctctgcagaaaggctgccctcagctccaggtgctgcggctgttgaacctgatgtggctgcccaagcctccgggacgaggggtggctcccggaccaggcttccctagcctagaggagctctgcctggcgagctcaacctgcaactttgtgagcaacgaggtcctgggccgcctactccacggctctcccaacctgcgcttactggatcttcgtggctgtgcgcgcatcacgccggctggccttcaggatctgccatgtcgggagctggagcagcttcatctgggcctgtatggcacgtcagaccggctgactctagccaaggagggcagcccctttttgacccagaagtggtgccatacactgcgagaactggacttgagtggccaggggttcagtgagaaggacctggagcaggccctggctgccttcttaagcacccctgggggctcacacccagccctgtgctctcttaacctcaggggcacccgggtcacaccaagcactgtcagctctgtgatcagcagctgcccgggcctgctctacctcaacctggagtcctgccgctgccttccccggggtctgaagcgggcctaccggggcctggaggaagtccagtggtgtctgtagcagctgctcaccagcccctcacccagctaggcagccacagacctgggacacctcagccagcttgcccaccctccacctttgcccaatttcagatatttgagcattttgttaaaataaaacatttttaggaaaaaaaaaaaaaaaaaa

SEQ ID NO: 110 - DNA, 2154 bp, Homo sapiens
  misc_feature (461)..(461): n equals a,t,g, or c
cccacgcgtccgarccgagctgaggctcggcttcctgctgatggtcagggttttggcaactccccggtgtgagaggggtagggagtgctcccggcggcgacggggccgagttcaccagccgccggggcagtagtcgaaggcccggcgcggcatgtcctgggtgccgcggtgcgggcagtgaacgcgcgccgggcgggatgggccggcgccgggcgccagagctgtaccgggctccgttcccgttgtacgcgcttcaggtcgaccccagcactgggctgctcatcgctgcgggcggaggaggcgccgccaagacaggcataaagaatggcgtgcactttctgcagctagagctgattaatgggcgcttgagtgcctccttgctgcactcccatgacacagagacacgggccaccatgaacttggcactggctggtgacatccttgctgcagggcaggatgcncactgtcagctcctgcgcttccaggcacatcaacagcagggcaacaaggcagagaaggccggttccaaggagcaggggcctcgacaaaggaagggagcagccccagcagagaagaaatgtggagcggaaacccagcacgaggggctagaactcagggtagagaatttscaggcggtgcagacagactttagctccgatccactgcagaaagttgtgtgcttcaaccacgataataccctgcttgccactggaggaacagatggctacgtccgtgtctggaaggtgcccagcctggagaaggttctggagttcaaagcccacgaagggagattgaagacctggctttagggcctgatggcaagttggtaaccgtgggccgggaccttaaggcctctgtgtggcagaaggatcagctggtgacacagctgcactggcaagaaaatggacccaccttttccagcacaccttaccgctaccaggcctgcaggtttgggcaggttccagaccagcctgctggcctgcgactcttcacagtgcaaattccccacaagcgcctgcgccagccccctccctgctacctcacagcctgggatggctccaacttcttgccccttcggaccaagtcctgtggccatgaagtcgtctcctgcctcgatgtcagtgaatccggcaccttcctaggcctgggcacagtcactggctctgttgccatctacatagctttctctctccagtgcctctactacgtgagggaggcccatggcattgtggtgacggatgtggcctttctacctgagaagggtcgtggtccagagctccttgggtcccatgaaactgccctgttctctgtggctgtggacagtcgttgccagctgcatctgttgccctcacggcggagtgttcctgtgtggctcctgctcctgctgtgtgtcgggcttattattgtgaccatcctgctgctccagagtgcctttccaggtttcctttagcttccctgcttcctgggaatcaggagcctggacactgccatctctagagcagagtggaggcctggactccctttgctcactccattcgggtccacagctgaggttgcctctgacaagatgaatgggcactgcctgcccttctagtgaaaaggcttggctatggccctgtgtgactccaggtcccaggaaccttgccttcgtcatctgtggatccatccagaacagcggtatctgaagcccaggccatactccctgcctcctttcttctgcctaccagaggctccagagttgagcttgtccttatctagaaacatgtgaagatgcccaagagcctggaggcactgctgtccttcctgcagaaacagtttctcctcctcccctcagccttgtggccagttcctcttcacatgaagcccctggcatttgctggggaagggactggcctggtacttgctgttagggcaggaaggggcaaaaggaagacttgggtagtaatctgggggttcagatgggtagcactaagccagctggcctaaagatgcaataagttcctaggtagtctacccttaccttgaggaatgggaaaatgaacctcagcccattaggcaggaaaagttgatatttaataaacaaggaaagagtgaactgagaccccaaaaaaaaaaaaaaaaaaaaaaaaaaaaaaaaaaaaaaaaaaaaaaaaa

SEQ ID NO: 111 - DNA, 1058 bp, Homo sapiens
gactttttttcatctgcttattttcagcctatgtgtgtctttataagtgaaatgtgtttcttgtagacaacagataattgggtcttgtttttttatccattcagagccactctgtgtcttttgatttgagagtttagtgcgtttccattgttattaagaagtaaggatatgttctgccattgtattgtttgtcttttgcttgttttgtggtcttctcttcctttcttcattccttcatttcttttattgaaggtgattttgtcttgtggtatgatttaatttcttcctttttattttttaggtatatgtyatatggtttttgatttgaggttatgatgagtcttgcaaatattatcttacaacctattattttaagctgataaccacttaacattgcataggcaaaaacacacagaggcaaaaagaaaaccaataaaagctctacactttagcctcttgctttttaactttttgttgtctctgtttatatctcattataatttctatgtcttgaaaagttgtcattattagttttggttggttcatcttttagtctttctccttaagatcagagtattttatatatcacatttacagtgttataatatgctgcatttttttgtgtacttactattaccagtgagttttggaccttcagttgatttcttattactcatcaacttccttttctttctgattgaaaaactcccaggctggacacggtggcccatgcctgtaatcccagcactytgggaggctgaggtgggctgatcccttgaggtcaggagttcgagaccatcctggaaaatgtggcaaagctccatctgtwctaaaaatataaaaaattagttgggtgttgtggcgagcacctgtaatcccagctacctgtgaggctgaggcaggagatcgcttgaacccgggagacgaaggttgcagtgagccgagatcgcaccgctgtactccagtcctgggtgacagagcgagacgccatctcaaaaaaaaaaaaaaaaaaaaaaaaaaaaaaaaaaaaaaaaaaaaaaaaaaaaaaaagggcggcc

SEQ ID NO: 112 - DNA, 1009 bp, Homo sapiens
ggcacgagcaaaggtgaagctggttttcatggtctcctgagggcccctggcccctgggagatgggtcacactccctgaatgctgtgctgttggtttccctggaggattcttgctgcaggccaggtcccgtattctccacactcaccacaagtggctgggtgtgacttgacacggtgtgaaagtggaggggcgcgagcactcagtatccagcgagcagcattggtggtcctagaaaattactacaaagatttcaccatctataacccaaacctcctaacagcctccaaattccgagcagccaagcatatggccgggctgaaagtctacaatgtagatggccccagtaacaatgccactggccagtcccgggccatgattgctgcagctgctcggcgcagggactcaagccacaacgagttgtattatgaagaggccgaacatgaacggcgagtaaagaagcggaaagcaaaggctggtggttgcagtggaagaggccttcatccacattcagcgtctccaggctgaggagcagcagaaagccccaggggaggtgatggaccctagggaggccgcccaggccattttcccctccatggccagggctctccagaagtacctgcgcatcacccggcagcagaactaccacagcatggagagcatcctgcagcacctggccttctgcatcaccaacggcatgacccccaaggccttcctagaacggtacctcagtgcgggccccaccctgcaatatgacaaggaccgctggctctctacacagtggaggcttgtcagtgatgaggctgtgactaatggattacgggatggaattgtgttcgtccttaagtgcttggacttcagcctcgtagtcaatgtgaagaaaattccattcatcatactctctgaagagttcatagaccccaaatctcacaaatttgtccttcgcttacagtctgagacatccgtttaaaagttctatatttgtggctttattaaaaaaaaaaaaaaaaaa

SEQ ID NO: 113 - DNA, 665 bp, Homo sapiens
cccacgcgtccgcacaggaagagtgtgtagaagtggaaatacgtatgcctcctttcccaaatgtcactgccttaggtatcttccaagagcttagatgagagcatatcatcaggaaagtttcaacaatgtccattactcccccaaacctcctggctctcaaggatgaccacattctgatacagcctacttcaagccttttgttttactgctccccagcatttactgtaactctgccatcttccctcccacaattagagttgtatgccagcccctaatattcaccactggcttttctctcccctggcctttgctgaagctcttccctctttttcaaatgtctattgatattctcccattttcactgcccaactaaaatactattaatatttctttcttttcttttcttttttttgagacaaggtctcactatgttgcccaggctggtctcaaactccagagctcaagagatcctcctgcctcagcctcctaagtacctgggattacaggcatgtgccaccacacctggcttaaaatactatttcttattgaggtttaacctctatttcccctagccctgtccttccactaagcttggtagatgtaataataaagtgaaaatattaacattaaaaaaaaaaaaaaaaaaaaaaaaaaaaaaaaaaaaa

SEQ ID NO: 114 - DNA, 879 bp, Homo sapiens
ggcacgagaaattacagcagtgcaaagcagagctaaactctaccactgaagagttgcataagtatcagaaaatgttagaaccaccaccctcagccaagcccttcaccattgatgtggacaagaagttagaagagggccagaagaatataaggctgttgcggacagagcttcagaaacttggtgagtctctccaatcagcagagagagcttgttgccacagcactggggcaggaaaacttcgtcaagccttgaccacttgtgatgacatcttaatcaaacaggaccagactctggctgaactgcagaacaacatggtgctagtgaaactggaccttcggaagaaggcagcatgtattgctgagcagtatcatactgtgttgaaactccaaggccaggtttctgccaaaaagcgccttggtaccaaccaggaaaatcagcaaccaaaccaacaaccaccagggaagaaaccattccttcgaaatttacttccccgaacaccaacctgccaaagctcaacagactgcagcccttatgcccggatcctacgctcacggcgttcccctttactcaaatctgggccttttggcaaaaagtactaaggctgtggggaaagagaagagcagtcatggccctgaggtgggtcagctactctcctgaagaaataggtctcttttatgctttaccatatatcaggaattatatccaggatgcaatactcagacactagcttttttctcacttttgtattataaccacctatgtaatctcatgttgttgtttttttttatttacttatatgatttctatgcacacaaaaacagttatattaaagatattattgttcacaaaaaaaaaaaataaaaaaaaaaaaaaaaaaaa

SEQ ID NO: 115 - DNA, 1919 bp, Homo sapiens
  misc_feature (1903)..(1903): n equals a,t,g, or c
agacagggwggcggtggcagaggacacttgtcatggccgcctctaaacctgtggaggcagcggacaccctgaaggtcccggtgctcacttggacatgaactctcttgatagagcccaagcagccaagaataaaggcaataaatattttaaagcaggaaaatatgaacaagctattcagtgctatactgaggctattagcttgtgccctacagagaagaatgttgacctttctacattttatcaaaacagagctgctgcctttgaacagttgcaaaaatggaaagaagtggcacaagactgtacaaaagctgttgaacttaatcccaaatatgtgaaagctctctttagacgtgcaaaagcccatgagaagctagacaataagaaggaatgtttagaagatgtcactgctgtgtgtatattagaagggttccaaaatcaacaaagcatgctgttagccgataaagttcttaaactccttggaaaagagaaagccaaagaaaaatataagaatcgtgaacctctgatgccatctccacagtttatcaaatcttacttcagttctttcacggatgatatcatttcccagcccatgcttaaaggagagaaatctgatgaagataaagacaaggaaggggaggctttagaagtgaaagaaaattctggatacttaaaggccaaacagtatatggaagaagaaaactacgataaaatcataagtgaatgctcaaaagaaatagatgctgaaggcaaatacatggcagaagcattgctactacgagctaccttctacctgcttattggcaatgccaatgcagccaaaccagatttagataaagtcatcagtttgaaagaagctaatgtgaagcttcgagcaaatgctctcatcaaaagaggcagcatgtacatgcaacagcagcagcctttgctgtccactcaagattttaacatggctgctgacatcgatcctcagaatgcagatgtttatcaccaccgaggacagctgaaaatactccttgatcaagttgaagaagcagtggcagattttgatgaatgtattaggttaagacctgagtctgctctggcacaagcacagaaatgttttgcattgtaccgccaggcatatacgggaaacaactcttcacaaatccaagcagctatgaaaggttttgaagaggtcataaagaaatttccaaggtgtgccgaaggctatgcactatacgcccaggcattaacagatcaacaacagtttggtaaagctgatgaaatgtatgataaatgtattgatttggaaccagataatgctacaacatatgttcataaaggtttacttcaacttcagtggaagcaagatctggatagaggtttggaacttatcagcaaggctattgaaattgacaataaatgtgattttgcctatgaaaccatgggaactattgaagtacaaagaggaaacatggagaaagccattgacatgttcaacaaagctattaacctggccaaatcggaaatggagatggcccatctgtattcactttgcgatgccgcccatgcccagacagaagttgcaaagaaatayggattaaaaccaccaacattataaaacagggggaaagcagactgaccctctttttaaaagtttaccccctcttcaactgaaccctaaagacactgtcatgaactgtgttgaatggtggaaatcagtatttctgtttgtggtgttgttatttgttacatctgtttcatgtctaggtgttgtgggtgtggctgttgaaggaagtttgcagtcttgcagcttttattccctgtgcaacaaaagattagaacatgttaaagggatttttaaataaagttgcaaagagtacaaatgataattggccatgcaaataaaaaaaaaaaaaaaaanaaaaaagggcggccgc

SEQ ID NO: 116 - DNA, 788 bp, Homo sapiens
  misc_feature (274)..(274): n equals a,t,g, or c
ggcacgagaaaccactatgcttaatgttaacatgattctgtttgttaatattttgacagattaaggtgttgtataaataatattcttttggggggaggggaactatattgaattttatatttctgagcaaagcgttgacaaatcagatgatcagctttatccaagaaagaagactagtaaattgtctgcctcctatagcagaaaggtgaatgtacaaactgttggtggccctgaatccatctgaccagctgctggtatctgccaggactggcanttctgatttagttaggagagagccgctgataggttaggtctcatttggagtgttggtggaaaggaaactgaaggtaattgaatagaatacgcctgcatttaccagccccagcaacacaaagaatttttaatcacacggatctcaaattcacaaatgttaacatggataagtgatcatggtgtgcgagtggtcaattgagtagtacagtggaacctgttaaatgcataacctaattttccygggactgccatattttcttttaactggaaatttttatgtgagttttccttttggtgcatggaactgtggttgccaaggtatttaaaagggctttcctgcctccttctctttgatttatttaatttgatttgggctataaaatatcatttttcaggtttattcttttagcaggtgtagttaaacgacctccactgaactgggtttgacctctgttgtactgatgtgttgtgactaaataaaaaagaaagaacaaagtaaaaaaaaaaaaaaaaaa

SEQ ID NO: 117 - DNA, 797 bp, Homo sapiens
ggcacgagcccacctgactgacaaaaaaaagagcaatcctttatgcctctgtcctcccccagttattctaggttctggtcccttacacctggccaagctgtcaggtattattatggcatcttgttcagctaattaagcagtacaactgagacaattgccaccccatttgtcatgtgtggtgccttccaagatagcccccagtgattctcacctcctgatattcacacccttgtgttgtgtcctcccatgtcataccaaggttggtctttgtgataaaattcagggaagtgatggtgtgtgacttgtgacactagatccgaaaagacacggtgatgtctgacttgttctcttggatgtctctccctgagtgaagccagctacttttcatgaggatactcaagcattcctatggagagatccacatggtgagaaactgaagcctcctaccaagagccagcaccaacttgccagctatgtgaatgagccatcttagaagtgggttctctagccctagtcaggccttcatatgactgcagccagggctgatattttgactacaacctcatgagagactgagccacaacaacctagctaagaagctcctgaattccctaccaacagaaactatgtgagataatgtttgttgttttaactaagttttcaagtggtaatttgttatacagaatatgtaactaataaagcatggctcctttaggtctaaaaaaaaaaaaaaaaaaaaaaaaaaaaaaaaaaaaaaaaaaaaaaaaaaaaaaaaaaaaaaaaaaaaaaaaaaaaaa

SEQ ID NO: 118 - DNA, 652 bp, Homo sapiens
ccacgcgtccggagatgactcatggaaaaattgtgttggcttggtctgcatgtttaatgatgtgcttgtatatcgattagctgtgtcacttttaaataagaagtccacacaagcaagccaaatttttagatgacgaagtccataaataactagagaatttttgttatctgttgttaagttgaaatgtataatcatttatcactaaattgcacattgcctttatttatttgtgctctgtttttggtttacagtgtaataatacctcatttaaaaaataaaaaccactactgttacattttattaatttaaaaagctagaaaattcatgtagttactttttttacatatataatctgttaatgaattattgatttttgtatctgccacagtaaattaaagcattacacagtatttatcagtattttttaaacatcctgtccttttttaaaatctttgcttagtcagtcatatttttgtctgtatgattagaagtttttacgtccttccttttttgtacaaatctgtattgtattaatttctggatgcaatttttcaaatattaaaattatacagtcagtcaggcttcagtttattttttgaacacttgggcaattaattaaagccatatgtttaaaataaaaaaaaaaaaaaaa

SEQ ID NO: 119 - DNA, 1488 bp, Homo sapiens
cgccaagtttccggagggagagggtagaaactggagggggtggacctgtcactcacgggactgagggtccttttctcccgctcccaggaggaacgagaatgaatatgactcaagcccgggttctggtggctgcagtggtggggttggtggctgtcctgctctacgcctccatccacaagattgaggagggccatctggctgtgtactacaggggaggagctttactaactagccccagtggaccaggctatcatatcatgttgcctttcattactacgttcagatctgtgcagacaacactacaaactgatgaagttaaaaatgtgccttgtggaacaagtggtggggtcatgatctatattgaccgaatagaagtggttaatatgttggctccttatgcagtgtttgatatcgtgaggaactatactgcagattatgacaagaccttaatcttcaataaaatccaccatgagctgaaccagttctgcagtgcccacacacttcaggaagtttacattgaattgtttgatcaaatagatgaaaacctgaagcaagctctgcagaaagacttaaacctcatggccccaggtctcactatacaggctgtgcgtgttacaaaacccaaaatcccagaagccataagaagaaattttgagttaatggaggctgagaagacaaaactccttatagctgcacagaaacaaaaggttgtggaaaaagaagctgagacagagaggaaaaaggcagttatagaagcagagaagattgcacaagtggcaaaaattcggtttcagcagaaagtgatggaaaaagaaactgaaaagcgcatttctgaaatcgaagatgctgcattcctggcccgagagaaagcgaaagcagatgctgaatattatgctgcacacaaatatgccacctcaaacaagcacaagttgaccccggaatatctggagctcaaaaagtaccaggccattgcttctaacagtaagatctattttggcagcaacatccctaacatgttcgtggactcctcatgtgctttgaaatattcagatattaggactggaagagaaagctcactcccctctaaggaggctcttgaaccctctggagagaacgtcatccaaaacaaagagagcacaggttgatgcaagaggtggaaatgttctccatatcaagatgtggcccaaggggttaagtgggaacaatcattatacggactcttcagatttacagagaacttacacttcatctgttccacctctcctgcgatagtcctgggtgctccactgattggaggatagagccagctgtctgacacacaaatggtcttttcagccacagtcttatcaagtatcctatatgtattcctttctaaactgctactcatgaatgaggaaagtctgatgctaagatactgcctgcactggaatgttaaacactaaatatataacaagctgtgttttcctaagctgaaaaaaaaaaaaaaaa

SEQ ID NO: 120 - DNA, 1842 bp, Homo sapiens
  misc_feature (1134)..(1134): n equals a,t,g, or c
  misc_feature (1210)..(1210): n equals a,t,g, or c
aattcggcagagtttgggtctcagctgccacctcccttccttggatgctgtcccaaccaccccattccaaaagaggttatcgcttgtgattctctatcactgggccaaatctgcctgttgcctagtgctcctagccctttctatattaattcatttcattatttcagccctgtctcctccactaggatataagctgcacgagagatgggctatgtctcttactcactgttgggcctcccaggacctcagcacagggcctgacacacagtargtgggttaatagatactgattgaatgaaagaacaaggtgggtactaaaatcccccttttaaagaggaggcttggagttatgaggttgtacgagcaaagcttattccctaactaccacagtcccccccctgcagccagggccgggatcataccacaattccctgcccatcaagctgtcatgaatagccctaagatatcaggaagcacaaagatatcaatgccaggagggataggaggaggcggccaagaaaccccggaattgtacttaaaawtctggctacgcaaactgcttgcccaactttagacaccatgatgaatgatcaggtgctgcaaccatgaaacatgacgtaattagtgctgcactcttggctgggggttggcttggaggccccacctcgaggttagcctcccccagagggtcactgcacgargcagtctggtgcggggtgggggttacaacagagggaggtggaatcagaccactcggcagccctgtgaccattatgtgcacttttatacaaaggatacaaaagacaccaatactggggaatttatttaagaatacttctaggatgtgtcctgtgatgcctcaggtctatgtcccacattttcttaaatctatagtcctgtgtaataagaragartatttgaaagattagtcaattaattggtctaacaaaaagaattctatttctgcagccccaggagtggaagaaagagccagaactctgtggtgcagggctttagacttgcttcaggtcttctttcccctgggtcttctggatcttgctgccctggccatgaaagggaaaggataaaggaagtttgttcccttaagaccttgtgctgccctgtgctatctgnttctggccaacctgaatttgagaacgcttcttcagtttgcatctgtgtgaccttgggcaagataggaactgtctgnatctgctccttcagctacccaccttgtaaagcagttgggcaccatagagtagctgctgkcacagtggggtattctcttaccatcaatatggctggcatagtcattctacttctcctttacttgggcccttgcctaggccactcagcctccccagagcaggccccctctcagtcccaaggcctcctaggcctaggtgtctgccctagctggagaaaggcacaagaagaaaacaccagtcaatgggagaaaagtcccccaggccagtcttccacctagagcccctcccctttctcaccacaaagrttgcttcactgagggcggggcgcagtggctcacgcctgtaatyttaacaytttgggaggccaagacaggcgatcacttgaggtcaggagttcaagaccatcctgaccaacatggcaaaaccccgccttcattaaaaatgcaaaaattagccaggcatgatggtacacacctgtagtcccagctattggggaggctgaagcaggagaatcgcttgaacccaggaggtggaggttgcagtgagtcgagattgcgccactgcactccagcctgggtgacagaatgagactctgtctcaaaaaaaaaaaaaaaaaaaaaaaaaaaactcgtag

SEQ ID NO: 121 - DNA, 4038 bp, Homo sapiens
  misc_feature (1764)..(1764): n equals a,t,g, or c
  misc_feature (4030)..(4030): n equals a,t,g, or c
  misc_feature (4037)..(4037): n equals a,t,g, or c
caggaactkgcgctkaagaccctgggracagatggcctttttctcttttcctccttggacactgacggggatatgtacatcagccctgaggagttcaaacccattgctgagaagctaacagggtcaactcccgcggccagctacgaggaggaggagttgccccctgaccctagcgaggagacgctcaccatagaagcccgattccagcctctgctcccggagaccatgaccaagagcaaagatggcttcctaggggtctcccgcctcgccctgtccggcctccgaaactggacagccgccgcctcaccaagtgcagtgtttgccacccgccacttccagcccttccttcccccgccaggccaggagctgggtgagccctggtggatcatccccagtgagctgagcatgttcactggctacctgtccaacaaccgcttctatccaccgccgcccaagggcaaggaggtcatcatccaccggctcctgagcatgttccaccctcggccctttgtgaagacccgctttgcccctcagggagctgtggcctgcctgactgccatcagcgacttctactacactgtgatgttccggatccatgccgagttccagctcagtgagccgsccgacttccccttttggttctcccctgctcagttcaccggcsacatcatcctctccaaagacgccacccacgtccgcracttccggctcttcgtgcccaaccacaggtctctgaatgtggacatggagtggctttacggggccagtgaaagcagcaacatggaggtggacatcggctacataccccaratggagctggaggccacgggcccctctgtgccctccgtgatcctggatgaggatggcagcatgatcgacagccacctgccctcaggggagcccctgcagtttgtgtttgaggagatcaagtgggcagcaggagctgagctgggaggaggctgcccggcgcytggaggtggccatgtacccyttcaagaagtctcctacttgccgttcactgaggccttcgaccgagccaaggctgagaacaagctggtgcactcaatcctgctgtggggggccctggatgaccagtcctgctgaggttcagggcggactctccgggagactgtcctggaaagttcgcccatcctcaccctgctcaacgagagcttcatcagcacctggtccctggtgaaggagctggaggaactgcagaacaaacaggagaactcgtcccaccagaagctggctggcctgcacctggagaagtacagcttccccgtggagatgatgatctgcctgcccaatggcaccgtggtccatcacatcaatgccaactacttcttggacatcacctccgtgaagcccgaggaaatcgagagcaatctcttcagcttctcatccacctttgaagacccgtccacggccacctacatgcagttcctgaaggagggactccggcgtggcctgcccctcctccagccctagagtgcctggacgggatctgatgcacaggcccccacgcctcagagccagagtggtcctcagcccatttcagcactgcagatgccgcccactcccaccccactcctaggctgccttggagggtacaagatccactgagggtggccaccacagccttggctccatggtggcgggtagacaagggatgcctgggctgactgggcagaggaacctctagctctgactgtcactcggctctccctacccatttggctctggaagctgcttggccccccnagatcagggcctgggtgaactccctggacctttcctagccagccgcacagtctaggcccttgtggggtgaagaatggagggaggagcaggctaggaagacggggccaccaccctctccttgctttcagcccttcccacaggaaacatcaagaagccccagccaggaggggccaggctgccaaggcggctcccctgtttatctagagccttcgttcctggccataccccggactgccctcctgtgcctgatgtccccagctggggtcagtctcaacaggagccagtcttctggagcctctgggcagaaccctccatcagagtggaaatcagacgggaccccctgcagcttccctgaccacgccactgaccagctatctggggaagtttactgtgaaggggtttctgcctttagcaatggggttcactaagggggttcccgaggcccagggccaaggcactcccaccgcctaccttagcacagggtctctgcaggactgcgggagccagcgctcctgccgcccctcttgcccctcagaccttgcatccacagaagcacaacccagccaaacaccacagccttctccagagccggcactgtcccggcaaccaggggtgccccaggctagctcttctacctctggggcaccacggactccccttggccactcttgggactttggtccacgtcctgagccactgaccacggccagtctctctttttatatgtgcagaaaagtgtttttacacaaactttctcatggtttgtaggtatttttttataaccccagtgctgaggagaaaggaggggcagtggcttccccggcagcagccccatgatggctgaatccgaaatcctcgatgggtccagcttgatgtctttgcagctgcacctatgggaagaagtagtcctctcttccttctcctcttcagctttttaaaaacagtcctcagaggatccatgatccccagcactgtcccatcctccacaaaggcccacaggcatgcctgtactctctttcattaaggtcttgaagtcaggctgccccctccccagcccccagttctctccccaccccctcaccccacccggggctcactcagcctggcagaggaagaaggaaggcagacatctccgcagccactcctgggccttttatgtgccgagttaccccacttgccttgggcgtgtccactgagccttccccagccagtcttgttctcaattttgttttgttttgttttgagacggagtcttgctctgtcacccaggctggagtgctatggctcgatcttggctcactgcaacctccacctcccaggttcaagcaattctcttgcctcagcctcccgagtagctgggattacaggtgcatgccaccatggctggctaatttttgtatttttagtagagatggggtttcaccatattggtcaggctgatctggaacttctgacctcaggtgatccacctgcctcagcctcccaaagtgctgggattacaggcgtgagcaatcgtgcccagccttgttcttaattttgtatcatccagtcatcgctaatattacacgcaccttctcacttaatcctcacgacaagcctgtgaggcagatgctcattgttcccatcttgatgaaacttgagtctcagggaagtgaagtgacttgcccagggtcactcaggtagagttgagattcaaacccacatgtggctccaaagtctgcatctggatttgggggtgttttttggcatggcaccctcacctctctccctgcctgttttccccaaagtggaaaggaaggcctttcaaaccagagtgtctcactcccctctgacctccagaccagatggggcatgagccagccagctcagccaggctccctgtgtcctgggaggaagtgtccccatcccccatgccccttatggggagggagggcgtctgatgctctctctctgcctcccccccatcctgtcaggcacaggtgacgggggcagcccatgcgagcccttctcctgctgctctgggagggccagttccacattgagccagcctggtcccatggaaaatgatggcctgggctttctgaggccttatctgatgcctctgcagttcatgtcccccaccaggcctcgaggctcagggtgggagagggccccgggctgccctgtcactcctctaacacttccctcccctgtccccaacatgccctgtaataaaattagagaagactaaaaaaaaaaaaaaaaaaaaaaaaaaaaaaaaaaaaanaaaaaana

SEQ ID NO: 122 - DNA, 1427 bp, Homo sapiens
gaacatttcaagtagcctccctctatgttcctttcctttttaaatatattgataatcctactgcagggaatttgggagccatacttggtcttcgcatgcaacgtaattagatataactatactatgtgaatatgactaaagaaatgaaaatgaaaacagtatcttgtgctctgtaacgattgttattaaatatatcatagaaatgagaagagtaggctcaggagctgaactgcctagttcaaaaggccaaatttactactttttgttccgtgattgaatttgttgtgctcctgtttccttagttgtaaaacagagataacaataggacgtgcccataagcttttcatgaggattaaatgagttaatgtgtttggtggggaccaggtggacatggtactggtagggccctatttgacattggctttaagtatcattggctttaagtgcatcagtagatatatgatgacaataattgtattatcatggtgatatggatttcttataaatacttgtattatgttagtcacttctagaaaagaatacatctatacagtagaatataattcaaaaaataatgtcatatttttgtaaagaaattttttgtaaaacttttcagtcttcaaagagtttcatagactttattccatttatattgagagcctactttgtgttaagcattttgctgaacattgtcctcactcttatgttacttaccatctattgggaagagaaagaagtaaacaaataattacatgtagagtagtagtgtcaatggtagaggcatgaacacaacacagatttaacactagagaaagagtgatcacaaaagaaatgatgtttcagttgagttttaaatggcagctggagttcatctgaatgattaggtgtctaggacaggtttaaaggttagggagtaaggaagataatattcaaaataaaaagaacctgaggatattcacagaggacatttgcagaggcctgaaatagcattggtacattcctagaaccataaatagtttgatggtaatgtaaattacagtatgttttgaaaaatcatggaagatttataccacgatagaaacttcaactttattctaaagttgatgagcatttgacagattttaagcaagaaacaaatattaaatttatattttagaaagattctagatacataaaaagcacttattataatccagtatccattcatgataactctcagctaactggaaataaaagggaacttccttagtctaaggaagaacatctacataaattctacaaccagccacatacttaatggtgaaataatgaatgtttttctcctaagatcaggaaaaagaaaaagatgtctcctcttacttctattcaggatggtactggtagttcaggccagtacagctatgcaaaaaaaaaaaaaaaaaactcga

SEQ ID NO: 123 - DNA, 840 bp, Homo sapiens
  misc_feature (789)..(789): n equals a,t,g, or c
  misc_feature (805)..(805): n equals a,t,g, or c
  misc_feature (836)..(836): n equals a,t,g, or c
gtctgtctcctactggcacaacagaattttggctgggaaatgagaagattcatttgataagcacacagtctgccatcccatatgcattaagagtggaactggaagactggaatggcagaaccagtactgcagactatgccatgttcaaggtgggacctgaagctgacaagtaccgcctaacatatgcctacttcgctggtggggatgctggagatgcctttgatggctttgattttggcgatgatcctagtgacaagtttttcacatcccataatggcatgcagttcagtacctgggacaatgacaatgataagtttgaaggcaactgtgctgaacaggatggatctggttggtggatgaacaagtgtcacgctggccatctcaatggagtttattaccaaggtggcacttactcaaaagcatctactcctaatggttatgataatggcattatttgggccacttggaaaacccggtggtattccatgaagaaaaccactatgaagataatcccattcaacagactcacaattggagaaggacagcaacaccacctggggggagccaaacaggctggagacgtttaaaagaccgtttcaaaagagatttacttttttaaaggactttatctgaacagagagatataatatttttcctattggacaatggacttgcaaagcttcacttcattttaagagcaaaagaccccatgttgaaaactccataacagttttatgctgatgataatttatctacatgcatttcaataaaccttttgtttcctaaganaaaaaaaaaaaaamwnggggggggcccgkacccattggccttatggngggc

SEQ ID NO: 124 - DNA, 2450 bp, Homo sapiens
ggcacgagcggcacgaggtttcttgaggagtaattgtcgggaaagtagataaagtataagctttagaatcatatatttagattcaaatatctggtatcgaatcctggctctgaatttactggctgtgtgaccatgggtaaattacttaaattccttaactctccctgttttccattcctaaatgtgtatgatgaattatttgcagagccatttggaggactagtggtatggaatgcaaactatttatgtctatttactaaaacataaacagagtaaatcaccaagtacagacaggctccaaggaatggtttgcttacttgttcactcttttttgtctttctgattctatcctctgtcactctaggtcttcagtttctttactctccatggtggtgcctggctgctgcgactctaggggtcctttgcctgggattagtagtgaccattatggtgctgggcatgcaattatcccaggtgtctgacctcctaacacaagagcaagcaaacctaactcaccagaaaaagaaactggagggacagatctcagcccggcaacaagcagaagaagcttcacaggagtcagaaaacgaactcaaggaaatgatagaaacccttgctcggaagctgaatgagaaatccaaagagcaaatggaacttcaccaccagaatctgaatctccaagaaacactgaagagagtagcaaattgttcagatttagagtccgaggcgctgtctcccagacatacccttcaggtacctgtgcatatatacaacgaggagctgtttatgcggaaaactgcattttagctgccttcagtatatgtcagaagaaggcaaacctaagagcacagtgaatttgaaggctctggaagaaaagaaaaaagtctttgagttttattctggaatttaagctattctttgtcacttgggtgccaaacatgagagcccagaaaactgtcatttagctggctgcagaactcctttgcagaaactggggttccaggtgcctggcacctttatgtcaacatttttgattctagctatctgtattatttcacctagcttgtcccaagcttccctgccagcctgaagtccattttcccctttttattttaaaatttgactcctcttcaagcttgaaaaccctctgaactcagtcttctttacctcattatcaccttcccctcacactcctaaaattgcatgaaagacagaacatggagaacttgctcaagtgcaggcagagagcaaaaaggggaaatatgtctgggaaaaagtgcacgtgaagaaacaaagaaggacagaggccattccgaaatcaagaaactcatgttcttaactttaaaaaaggtatcaatccttggtttttacactgtggtccatctccagactctaccacttacagacagacagacagacacacacacacacacacacacacacattttgggacaagtggggagcccaagaaagtaattagtaagtgagtggtcttttctgtaagctaatccacaacctgttaccacttcctgaatcagttattatttcttcatttttttttctaccagaggacagattaatagatttaacccttcacaacagttcttggtagaatcatgggatgtgtggcccagaggtaaagaatagaatttctttccctaaagaacataccttttgtagatgaactcttctcaactctgttttgctatgctataattccgaaacatacaagacaaaaaaaatgaagacactcaatctagaacaaactgagccaggtatgcaaatatcgctgaatagaaacagatggaattagaaatatatcttctatttttaggcttctatttcctttccacccactcttcacaggctattctactttaaaggaagcctttttattttgctgcacacaatctagcaggaatctttttttttttttttaagagctgtgtcatccttatgtaggcaagagatgtttgcttttgttaaaagctttattgagatataattaacataaaataaactgaacatatttaaagtgtactatttgataagttttcacaccttgtggagaacatgcatactacaattaagagagtgaacatatccatcatccctcaaagtgtcacaatgctcctcctgatgactcctccccagaaaaccaccaatcggctttcattttgcattttgtagttttatgtgaatggaatcatatagtatgtcttttttttttgtctggcttctttcactttgcataattattttgagattcatatgtctccatcttgatgctcgtatgaattcattcttttaaatgttgaatattcccttgtatggatataccacaattcatttacccatttacttgttgatgacatttgggttgttttagttttgggatattacaaataaagctgctgtgaacatttgtgtacaaaaaaaaaaaaaaaaaa

SEQ ID NO: 125 - DNA, 854 bp, Homo sapiens
  misc_feature (345)..(345): n equals a,t,g, or c
tcgacccacgcgtccgccacaacagtcgagtccaaatcaaacgcgctccaggcaggtggggctggggttctgccagcctcctggccagcaggggtgggtgggcagactggggccagtatcagctgttctgcctggacccaggccgggctgggaaggcacacttgtgcttatttcccgcctccacttctgtgcaagcttgtgctgtcataagcagagatcacagccccatttcttggatggagaaagtggacactgaggtctgaggcttttgaggacagtcaggagccctcctatgggctccagtgatgcactcaccagcttctggtcctcttcttccacctcttnagagtgccttggctccctcctgtcgtcctggggaacctcggccccagccctgcctccccagccagtcacagctcctccctggtcaccctgagggagctcagggcccggctggtagctgggttgctctgcttctgtccccgactcctgtggagcctggcaggcaactccatgatctgaccccggttaccttgacagccctgcctggcctcccctctcatggcccagccaccccagaacctgaagaggttttctagctgccgtgcatttgccaggctgggttacccaccctactttccctgcctgccctccagtgctgccaggcctagtgtgccagccagcgctcagccttcagtaaagggttcccctgcttccaacctccattgcactgcttcccctaagactgtgacctcctggaaggctggagcacaactgcctctcaataaacgtgttgcaaaaaaggaaaaaaaaaaaaaaaaaaaaaaaaaaaaaaaaaaaaaaaaagggcggcc

SEQ ID NO: 126 - DNA, 626 bp, Homo sapiens
ccacgcgtccgatagacgagttgaagattttgtttttcatatacaattcagccagtcctagctaaaacgcaatcactggaaatttaaccttaaattcatttaaaactgaaaaaggtcttttgaaatcaaactaatgcagaaactgctttacccaaaattctgatccatggccctcattagacgacccatcaggacaaataaagtttagcttgtgaacaagtcccagttttgtcaaaaatataatttggattgaagtgtcttttagaaactgacacatttgtgttattatctcatgaccaaaattctaaaatgaaagctacagtgtcttatttgtgtgcgtatgtggttaatgtgtttatgcatatgtatgtgtatatgttgtatgttgttatctacatggtaaaatctggcatcatcaacaaaaaatctattaagggattctatctagattggcttagataaataagcattcataaaaaatatgtactaattaacccaaatgccttttagttcatgtgacttaagtatatctttaataaacaaatcagttttaaaattgttggtaaaataaaaatacaaatgttctcagaaaaaaaaaaaaaaaaaaaaaaaaaaaaaaaaaaaaa

SEQ ID NO: 127 - DNA, 858 bp, Homo sapiens
ccacgcgtccgaaaaaagggttatgtaaggaaagacaagagtatgtttaagacggtttctaccattttgcttagggcagtccctataatcttagaggcaacagtaagagagtgaaatattgcaggcagtgaattgggctaatttgccatcactccgatttcttcaaaactctcttaaagatgagttaatgttgctggcctaaaatagtctcatatatgggactcccttagaaatgatagtgatagtgttttatttaataaatctgctgtgatggtctaaggcaaacttgacttatggaattccagttagcactgttgatgataataattacagttggttttgcatctgtacagcactttacaattataaatactctttatggaagtagtttccttgggatgatatatatctggccattattctgttcaataggtgtgctatattatggcaaatgttgcaattatcattgtacatattggtatgtttatttgtatatagaatcatactcataccacagagtctaaagaagtagcagcagtgtggtgtagttagcaatcaagaacactggaccttaaataactgggtccaaatatcactttcaccatttattcactgtgagtcatgagaaaattgttttagttttgctgtctgtacaatggcatactactacctgtctcatacacacacacaggcacacacaaagttttactaattggttcatactaggaactctccaagtatcaattatccctgttacagaaacagtatgtatagagagacaatcatggagattccctgtccaaggattttcctgatagcttcctctggtccatatcaaaatgaaaaaaaaaaaaaaaa

SEQ ID NO: 128 - DNA, 640 bp, Homo sapiens
ccacgcgtccggttacaatttgggtcagaaacggagagatctgtgttaatttttgcagaacttactgatttttgttcttttattgctcttgtcattaggatgaaaaccaaaaaagtatcttcagaggaaaaaaatcaccttttaatattgctagttagaaaatgtcatgaacagtgtatcttagaaatataatattctacttatttacacatgtcaaaatttgtgtctcttccagtgttccttgcctgtatctccccttggttcaatagctaccagatttttggaagaggaggaactgaggtctcatcacattctagagcgcttggatgcccatattgaagaactaaaaagagagagtgaaaagacagtgagacaattcacagccttaaagtagcctcttaaaaaaatcacaatcttggaaataaaaataaacaccaaagagttactgtcatctgaagtagcagctctttaaaaacatgaagagataaaattataaaaatgatacatctaaagcagtggtgaagaaagctgaaaaactgatacttttgataggcattttctctgcactggtttgtttaaaggacttcttccagcaataagttgaaagaataaaccactttgctagaaaaaaaaaaaaaaa

SEQ ID NO: 129 - DNA, 1190 bp, Homo sapiens
ggcacgagaacagatggaccattgacaatccatatatttagaaatgatcaaacctaatgttttccttttttaagatgaaagtaaacataaatagagatggtatttttttctgcaattctctttttatacatcttatatctctttgcagattacagttctatatttgacttcccataacatgtcacaggacatgtgctttaaatcccccacaagttgttctcttgtggatatagtctaggtcttctgggttgtcccaaaatatgatgtgcacagacacaaacatattctgtatattggttttggattaacacagaatgcagtgggatttccttcctattatcattatatttcccttaatgcagtccaagatatgtattagtgtctaaagaagtataccacatccttaggtcttttaaaaagtatcatctgcctcttgggactctgggctatctttactaatccatctcaagtattattttggtctctcctttccactaaaactaaatatcctccactctgctgtcctaccaaattaatgtatggccattggcagtaaactcctttatacttagtgctttctcaattttaaaatgtttgaatattacactgatgcagaagttatttcataagcatagctttttcttgtgtggggtggaaagggaagaggattaaatcactgcctcacttgagcacatacatagctggaaaatgtgtggaaagtttcttgatgttgagaaaaaaagacagtgtcttgttaatcaataaattccgtttatttttcttttactatgtcctttactatatcataactgtagccttgctatatcctgaactcctcacaaaggccttctctgagccaactaaattaatgataaagaattgtaattcttggctgggtgctgtagttcacgcctgtaatcccagcactttgggtcactgaggtgggcagatcacctgaggtcaggagttcaagaccagcctggccaacatggcgaaaccccatctctactaaaagtacaaacattagctgggcatggtggcatgcacttgtagtcccagctactcgggaggctaaggcaggagaatgacttgaaccctggaggcggaggttgcagtgagccaagattgcaccactgcactccagcctgggcaacagagcgagactccatctcaaaaaaaaaaaaaaaaaa

SEQ ID NO: 130 - DNA, 1204 bp, Homo sapiens
ggcacgagcccacgccaaacctctgggctggccaggctcactccagccccacagtcattgccaggactgcctttgaccttacacagaggaaacatcttccacctgtcgggagggagccgggggcggggatttccatggcaaaatttactgttctctggtgatagagttctttcagttttgctacatggtcttgtggcaaaggactgggtgcaggtgcagccttggttatttctggaaacacttctccttttcttttattttgccaggtctggctcatcagtcaccttcctctcagaaaggtgattttggctcctctgcccagaccatcaaacatttctggaggtgtcacaagcttccgtgaggttctggtctctgcgaattgcaggaagaatccaaacataggaaaggggtgatgtgtatcagggtgtccatcctcagctttgctccacaaagaccctcacacttgcacattgttttgttaacagtattatctctgagtagtgggtttattgtttttgcttacctgttttaaacacttcttcaacaaacttgctttactttccattttttaaaagtgtatttcaattttttattaataatgccattttactcctgcaaaatttctcactccttcaaagtctgtgtatggcaaagatcttcctaaccatcattcaagttagagcaactccatttctgtatcaaaaagaaatacctttagttattgtctgaacttgtcagaatttctgagaacgatgccagaaattctgtaattgttttgtcacattaattgaacaatgagagggcaccagcattcctcactcatgaggtagaagcaccacatctacatttctttttagctatgggtgatgtttttgcttttaaatcttagaaatctgttaataaacaaataacacaacaaagtttggggtacttccttgtggggactgggatgcttaagctaaaacaaagtttaaatttggactgtgtgtgttatgtttcgcagaatctatatgtttctcaaaagtgggtgtcaccctccttcctcccccaacacacccttcaggggtaagaggagaagtaatgtagaaaaattaactgtttctccactgtaaaagtagggtgtctttagaatgtttcatgttcaaaggaaagattgtgcttctcccaaggcaaggtgttcccttaaaaaaaaaaaaaaaaaaaa

SEQ ID NO: 131 - DNA, 2836 bp, Homo sapiens
  misc_feature (152)..(153): n equals a,t,g, or c
aattcggcacagccgcggcagacggcgaggacggacaggacccgcacagcaagcacctgtacacggccgacatgttcacgcacgggatccagagcgccggcacttcgtcatgttcttcgcgccctggtgtggacactgccagcggtgcagcnnacttgggaatgacctgggagacaaatacaacagcatggaagatgccaaagtctatgtggctaaagtggactgcacggcccactccgacgtgtgctccgcccagggggtgcgaggataccccaccttaaagcttttcaagccaggccaagaagctgtgaagtaccagggtcctcgggacttccagacactggaaaactggatgctgcagacactgaacgaggagccagtgacaccagagccggaagtggaaccgcccagtgcccccgagctcaagcaagggctgtatgagctctcagcaagcaactttgagctgcacgttgcacaaggcgaccactttatcaagttcttcgctccgtggtgtggtcactgcaaagccctggctccaacctgggagcagctggctctgggccttgaacattccgaaactgtcaagattggcaaggttgattgtacacagcactatgaactctgctccggaaaccaggttcgtggctatcccactcttctctggttccgagatgggaaaaaggtggatcagtacaagggaaagcgggatttggagtcactgagggagtacgtggagtcgcagctgcagcgcacagagactggagcgacggagaccgtcacgccctcagaggccccggtgctggcagctgagcccgaggctgacaagggcactgtgttggcactcactgaaaataacttcgatgacaccattgcagaaggaataaccttcatcaagttttatgctccatggtgtggtcattgtaagactctggctcctacttgggaggaactctctaaaaaggaattccctggtctggcgggggtcaagatcgccgaagtagactgcactgctgaacggaatatctgcagcaagtattcggtacgaggctaccccacgttattgcttttccgaggagggaagaaagtcagtgagcacagtggaggcagagaccttgactcgttacaccgctttgtcctgagccaagcgaaagacgaactttaggaacacagttggaggtcacctctcctgcccagctcccgcaccctgcgtttaggagttcagtcccacagaggccactgggttcccagtggtggctgttcagaaagcagaacatactaagcgtgaggtatcttctttgtgtgtgtgttttccaagccaacacactctacagattctttattaagttaagtttctctaagtaaatgtgtaactcatggtcactgtgtaaacattttcagtggcgatatatcccctttgaccttctcttgatgaaatttacatggtttcctttgagactaaaatagcgttgagggaaatgaaattgctggactatttgtggctcctgagttgagtgattttggtgaaagaaagcacatccaaagcatagtttacctgcccacgagttctggaaaggtggccttgtggcagtattgacgttcctctgatcttaaggtcacagttgactcaatactgtgttggtccgtagcatggagcagattgaaatgcaaaaacccacacctctggaagataccttcacggccgctgctggagcttctgttgctgtgaatacttctctcagtgtgagaggttagccgtgatgaaagcagcgttacttctgaccgtgcctgagtaagagaatgctgatgccataactttatgtgtcgatacttgtcaaatcagttactgttcaggggatccttctgtttctcacggggtgaaacatgtctttagttcctcatgttaacacgaagccagagcccacatgaactgttggatgtcttccttagaaagggtaggcatggaaaattccacgaggctcattctcagtatctcattaactcattgaaagattccagttgtatttgtcacctggggtgacaagaccagacaggctttcccaggcctgggtatccagggaggctctgcagccctgctgaagggccctaactagagttctagagtttctgattctgtttctcagtagtccttttagaggcttgctatacttggtctgcttcaaggaggtcgaccttctaatgtatgaagaatgggatgcatttgatctcaagaccaaagacagatgtcagtgggctgctctggccctggtgtgcacggctgtggcagctgttgatgccagtgtcctctaactcatgctgtccttgtgattaaacacctctatctcccttgggaataagcacatacaggcttaagctctaagataggtgtttgtccttttaccatcgagctacttcccataataaccactttgcatccaacactcttcacccacctcccatacgcaaggggatgtggatacttggcccaaagtaactggtggtaggaatcttagaaacaagaccacttatactgtctgtctgaggcagaagataacagcagcatctcgaccagcctctgccttaaaggaaatctttattaatcacgtatggttcacagataattctttttttaaaaaaacccaacctcctagagaagcacaactgtcaagagtcttgtacacacaacttcagctttgcatcacgagtcttgtattccaagaaaatcaaagtggtacaatttgtttgtttacactatgatactttctaaataaactctttttttttaaaaaaagtcgacgcggccgmgaatttagtagtagtagtagtagtagkmggccgc

SEQ ID NO: 132 - DNA, 2276 bp, Homo sapiens
aaaccaggtcaaagcttctttggcattcagttttccccagagaacaatttaatgctgatacttaattttttcaagatagacaagagtcgggccacaaaaagttaaaaagtaccatccagagaagcacagaaacaggcatggcagctgaaatgagaaagatggtaaggcagccgagccgagagtctactgatggcagcatcaacagttacagctctgagggcaatttaatatttcctggagtgcgactgggagctgacagtcaattcagtgattttcttgatggattgggaccagcccagcttgttggccgccaaacccttgccacccctgcaatgggtgatatacaaataggaatggaggacaaaaagggccaattagaagtggaagtcattagagcacgaagcctcacacaaaagcctggttccaaatctacacctgctccatatgtcaaagtatatcttttggaaaatggggcctgtatagccaagaagaagacaagaattgcacgaaaaacccttgatcctttgtatcagcagtctctggtttttgatgaaagtccacagggtaaagttcttcaggtgattgtctggggagactatggcagaatggaccacaaatgctttatgggtgtggctcagatcttgttggaagaactcgacctgtccagcatggtgatcggatggtacaaattgttcccaccgtcctcactggtggatcccacactcactcccctcacccggcgggcttcccagtcatctctggaaagttcaactgggcctccctgtattcgatcatagtgaactcataccagagtcattccaataaaactctacttttcaggataataatctgaaccagatatttcatgatcgaaagcattgttggagacagacaatcaacttgtgttttgcctgtagtagtttttcaataatatgtcccaattgttatttaaaacatggcttcatatgacagaacaaggcaatctatcaaatttacaggaagaatcaacatgctggtgagagtcactgatgcttctaacaaatagaaaaagaggaaactttaaatccacgcatacacgtacacacacacatgcacacacacacacaccaaattgaacaaactggaaactctcactctgtgaaaagttgtattctacacatttctgcacagaccacaagcagtgttatttccctgatgtttgagttgttttgttcttttgtgtgttttgtttatttgtgtgttgtttgttggttttcgtttcttgagtttttgttttgttttcaccacatctgttatttccactagtttttttttggctgtgtcatgacaggcctcatgatgctaacagagattcttcccttcttttttccaaaagcaccaaaaaaaagggctgaagtagtctctgtagcatctccccaaagtgttaaacagctacataaggtgaagccaaggaagggtttcactagctttcattttataattatttaaagtcttatgtgtggatacccaagagacaaaaagttatcttccaaaataaataatcacagaagtacttttttaatgaagagcctatctgtttgcattctagaaaattaatttatggtttccattgttttgcatggaagacttttaaagaagtcaatctgcaactaatgctggggactaaaactaactgcataattgtactttgaaaacactccttgtaatgcctttttcttcctgatattaaaaaaatgctcatgtgtataaaccatactttgacttcccaaaaatggtgactaggaatggatttgagcctaagacactttgagctatgcccaggcttctcagccatgcctcagtgtagacacatccatctgccctggaaagagcatggtatgagctgktcaatattccactggaaattccagttgaaatattctgcactaaactattgtttttattgaattttagtttacatttctttgagattgatgcaagcacaaagcttgattttttaatgcaaagtatcttactttttggggggaaaataaacaaaatgaactttcaatttgcattttcatttagtttctcttggccttgaatttcccttgtgacattctgtacatgtgctacaaactgcagtctctgcaggtgcattgatatgttctccctccttttatgagtcactccacttttgtgattacacaaatagagcagcatgacttggaactgttcagagctgcatgcacattttgtaaaaaaaaaaaaaaaaaaaaaaaaaaaaaaaaaaaatt

SEQ ID NO: 133 - DNA, 1323 bp, Homo sapiens
aggcccagcaccacgggcctttccccaggccagggggaggaccacctaaggattcaagggcagctcctgttttcttggttctgtgaacactcgagtctgagccagcccctcaggaattgcctcaaaagagaaaaacaaaaaaaagtcctccttcccaaggcctgctactccaaggtttggctccatcccttgcctttgggtcctgcctatttccccactcctggtctcttatctttggggccaccagtggggagtcacccgggccccaatccctctaaggcgctaagttgaaggaggccttcccagagtgactattggtgccaaagtcccagttcctgttggacttggggtaaaaacaggagatggtgagtgggtgtaaggcccaaatgcccagagaagttaactcgaacccatgggacctgtcccagcctgtcagtccctgatgagtgtaacttccttcccctgggggcctggccyttctctccaacccagtggccatgctttctcacccagccttgtgcccggcctgcatttctgtatatattgctgtgtattgtgtgtatgtatgtattcctggacaagtgtgttcatctgcagcccttgcctgaggataaggtttaggattgggtaaagatcagaataccagggccagctaaggcaacgactccctccccaaacccttgggacctcagccagtcccaaggctgccctgacaatcaggcaggctccccaccgtgaggccaagcctcctctgccactgccagcatggcccaagggaggcttggccttgggcttgccagcctcagctctgccctgacaagggtcttgtatccagggcagaggcctgaggtgacccaggcttgctttgtggctgatgccagcaggcttggttctagtgggcaccactggtgggcaacctccataactggcccttaggccctaccttcctacacagctaggctataatgggcctgagtgagagggtagcttccccagccccaagcacaggcagaggggtggagagcaatttttggttttatttttgtttctgaagtggtgcctgtacctccagcccccagggggccttccctggccacacttctctgccccacccaggcatcgccatcccagcactttgctccatgtcacccgtaagatgccctttgctgaatgtacctgagtgtatgtatttaaaaggactcacatgggcatcagagaatttatggctctgtatccaataaaaaagatggtgaaactggwmaaaaaaaaaaaaaaaaaaaaaaaaaaaaaaaaaaaaaaaaaaaaaaaaaaaaaaaactcgag

SEQ ID NO: 134 - DNA, 1738 bp, Homo sapiens
ggcacgaggaaggcttaaattaagtatgttgacaataccccaaactactggatgatatttgtaatgaatttcaccctatatcagtacagaagggtgtcacagttcagcaaaacaaaagagaatacgctttgttaaacctctactttctgaattttaggacagtgaggaaatttaacattttcaatttttttttcttttcttgactgaaaagaaagtcaagccagcaatatgtttctgagagagcagtgatgcatttcacaacactgttaactgtctgcttggctttttgaggcttccagagttcagaattgtcttctcttgaataggtcagtgcatttttttccttcagtttttctccttaagcagcaaaacagaccatttaacttccaaatatttacagcttgcaaacagataaacttcccaaatctgttttttttttatgaaaaggaaaacgatcagccacaataatctataatatgatatatttgaatcaaagttattagatgccctagggtcttttcatggcagattttatatatcaccaccattaataaatctgttatcagaattatgtctttctctctgctgatagttatttttagactaacatattcatacctccttctgatgaaaaacattaaaatttgaataaggcatattagaaaaccctaaagctctgtatttacacaaaggagactcataaatattggtttttcagggtgaagcattgtgtgttattccattttgtaccacagggaaagcctagtcacacatggggcctcattaaaagaggatctaaagaaatatttaatggttgaaatataaggtcttattctgaatatctaccttcactttataataatagaaactgaactgaaaagattcagtaagtgatttagaacatccactcattttaaaagtaatgtctaggcctaggaaagtgacatcatgttccaaatgttacaaatccagcgtttttccttgatgtctttataaatacattgtttacagtttttattctcctccatatatgatgccccttttctaagattatttcgtaggtatatcctttaatgagagaacctcataaataaacttcctgaatttgaaaacgagtgagaggagacttcaagtttgtggactgagctaaacatgtgtctactctcccttcaaacatcccatggaaatggcagtaaagacagaacaaagagaatacatttctgaatatactgaggaacatatactccagagagcagaaacaggaagaggggcctctgctaaagctgaaggagtcttcaggaggtaacccagctgggctctgtgttctggttggcagatacagagagtagccaaggtcaaaagcagacaaacagaaagtgaggtgattggccacaggtttggaaatggctcaggtttgctctttccaaccccttgcatgtcactgcacatttacctccagaagtaaagcaggagaactctgcaaagggaaccaacaatctgcatgggagggcattgcctccaagtgtgtgggctggcgaccaagtgcagccctctgccctagttatgggagttggagagggacttactggtttgcatgttccatgcaagagctaaagcaaagcacatctcggagaagtgagccaggaaagtggatcaatccatgccaacaacctatattaattaacctgataattaatatgtatataaagtgaaaaaaaagaaaaaaaaaaaaaaaaaa

SEQ ID NO: 135 - DNA, 799 bp, Homo sapiens
tgctggtggtgttctgcttgctcgcaggcctggtgctggccgtagtatcacagtgctgagcggcgcggcctacctgcaagtgggcaggcttttgtgcaagagtgctggttatgcaaggcttggggcgctttggcgctgatcacgccccgcgttattacttctacttctctgcaggcttgctcacctatggcgtcacagcctttatcgcattaaacgtgatcatcaagaagggcaaacacttcttggatcgctcgccggcgccggccactcagatgctgctgtacctgacggttggttattggtagtgatcgtactgttcacgattccaagttccaagaaagcgcgttacattctttcgattacgccggcgatttcattattggccgcgtatatcttcgtggatcgcagtcagcgctttgcaagtacccgcgacaagttgctgaagttctgcctcaacttacctatggtcggcctgggcatgttgttacttgcctttatctatggcctgtatgcagcgacgccgctgcggcctaactatcttggcgcgtgtgccgggttgatcagccttattgccattcgctcttgggtgacgtcgcggtttcatgcacatccacaccgggagttcgtactgttgtgttttggtgctgccgccttcctggtcctggatatgtttttcttcaattcgattacttaccacctggaattggccgatgagccgacacccaagtttctgccttattggttctggtaggcgcgttctatcgcagttttaactttcgtttggcgacccacaaggcac

SEQ ID NO: 136 - DNA, 1777 bp, Homo sapiens
ggcacgagactccatggattttgatgacacgtggcaccctgccacccacccttctggggctgtccttcctgtcctcacagctttagcagaagccctgccaaggagtccaaagttttctggccttgacctgctgctggctttcaatgttggtattgaagtgcaaggccgattactgcatttcgccaaggaggccaatgacatgccaaagagattccatcccccttccgtggtaggaacgttgggtagtgctgctgctgcatccaagtttttaggacttagctcgacaaagtgccgagaagctctggccattgctgtttcccatgctggggcacccatggccaatgctgccacccagaccaagcccctccacattggcaatgctgccaagcatgggatagaagctgcatttttggcaatgttgggtctccaaggaaacaagcaggtcttggacttggaggcaggatttggggccttttatgccaactattccccaaaagtccttccaagcatagcttcctacagttggctgctggaccagcaggacgtggcctttaagcgttttcctgcacatttatctacccactgggtggcagacgcagctgcatctgtgagaaagcaccttgtaccagagagagccctgcttccaactgactacattaagagaattgtgctcaggataccaaatgtccagtatgtaaacaggccctttccagtttcggagcatgaagcccgtcattcattccagtatgtggcctgtgccatgctgcttgatggtggcatcactgtcccctcattccatgaatgccagatcaacaggccacaggtgagagagctgctcagtaaggtggagctggagtaccctccggacaacttgccaagcttcaacatactgtactgtgaaataagtgtcaccctcaaggatggagccaccttcacagatcgctctgataccttctatgggcactggagaaaaccactgagccaggaggacctagaggaaaagttcagagccaatgcctccaagatgctgtcctgggacacagtggaaagccttataaagatagtcaaaaatctagaagactagaagactgttctgtgttaactacacttctcaaaggacctctccaccagaggtagcttcaaactctccagcatgtaataattctatcacaaatctctcctgaggcttaccaacatctaaatgactttgcatttggggagattcaatgatttggtttgtaaagcaagggtctgctgcttggttttcccaggaaaaatgaacaaagatggagagagtccagaaacagaactacatatatctggaaggagccttctcctgaaaattttgcaggacagttccacttacctaaatcagatgaaacacacacacaaaaatgagtttgtaagcattcacaagggtgaaattcaactcacctgtgatttacttataaaattaatctcttcataggaattatgtgtggacttcatgagcctcaaggttttagagggatgtgaacctgcatgtatattttctgacagtggagagggctctggtgcattgtgtcaccaacagatctcctagaccatggcttattaccaagccctccacagtgcaaggggtgctactggggaatgggtgggtttaaatcctgcctctgccattcactagatgtagccttgagcatgttaccattagccctctgcctcagtttccctatttgtcaagccgaagtaaaaagcagtctggaaaaatcgcaaaaaaaaaaaaaaaaaaaaa

SEQ ID NO: 137 - DNA, 2205 bp, Homo sapiens
gtcgacggtatcgataagcttgatatcgaattccttttttttacaaggttttgtttacaaagccaagaaaagataaaacattttaagttggtactgccctcgaaaattatggtggatgtacacttggactttctaaaacaagatctgaataaaataagacacttaacatgaaaaactctatttaacacaatttaatctttctttgattcctgagtgggtaattcggcattttacagaactttggggtcaccattataaatatcagctgtcactgtactggtaaaatataaaatgtaccagttaataatagctttgcaattcacagaaaatcagataatggaggttttaccgtaactggaattatgatgttaaaagaatcaatgcacttttccaaaagagcctaaatcatttctaggaaataattcatgccttgtaagaatttacaaggaagtgcttgatactccctggaaaaaatcagtagttcttcattattaagttttcattttgcatgtgtacttcattgtattattattgtggttaatcctatgtccacggccctggcctcgaaccacacaggctcttcttaaataaagtggaagatttctttggcctgtcctaaatccaaggaacaatatgcaactctgcaagtgcatatcacaagaagtcttttcaaggtcgtgctcttggtgaccctttgtttaaaggaatttgggctggatttatagttgtcagttctgaagaatcaggaaagggcaggccgtgaaggggtgggggaggaaaagagaaggaaagagggagggagggagggaggcagaggctcataccacacagtactgagccaccaaggacagagtttctacactgtttcattagaacatgaaatctactctgttgtctatgcgtctgctgtgagctgaaaagaagtcagtttacttcctcagcatctggggtcccataattctgagtcgtggccacattacctctgctactgaaaaggcaagagctgggttgctcagacagccccgcagttcacactgcctgtgctgcaggcaggaaggtttccacccaaaggccggcagagggagggtgtgcccctggcgggtgggctggggctggggtgaggaggggcagggaagaaagggaaggagacttcctttttaatgctggttctcttctcagtccaatccaagtctctccatggaaggatggaaaattctgatttcctgtatctctttgaaaacaatgaaatccactctccccggagggcaggtttgctgaagctgttggctccggctggcatgcacagccttggctaagtagccacacagcacagcatagacatcccggcgaactgaaggctcacaaccaggagcctaccccatgcactccctccccagcaccgggtcaccgcagccagggttcctggggcctccggaatgtcagggagcccctcactgcctcttgggtggcaggaaatcactaagctatgaggataaagaccagccggggtctccatgcagctttagggctgatttctatttccccttgtggtggtgaagcagatttcaaactgcactcaatacagtccccagcacaggagaaatgaaaccctttaaatcttaggccttcacgcaggagcctcccctgcagctttcaaactcacagaagccttttgttacagtcctaggaatgtgtacttagcagagaaagcgtgcctttgtggtggctgtgaaagaatactgagggcggtggcgggggaagaagagacccgcctctggtaagatcctctcccgaagtctgatggcagccagtctcagaaaacaagaaaatccacccaaggacaaggtactcaaccacccccagggctctcccaaaagtgtcggagtgagaggaaggaaagcactaaatatatttgagtatgtgagtgagcgcagggggaggagtgagctaaaggggttttactgcattggttgctataatttgtggggggttcctaagaattattcccatatccttccccaagggaacctgtgaggaaactggcagctgcttattgtgatctagtgtaacagcacatagtacagccaaaatactgcaaggaattagaggcggaaggggcctcaggactgatcttcaccagttttctggtaagatttgtgcaaaactccagtgaagagtgtgcacgcggtcaatttctccaaaatg

SEQ ID NO: 138 - DNA, 2709 bp, Homo sapiens
ccacgcgtccgcgcgtcctgtcccggcgccttccgcgcaccggccaccgccagtctccgagccccgtgacctgcaggtcctccggccgcgactccgggccggccctgcgtggtggctgtcggggggcgcgcggggaagcagcggaacttgcggtgtgaggggccggcggggcccggagcggtccccggcccgggaaacttggaccgagaccaggccggcgaccaccaggggcctgaggatgaagccaagtctgctgtgccggcccctgtcctgcttccttatgctgctgccctggcctctcgccaccctgacatcaacaaccctttggcagtgcccacctggggaggagcccgacctggacccagggcagggcacattatgcaggccctgccccccaggcaccttctcagctgcatggggctccagcccatgccagccccatgcccgttgcagcctttggaggaggctggaggcccaggtgggcatggcaactcgagatacactctgtggagactgctggcctgggtggtttgggccttggggggttccccgcgttccatgtcaaccatgttcctgggcacctctgggtactcatggctgtgatgagtgggggcggcgggcccgacgtggcgtggagtggcagcaggggccagcagcggtggtgagacacggcagcctgggaacggcacccgggcaggtggccaagaacagccgcccagtacgcggtcatcgccatcgtccctgtcttctgcctcatggggctgttgggcatcctggtgtgcaacctcctcaagcggaagggctaccactgcacggcgcacaaagagtcgggcccggccctggagtggaggcagtggaatcaaccctgcctaccggactgaggatgccaatgaggacaccattggggtcctggtgcgcttgatcacagaaaaaagagaatgctgcggccctggagagctgctgaaagaatacacagcaaacagctggtgcagacgagccacaggcctgtgtccaagctgccgccagcgcccccgaacgtgccacacatctgcccgcaccgccaccatctccacaccgtgcagggcctggcctcgctctctggcccctgctgctcccgctgtagccagaagaagtggcccgaggtgctgctgtcccctgaggctgtagccgccactactcctgttcccagccttctgcctaacccgaccagggttcccaaggccggggccaaggcaggcgtcagggcgagatcaccatcttgtctgtgggcaggttccgcgtggctcgaattcctgagcagcggacaagttcaatggtgtctgaggtgaagaccatcacggaggctgggccctcgtggggtgatctccctgactccccacagcctggcctcccccctgagcagcaggccctgctaggaagtggcggaagccgtacaaagtggctgaagcccccagcagagaacaaggccgaggagaaccgctatgtggtccggctaagtgagagcaacctggtcatctgaggggcggtctagtctaaggacactgcggccctgccctgggaggttccgaaggcttcctggaggaggtggagctgcagctgggactgtgaggaccgagaagcaatggcccagcagacgagacagcaaagaccaaggcctggaggtgggagcgtctgccccagtgaggaggcaggtggccggcgggcactgtgtacaggagcaggctgagccccgcccctggccctgctgccatgttgctcccctgaaggatgccccgacccccgtgcctgccctggctggatcctaggagcccacgggattctctgtatcatcagaggctgggcttggcagaggggaggggcctgtgcccgtcacccctggccccattccttggtaattagccacacccttgcctctgtacagggccctagagcagatgtgcgtccccctcctcttccagcaggtctataaagggaaggggtagcagaaagtcctgggctaggagagtgagtccctgggttctaatcttgggcacatctgtggccatcgctgggtccatttttctgactgtgaagtaaggagagacgtctcagtacccagggcctcttcagctctttgtaggttctgggctgggttgtgggggactggggagctgggctctaccatccctccattagtagctttatccagccccgtttttgctgctttcaggcctctgccttcaaggcccccatggggctgtccatccatggctctgcctacggaaggggcttaatgcatgtgcctgccctcccccagctgtttttaatgaaactgaaaaaatagacttgatcccggcaggactgtgatacagagccctagcctgcccagccagccccaagatctcaggagctttagggagaagacttggtggggctggagcacaccttgggcctcagtggtttctgtgtccctgtggtgccagtgcttctgggcagtgcaggcggctgccaggcccagccctgacttccactctggctcagcaacctggttatttatgtggggccgtgcaggcatgggcccactgcctgtccatcctgtttctcttatttattgaaactcaccattgccctatccttgtgtctccacccccttccatgtgttgaataataaaaggtgggaaagtgcaaaaaaaaaaaaaaaaaaaaaaaaaaaaaaaaaaaaaaaaaaaa

SEQ ID NO: 139 - DNA, 2556 bp, Homo sapiens
  misc_feature (1663)..(1663): n equals a,t,g, or c
  misc_feature (2553)..(2553): n equals a,t,g, or c
tcgacccacgcgtccgccgggctgcagccggcgcgtttctccgggctacagccggcgccgccgcccgctagtccgccgcccggcgccatggcgggctgcgcggcgcgrgctccgccgggctctgaggcgcgtctcagcctcgccaccttcctgctgggcgcctcggtgctcgcgctgccgctgctcacgcgcgccggcctgcagggccgcaccgggctggcgctctacgtggccgggctcaacgcgctgctgctgctgctctatcggccgcctcgctaccagatagccatccgagcttgtttcctggggtttgtgttcggctgcggcacgctgctaagttttagccagtcttcttggagtcactttggctggtacatgtgctccctgtcattgttccactattctgaatacttggtgacagcagtcaataatcccaaaagtctgtccttggattcctttctcctgaatcacagcctggagtatacagtagctgctctttcttcttggttagagttcacacttgaaaatatcttttggccagaactgaagcagattacctggctcagtgtcacagggctgctgatggtggtcttcggagaatgtctgaggaaggcggccatgtttacagctggctccaatttcaaccacgtggtacagaatgaaaaatcagatacacatactctggtgaccagtggagtgtacgcttggtttcggcatccttcttacgtcgggtggttttactggagtattggaactcaggtgatgctgtgtaaccccatctgcggcgtcaytatgccctgacagtgtggcgattcttccgcgatcgaacagaagaagaagaaatctcactaattcacttttttggagaggagtacctggagtataagaagagggtgcccacgggcctgcctttcataaagggggtcaaggtggacctgtgacgggcagtggccccggtgaccttggggcctccgaccctgtgcagcctgggacaaaactgtttccggttggccgctgccacatggattttcttaatcgttttatgtcattagtcactcttctggaatgtcactcaagaccaagcggtcagaaggcctgrggacccaaggccccactggagcagtctgtccttatgccgaatcaaggcggaacatgggtgaaagacgagtaaggggcaaatcacagcaatattccacagcgccctccagagttacctggggaggaccgaggccacacgccactgcccccgaggccagagtgtaagtaaaggataaccaggactcgctgggagagatggactctktcctcagcaacactccacagcagaaaggggtagcaggtaccccttcttatcagcggtaaaaatgcatttacaacctttcatttaaccgaaaaacacagaccgctttaacctctttatttctgtcccccactgcatgaacatctatacaattttaaaaatacttcctcataggatgctttggcccttcatctatttaatcatagctacatacctattttttataagtagcagtacacattcaaaggggtattcctagctcaatgcttggtgttctagttcaacttttatcctgcagcaagtaagcctagataactctacacgatttggctgagtggctttgtgtgaccgtggccccaggcnaaggggatcatggccctggctggctttcccgggggtctcagctcctgttgtcagtgataggcggctcaaaggagcatcagtttcttttgatccaagaagtgcttactgaatgcctgccctgtgcgtggccttaaacattgagaagtgctgctctccgtttatttgggatttgattctcattttaccatagcttatattctcaatttcaatgccagtctcagaactcttgttttctgtgttctgttctcaaaattacattgtccctcatgtcatttcaaactgttttccaaagggatttgagcatatacaactacaaatccaagcagattgactctcaaaaataatcttaaatactgcaaatagtcccaactaagattcagtcagtatgtttgttttgcaagtttgggagagtaagttggctttgagtcacacatcgaagctttaagaggtgagacgctggcttcattctggactagacaggaacttggcctcagcgtgagatcctgccatgcagtgttgcggtggcactgaagaagtgtgaatgtgaaggcggcgtcggcgcggggccagagcaccactctgctgccccaccacgcggcctgtgaggagccactaaacctttccgtgcctagacctccccatctgtggaatggggtcaataccacctacctcacaggggtgttgtgaggactgagaagaacaatgtcaaatgtttttaatactcagatgtgggagcgacatcaatgaaatctgtactgtatgaaagctacacaaaaatgggcagacatttggttaattgtgccagatacctaaaatgtatgttcagaaaagcattttatcaactcagaaatatgacttatttctagaaaaaaaaaaaaaaaaaaaatttnctc

SEQ ID NO: 140 - DNA, 2596 bp, Homo sapiens
aaaccctggagctccaccgcggtggcggccgctctagaactagtggattccccgggctgcaggaattcggcacgaggaccgcgcggctgctccgctctccccgctccaagcgccgatctgggcacccgccaccagcatggacgctcgccgcgtgccgcagaaagatctcagagtaaagaagaacttaaagaaattcagatatgtgaagttgatttccatggaaacctcgtcatcctctgatgacagttgtgacagctttgcttctgataattttgcaaacacgaggctgcagtcagttcgggaaggctgtaggacccgcagccagtgcaggcactctggacctctcagggtggcgatgaagtttccagcgcggagtaccaggggagcaaccaacaaaaaagcagagtcccgccagccctcagagaattctgtgactgattccaactccgattcagaagatgaaagtggaatgaattttttggagaaaagggctttaaatataaagcaaaacaaagcaatgcttgcaaaactcatgtctgaattagaaagcttccctggctcgttccgtggaagacatcccctcccaggctccgactcacaatcaaggagaccgcgaaggcgtacattcccgggtgttgcttccaggagaaaccctgaacggagagctcgtcctcttaccaggtcaaggtcccggatcctcgggtcccttgacgctctacccatggaggaggaggaggaagaggataagtacatgttggtgagaaagaggaagaccgtggatggctacatgaatgaagatgacctgcccagaagccgtcgctccagatcatccgtgacccttccgcatataattcgcccagtggaagaaattacagaggaggagttggagaacgtctgcagcaattctcgagagaagatatataaccgttcactgggctctacttgtcatcaatgccgtcagaagactattgataccaaaacaaactgcagaaacccagactgctggggcgttcgaggccagttctgtggcccctgccttcgaaaccgttatggtgaagaggtcagggatgctctgctggatccgaactggcattgcccgccttgtcgaggaatctgcaactgcagtttctgccggcagcgagatggacggtgtgcgactggggtccttgtgtatttagccaaatatcatggctttgggaatgtgcatgcctacttgaaaagcctgaacaggaatttgaaatgcaagcataatatctggaaaatttgctgcctgccttctacttctcaaatctttcttgtaaaagtttccaattttttcactgaaacctgagttaaaaatcttgatgatcagcctgtttcataagaaactccaatcaagttaatcttagcagacatgtgtttctggagcatcacagaaggtatattgctagttacactttgccctcctgcagtttcttctctgctcccaacccccatctcatagcatccccctctatttccaatgctcctctccaaccgcttagtttctgaatttcttttaaattacagttttatgaaagcatattttatttacttggtgttgaaatagccctcataaaacctaagcacttggaaacacaataatagtattaactaactagatctattgaatttcagagaagagccttctaacttgtttacacaaaaacgagtatgatttagcactcatactagttgaaatttttaatagaatcaaggcacaaaagtcttaaaaccatgtggaaaaattaggtaattattgcagattgatgtctctcaatcccatgtattgcgcttatgttacaagttgttgtcacagttgagacttaattcctcctaatttcttctgcccgaagggtaagtggtgcgtccagcttacacgatcataattcaaaggttggtgggcaatgtaatacttaattaaaataatgatggaagagctatctggagattatgagtaagctgatttgaattttcagtataaaactttagtataattgtagtttgcaaagtttatttcagttcacatgtaaggtattgcaaataaattcttggacaattttgtatggaaacttgatattaaaaactagtctgtggttctttgcagtttcttgtaaatttataaaccaggcacaaggttcaagtttagattttaagcacttttataacaatgataagtgcctttttggagatgtaacttttagcagtttgttaacctgacatctctgccagtctagtttctgggcaggtttcctgtgtcagtattccccctcctctttgcattaatcaaggtatttggtagaggtggaatctaagtgtttgtatgtccaatttacttgcatatgtaaaccattgctgtgccattcaatgtttgatgcataattggaccttgaatcgataagtgtaaatacagcttttgatctgtaatgcttttatacaaaagtttattttaataataaaatgtttgttctaacttgtctgcttttttaaaaataatcttactgtacttaattctaattttttcctcatatttaaataaaaggccatttccaccttttctaaaaaaaaaaaaaaaaaa

SEQ ID NO: 141 - DNA, 893 bp, Homo sapiens
  misc_feature (10)..(10): n equals a,t,g, or c
  misc_feature (18)..(18): n equals a,t,g, or c
  misc_feature (28)..(28): n equals a,t,g, or c
ggcacgaggnaaaagaancccgcttcanggttgccagagtgtgataggtaccccagagttcatggcccctgagatgtatgaggagaaatatgatgaatccgttgacgtttatgcttttgggatgtgcatgcttgagatggctacatctgaatatccttactcggagtgccaaaatgctgcgcagatctaccgtcgcgtgaccagtggggtgaagccagccagttttgacaaagtagcaattcctgaagtgaaggaaattattgaaggatgcatacgacaaaacaaagatgaaagatattccatcaaagaccttttgaaccatgccttcttccaagaggaaacaggagtacgggtagaattagcagaagaagatgatggagaaaaaatagccataaaattatggctacgtattgaagatattaagaaattaaagggaaaatacaaagataatgaagctattgagttttcttttgatttagagagagatgtcccagaagatgttgcacaagaaatggtagagtctgggtatgtctgtgaaggtgatcacaagaccatggctaaagctatcaaagacagagtatcattaattaagaggaaacgagagcagcggcagttggtacgggaggagcaagaaaaaaaaaagcaggaagagagcagtctcaaacagcaggtagaacaatccagtgcttcccagacaggaatcaagcagctcccttctgctagcaccggcatacctactgcttctaccacttcagcttcagtttctacacaagtagaacctgaagaacctgaggcagatcaacatcaacaactacagtaccagcaacccagtatatctgtgttatctgatgggacggttgacagtggtcagggatcctctgtcttcacagaat

SEQ ID NO: 142 - DNA, 489 bp, Homo sapiens
  misc_feature (477)..(477): n equals a,t,g, or c
cggcacgagcttcctcaaaagtatataaaatttgaaaagacctagaagtgatctagtggaatgaagacgctgagataccattgaggttggggaaactactgggacgtgcttacaggataaactgcaaaacaaaagcacaagtttgtaatcatggaatgacatgccttattctgaaaacttaacgtttgtagcgtaccttataattcataagacatttaaaaatggtattgaatcccaataacctatgcgtagggttggatcttgttgttatccctgttttttaatggaaaatctgaggcctgaagatggtaggccatgtatatgcctgccccgccgttgagcctggctcctgctgttggagaaactttcccagtctgtagagagaggatgtggtcctggcaagcctggctcctgcctgattctgtatcttctggtaacacacagccgtcatttaaaaaaaaaaagacaaggtctttnccctcggacaga

SEQ ID NO: 143 - DNA, 2847 bp, Homo sapiens
  misc_feature (2734)..(2734): n equals a,t,g, or c
ggcacgagatgagctgcaaggtgcctttgacgagcacataggaccgctctgcactgactggcagaaggccgagcggggagacattctcctgagcagcctcatcagaaagaagctgcttcccgaggcctctctgctcatcaccacgagacctgtggccctggagaaactgcagcacttgctggaccatcctcggcatgtggagatcctgggtttctccgaggccaaaaggaaagagtacttcttcaagtacttctctgatgaggcccaagccagggcagccttcagtctgattcaggagaacgaggtcctcttcaccatgtgcttcatccccctggtctgctggatcgtgtgcactggactgaaacagcagatggagagtggcaagagccttgcccagacatccaagaccaccaccgcggtgtacgtcttcttcctttccagtttgctgcagccccggggagggagccaggagcacggcctctgcgcccacctctgggggctctgctctttggctgcagatggaatctggaaccagaaaatcctgtttgaggagtccgacctcaggaatcatggactgcagaaggcggatgtgtctgctttcctgaggatgaacctgttccaaaaggaagtggactgcgagaagttctacagcttcatccacatgactttccaggagttctttgccgccatgtactacctgctggaagaggaaaaggaaggaaggacgaacgttccagggagtcgtttgaagcttcccagccgagacgtgacagtccttctggaaaactatggcaaattcgaaaaggggtatttgatttttgttgtacgtttcctctttggcctggtaaaccaggagaggacctcctacttggagaagaaattaagttgcaagatctctcagcaaatcaggctggagctgctgaaatggattgaagtgaaagccaaagctaaaaagctgcagatccagcccagccagctggaattgttctactgtttgtacgagatgcaggaggaggacttcgtgcaaagggccatggactatttccccaagattgagatcaatctctccaccagaatggaccacatggtttcttccttttgcattgagaactgtcatcgggtggagtcactgtccctggggtttctccataacatgcccaaggaggaagaggaggaggaaaaggaaggccgacaccttgatatggtgcagtgtgtcctcccaagctcctctcatgctgcctgttctcatggattggtgaacagccacctcacttccagtttttgccggggcctcttttcagttctgagcaccagccagagtctaactgaattggacctcagtgacaattctctgggggacccagggatgagagtgttgtgtgaaacgctccagcatcctggctgtaacattcggagattgtggttggggcgctgtggcctctcgcatgagtgctgcttcgacatctccttggtcctcagcagcaaccagaagctggtggagctggacctgagtgacaacgccctcggtgacttcggaatcagacttctgtgtgtgggactgaagcacctgttgtgcaatctgaagaagctctggttggtcagctgctgcctcacatcagcatgttgtcaggatcttgcatcagtattgagcaccagccattccctgaccagactctatgtgggggagaatgccttgggagactcaggagtcgcaattttatgtgaaaaagccaagaatccacagtgtaacctgcagaaactggggttggtgaattctggccttacgtcagtctgttgttcagctttgtcctcggtactcagcactaatcagaatctcacgcacctttacctgcgaggcaacactctcggagacaaggggatcaaactactctgtgagggactcttgcaccccgactgcaagcttcaggtgttggaattagacaactgcaacctcacgtcacactgctgctgggatctttccacacttctgacctccagccagagcctgcgaaagctgagcctgggcaacaatgacctgggcgacctgggggtcatgatgttctgtgaagtgctgaaacagcagagctgcctcctgcagaacctggggttgtctgaaatgtatttcaattatgagacaaaaagtgcgttagaaacacttcaagaagaaaagcctgagctgaccgtcgtctttgagccttcttggtaggagtggaaacggggctgccagacgccagtgttctccggtccctccagctgggggccctcaggtggagagagctgcgatccatccaggccaagaccacagctctgtgatccttccggtggagtgtcggagaagagagcttgccgacgatgccttcctgtgcagagcttgggcatctcctttacgccagggtgaggaagacaccaggacaatgacagcatcgggtgttgttctcatcacagcgcctcagttagaggatgttcctcttggtgacctcatgtaattagctcattcaataaagcactttctttatttttctcttctctgtctaactttctttttcctatcttttttcttctttgttctgtttacttttgctcatatcatcattcccgctatctttctattaactgaccataacacagaactagttgactatatattatgttgaaattttatggcagctatttatttatttaaattttttgtaacagttttgttttctaataagaaaaatccatgctttttgtngctggttgaaaattcaggaatatgtaaaactttttggtatttaattaaattgattccttttcttaattttaaaaaaaaaaaaaaaaaaaaaaaaaaaaaaaaaaaaaaaaaaa

SEQ ID NO: 144 - DNA, 1436 bp, Homo sapiens
  misc_feature (640)..(640): n equals a,t,g, or c
gagcagaggtaattaataggcagttacaatgtggaagattctggaaagtagagttctgttgtctgaaatttagtctgacagaggaatattagcaagataaatgtatttggaccaagcactcccgagaggaagggcatgctcaaattgtttctgtaaaaagtctctggcggtgtttggctcccttctgcgtccttcatgaaacagttctccttgagtattacggttggcaagcatgtgggtgggggagatgtcacacgcacccgctccagctgtacaagcaagccactgcgaggattagacgcttgttagttatgaacttaggtgtctggtctgtttctttgcctttcaaaggcacttcctggcagagaggtacaatggtgctttgcaggaaaccctgtgcccacagcatctgttctgcagcttggcagaccgcagctggccctgagcatggcctactaattctctgggtcaggtgtggctgtggtgagatggatctcagccaggtaagaccctctaatctctgtwttctttctcctgccatagatacactgatgattggagggtatgacaggaattcttgcctgcctttgggtcgtgagggaaacagaaacagcgtaatggctttttggagtgccaggancaaaatccccagagttcattcttagaaaactatgaagctgttctttgaactccaactttttctcctatattcattcagggctctttcctctacaaccccctcattcttgctgttgatagatgcctctttcctactctctaaatgtccaattttatcttcctttggaatgccatcaaattcttcctccctttttctgtaccccacctccaaaaataatcccaacacccacctcgtcagaktgtccatttatttcctcagggctaatcccagaaggagcatacaagttggtgaactcatactaatatgtgaatgattgttgcccttggatggttagaaaatcaaggtagttgtccactgtagaagattgtttaaagccaagtggttaagaatattctatatccttccttttgcatatattatctcgttcatccttgtgaagcagataatctcaccatctcaatgtacagaaaaggaaactgaggctcagaacattttgagtagcctacttaaatagtctaggcagagattgaacccccacgtctctggccccaagaggtcttgataattccctcacaactgctgcctaacagcagataaaatatatttggattcttctcacctttaagaaaacctagtaagttaatctctaaaaatcagcaatctgctcaggggatacagggagaactaggactattgtcccaaatgtgtagtcatatttatctgcttaccaaatgaccatgtgttgaatccctgaaaaccatgggagaaataccaaaaaaaaaaaaaaaaaactcga

SEQ ID NO: 145 - DNA, 915 bp, Homo sapiens
ggcacgagtgtacacattttatttccttttcatgtcttgttgcactagctagaactttcagtattgaaagtagtaaaagaagccatgcttgccttggtcctttgtcttagtgggaaagcttccagtttctcaccaacatgatgttagctgtagtttctttgtagatgttctttaagcagttgaggaagttcctctttattttcagtctttggagagtttttatttttatcccatacttcatttcaaaatgctgagaggtttctttgttgttttgttttgtttgatcatgaatgggtgttggattttgtcacatgctcgttcagcatctattggtatgatcatgtgatatttctttagtctgttgatgcgatggattgcattaattgatttttcaaatattgagtctgccttggttgtggtatataattctttttattaaattgttgcattccgtttgctaatattttgaggatttttacatctttatttatgacagatactttaatatccataggatttgcagtgatgcctgctctttcatttcttactttttttttttgagatggaatctggagcccaggctggagtgctgtggcgaaatctcggctcactgcaacctccgccttccggttcaagtgattctcttgcctcagcttcccaagtagctggaactacaggtgtgtgccactacgcccagctattttttattcttttttgagacagagtctcgctctgtctcccaggctggagtgctgtggggcaatctcggctcactgcaacctccacctcccaggttccagcgattctcctgcctcagcctcccgagtagctgggactacaagcgcccaccaccacgcccggctaatttttgtattttcagtagagacggggtttcaccatattggcctggatggt

SEQ ID NO: 146 - DNA, 1425 bp, Homo sapiens
gaattcggcacgagctgtaccaaggcttcagagtgagcagggggacatctggataggttagccagggccacagagagaagagctgcttacacctgaattgtttcacccttttcaagaacagggttgtccttctccccatctggatccttgggctagatctctgccgaggggctccgtcaagtcccgcaaggctagagaagggagccccacatcatttccactttcaaagagggaagatgctcgtcattcaaattacttctgttgatttccatggtatccccctgtccgtcccacaatctcttaccaggcgtcaatgcacatgcaggggatggaaagaggatgagccgatgagcagactttgcattaatcaaggagaaagaaaaagcagatggaaggaggtaggtagatggagaaagcaacagctccttttagcccttgatgacggccctgaaggcctgtctcttttagtgactcctctttgggtcctcttcccctacctctcagtgactaggttcctcatattaattccctgctgtgagtttggctccttgtgctgggcaattcagtcatcctcagaaagagcaaagttggtcttggaattaaggtgcaggtggggaaaaagagggactcagctagacacgaagaaaggctctcttcccagtctaagcccttytaccgtaaggggcattttatcaagacagccacccaactccccatcccatctcccctcctttgtagaaacagcatttgactcaccaagcctttctctccctttccgtgtgtcttgcttagtttctggattgagagaatttctatccttgctccctcgaactctaaaagagcttcttttgaaaactggggagtatcaggcctacctctacatgtgcaacagtgccaggattcaaaggaaaagctcattccagcctctgcctcttgggagatggttcagagtgccacatagggactgaaagagggtgtctgaatccttcaggaatgctttaagtgacattgttgaaaagagataaagaaaaggaaaacaatggaattgggtttctaaggtccctggaaatatcctgggggtctaattgagaaagaaaataagaggaaatttgaagactcacttcttccttcatctgaatccactcagatggcaactgatctctgtcccaaggaccctctaccccacccaattcataatcatctcagattagaaaaggcagaattccttcccattctcaaatcagcatttgggttaggggcccctaagttacgtgagcatgttagaaatgtgaccccaggcctcaagagagaggctctgccacatgagaggagataggaatcatgactgaaaggggattagcacagaacagagaaaactgatttgatagacaaatcaaatagaaaaaaaaaaaaaaaaactcgtag

SEQ ID NO: 147 - DNA, 495 bp, Homo sapiens
ggcacgagcttgccttgtggcactggcagcagcagccaaccacagtggcagatgcagatgagaaatgtcaatggggctacagggatgtggagatgcaggggctattgggcccctgggcagaatgcaatctggtggctggctctcaaaatggtactgtgctgtagctgcttagggctcggggagttcatgagacccagcatgagctccctgtctggagcagtgccattatgaggtctctaggaagctcctcatgttagtctcagggcctgtgagggttgaggagcattcccattgataggattgcaggagtcttcaatggaaatatggaccactgggggtctctcatctttctccacattgagaaacctctctgcgctcccagctaatcctggctgaccacgatgcctggcttcctgtccttccttggccttggatgtttcctgtcacttctctgtttaatgcaaaaaaaaaaaaaaaaaaaaaaaaaaaaaaaaa

SEQ ID NO: 148 - DNA, 585 bp, Homo sapiens
ggcacgaggagagaggtaactcttacatgagcggacaggggaaggcagagagggcagaaaaggcctctgagctcacgattttgcttggcggtaggaaagttaaacttatctagcgaattctctcgtttttcaaactcagatttaagctttggtgagttagattctttgaaactgcccctgcaaatggctcccgctccctgctccgcctccccacgtcctgcggggggacgggacggtggcggtgctcctgagctgtccttcttgttatctgttcttgtctgacctgtggcatggtgccgcccagtgcccgctttcccaggcagcttcctggctttgggagcccatatggagtcaggcttctcacccagtccacctgcccaccttgttggcagctgtcccactgagcccatcctttcccagcccctccagcctctgagacttgagccctagttaagctctcagataatttctgccatcctttctgtatccgtgggtcacacacaaattccactacagctgtaaggaaaagtcagggctgatccaagaccttcgttcctcactcttcaaagaagcctccatggttat

SEQ ID NO: 149 - DNA, 1543 bp, Homo sapiens
ggcacgagtgtaactgtataatattgacaatcgaacaaacagcttcaatcatgtctattcatatctccaggcaaagttttgttcttcttcctttattttacaaatgtattgcttcaaaggacacatacttttgtggataaacaatttccactagaagaagaacaggaaaggtagctatttaatatatgcagttagagccatgaggtatggatcatagtaaataatattttgcaatgatactagcactaataaagatgatgacatttgcatgattagctatgtttttagtaaaggaaaattaatggataggaatatttagcttgaaggatacatacaacatgctgacaaacaaaactgagtttcagcataaaaatggatatattacacagagagtatacataggctcctaatgtctctgtgtgcatttgtatgcatattattcatctagtattttctttttacttccaagttggaatgcatttacttcatatcttattataagcccatttggtaacacttctgtcagatttcagttgcatattcactgttgaataaatcagtggttaataaatgtccttggaaatgtgtttagagataaataatgaactgctgtatctgatcattaagtgtacatcaagctcacatttttactctcagaatcctaaaaggaagatagcatgacctactatatatgtacatggaaaaaagggaaataattatagagaaaacatgtaaaaggagcctggtttattactcttaaatgggtacatgatagatcaaaataaatgttattacaactgatcaaaaaatcctactgcaaaggaaataataaataaagatggagagtcaacctgtccatcataagtgctttttgttacaaagccaaggacttggagtgtggacccaaccccacagcatgcaaaaccgtggggctctcaggattccaagcctagcatccccaccctctcataggcgcttcggagctgaccgcaggcacacttttaatttgtggcaagatggtctgacaaacagcttgggaggacagcacaggtgaaaatacagatcaagtgcagataaaaatatgttcaccttgaaaaatacaaacaagacttttaggtaataatgcacagggaaatcctatcaaaaaatgagaagaatagaaccactgctttctcattaacaattttcacaatcccttttagcttgtattccaacttctgtccataatccaatatctgcatactccttacatctatacttaaataatatagatttttgtcccctgtacatatcttataaatgtcaatccatcccacctcaaagtttcttggtattcagcaagttttttaaaaagtcaatcatgtaggagatcctttagcaatacttcaaggtatcatccctataaaaagtgaagagggatctgaggtcctaaaaagaaaaataatgacagagaatggctgtaatttcatatgttcctgatggaaatctcactgctcagaaaaaaaaaagaacacatatgccaaaataaaaaaaaaaaaaaaga

SEQ ID NO: 150 - DNA, 1047 bp, Homo sapiens
  misc_feature (5)..(5): n equals a,t,g, or c
ggcanagactcaggaggctgaagcgagaggatcgcttgagcccaggagttcaaggctgcagcaagctatgattgcaccactgcactccagcctgggtgacggcaagaccctgactctaaggaaacaaaaacaaaaacaaaagtgggtataaatatgactgcaaaactgctctgagctgctcctctctgcctatgcggtagccctgctctgcaggagcggtcacagagcagtaatactggctctctaataaagctgttttcttctgcctccggtttgcccttgaattctttcttgcacaaagccaagaaccctcctgaactaagccccactgtggggcttacctgccctgcatgaggtaagtatcaactatggctcaaaaggcaggtcaaaggcagcttttcaagtatatttgtgtcacagaaactcccactgtaacatcaaaaaatgaatgattttttcaattccctttattagggtttctttccctgcccccctcatttctccacttctttctcttctctccgtaggtatatagttatactctcccctcacacactcattttgtgtatgttcaaaaatattttggttatcttttatttctggtaactgctttttcatcctgcatgagcagccaagaaaagaattaatttagactttctgcaatgtcagggcctctcattcaattactctccttgtctcttggaagctctggtaacttagtttaatgacctctcacaccttacatccttaaaaaatgccccgtgtgtctcctggctcgggcagtcttaattatgttggcagctttaggtttccttattaccagcactccaggacctcatccccaccctgtccccatcttcatcttcacccagagcttcccatctccccacctcccttatcgccaatttctgtctgcactttatccacgatattcccatgttttctgctcttactagaaacattattttacccagcactgcatttttaaactgaaagaagatggtgattattatgcccttatcgaaatccattacttgaaaagctcga

SEQ ID NO: 151 - DNA, 1246 bp, Homo sapiens
  misc_feature (746)..(746): n equals a,t,g, or c
ggcacgagggccaccaggcacatctgctccactgagctggtgcagtgcactgccttgtccagcaggtggtggtactccaggtcctctgtcagccgctggagcatggacaggggctcattgaagttcacctgtgggtggacaggtgggtggtcaggctgggcaccagcccggcttggcatggtgcccttgcttttctcggatgttcagggacatccctgstcagacagcaccttcacagtgaggctcctcagatggccctgtccaacagtgtggcccccaagccatcacctccctggcccctcctgggctgttttctccacagcccttcccactttctggtctgctgcatcctacacacttttatcatgttcactgttgctctcctctgctcggatggacacccamcaaggccaggggttctgcctggcccactgctgtatcttgagtgcagaatcttaggaagcagtgactgaatgggcacatgagtctgtgggtggaggaagtgggtcttccccatgttgcgagctgtgatggggcccggcacaggatgggttaggcccaakgcccctatcycggtgtcacatakggcagggtcactctccccaccatgatgccatcgggtacgagtctcagcttcctcgtgttatcttgctccatcctcccagacactgaagaggacgctgtgtttctccccaccctacacatgtggacacagaggctggagatgtgaaggaacttgktctggntcacacagcagaaccktctggcctagtggagatgccatgtagccaggtggcatgaggatccaagctctgagcctgcatttcctggggatggcaccagggatggctgccagctgaaggagggcccacccctccacacacagccccatcytgccactccccatctacagatcggkacagctgggacatggtaaggtcctgtgagatccagaggtgctctggggctccccaggttgctgatccatgcagagcttctccctggctcctcctgtcagagcccaaagatccctgtactttggaagattgggcaatgcctatgtgcacgattagataattagttacatgctcctcaggtgccgttaagaaaatgacactccaaggctgtgtgtacttcacacaggccattactgctcatccatgcacaggaaagcagccccagaggacctgtcggggctgccctgcccgagccacccaccgaaaaaaaaaaaaaaaaaaaaactcga

SEQ ID NO: 152 - DNA, 1048 bp, Homo sapiens
tgcaggaattcggcacgagccaccaccccagcccattatctctattgatcctcactccaaccttgcaaaataggtagcgtattccagtggagaaactgaggcacaaagaggtgaaagacctttcctgtcacagttaggaaagtggcagaagccgtatttgaaccccagcaggtctccctctgaagtccacacacgtcagcgcctctgtgttgtctctttgccagcacagggctccctggagcccagagatgggggtggtgacttgaaggggttggcaagcctgggctcctccagcgaaaattcccttggccctgggcattcctaagcgagaagaggctcaatcctattttcttctcctaattggatgccttttattcctccttcctaattgaagtctggtcattgctggttgccatggcagcagccaaagcgctcatctcactgtggcttgtctctgcctgcggccaatgggaaacctcctttcccatatacggtggggacatggagtgtcaggctgtcgtattctggtggctggaggaggagaggaagtgagatgggaggaaaaaggcctgtcctctcccacgcagagactccggacagcaggatgtgtggaatccccagtctgttttcagccaggcagcaacagcatctgtactgagttgagtctatgtgtctaccagtgggctaagaacttcatgtgcagtatctcatttaatcttcgtgatggccccaggaagataagggatcaaggcccagaaaggctaagtaagctgccaggtcatccaaggagaaaatggcaaagcctggatttgaacagagactccagcttccttatgtgtagccatctcaccatgctacttctcagggggttactatgagtgtctctcatgtccccagacccagattacaggtttggaggaatacacagcccaccttcccaatatcgcaggcaacagttccaccaaatgccctgcatggcatcacagggagcctagttgcccactgctctactgctgagctcaatgccacccagcccgggctctctcga

SEQ ID NO: 153 - DNA, 1530 bp, Homo sapiens
gaggggcactctcccagctgagcccggatatgaggtgtggggagcccagcatgggagcagggctgagcccagataccactgcctgcaagcctcagtggcttgcggccactgccctgtctgcgcctcagtgtccctatctttaaaattcagagattgaattgggggctctagcaaacacagtggacctggtgatggctgggctggcccgggccgaaggatgtttcccgcccggctgtgcctcctctgtccccatccctccctcggaagcccagagtgcagttttccaatataccccagcctcatgtgggggcactgggcacaacacacagggaggcaaggccctgtcccttccaccagtctctcccactgtggctgcccgagtctgtcctggaactggcagaggaagacattagggcagacgtcgagggcgggggggtcaccgtccactgtcatggcccctctccccacccccctcactgctctgggggcctcacaccttcccttccgctgcctctcctgcctggatgcctgcctcttcctgtggggttatctaaactctgcccaccctataggggccagctagacccctcctcctcagccccaaagaggagcttgggtccggctcacaggcgaggggagcctggaagccgtgagtcctgaggaactaactgctgggcagaagggaggcaaccggggctgagtaaccgagatcctgagactccagggtctcccaccacagaacagccccaggagtcctagccatgtgggtggggtagagctatgtggaccagcctccatggctcagtttccccactggctcctgtgcacccccatggcccggagcagggagcggaggagtggtcctctctgcctcagtttccccaccggctcctgggcacccctcatggcccagagcagggagcagaggagtggtcctctctgcctgactcagtttccccactggctcctgtgcacccctcgcggcccggagcagggagcagagcagtggtcctccgccgccccctctgaaggtccctcaagccctgctggaccccctcctgcctcagcctgggttccagctcttctccaagaccaagaccccagctgccccaggacagctctacaggtgtggaggcctggtccagccacagctccagcttacttgctgtgtgacctcgggcgatgctggacccttctggaaaatggaccggctggaccatcttcaggggctggaccggctgatctccgagggaaaggaggcacatttatttgtgagaccattgtctttccatctggggatgccagctccaaggcagccaggctcctctgggctttgtcccaggctccaggtagggcacacagttggcccttgtctgccatcagcgctcccagggtggtctctcacctcccgccctccctccccaggaggctggaagaggtgggacagaaccaggtctcaatccaccagccttgggaaagggacatccggggcagggcgcggggagggggggcacggtgctgcctcgaggg

SEQ ID NO: 154 - DNA, 825 bp, Homo sapiens
tgcaggaattcggcacgagccagagcagccctcaaagcctgggctgttgagagtgcacatcctggcctgcggtgacagccgtcagatggtgaggggccccaggcgactgccccagcagcagggcctgggagctgcacaggggagaactcgataaggagcatcatgagcatagtgggtccattgacaacatgcagtccccacggtggtgcctaatgacaaaatgacatcatgccacctgcaaaaaaagtaaaaatgatcagaggcgagcttgtcagagaagctttgaactaggtgactgcatgaaacatctcagaggcggaagagtgcctccccctccccgggactcccacctggtgccctgagctcatcatcccttctcttgtagcatatgctgtcaatacccagggccttttcgaaacggcaatgggtccgaaggcctcgggaccacctttcacacctcccctttatgcagtgtccatacctccttggtgctcagctgctggtcagctccatatgccctgtggtccctgccctcccaaggcctgtgaacaaatgcttagtcccagattagagtctacgtcaatctgggatgtgagctgagtggcacctgtcgtgaaccaggccagagtctacgcaatctggggtgtgagctgagtggcacctgtcgtgaacgtgcatgcacatgggcattttgtcagtctgcaccggtgaataaatgtcgctgcatttgccagctgagtgtcaccaggttccaggtcccattacacatcaggaattgtgtccgactcttctggatccgctgattggacctgagggatccctgac

SEQ ID NO: 155 - DNA, 853 bp, Homo sapiens
  misc_feature (20)..(20): n equals a,t,g, or c
  misc_feature (40)..(40): n equals a,t,g, or c
aattcctaacgcaaaagcanccctggggaagaacacaganacaggtgacacgtgtcagactgggcccatgtcaggtacatgtatttcccttcacctcaccctgaaatgtgccatttcagaaagtggtgcatttaccagacaatttgggttgatcatcatgttagccacttggcatctcagtcaccatcttggtcacctggtcaacatagcaaccacatctcttggtcagctagctttatttgcaccttgatcactaagatagatgtcatctgcaaagctgtttaataatcttaataatggtctttattatttccagatccctagagtaaccttagaacagcaagaactattcattcatccataaattccagcaaggtgctatagaaagcactatggaaaaaagaggaaaagagagggagaacatattgtaaaagtagacagggattctgctactgagaaattcaacacctggcaagggggatgaacaggaaagagaggtgctggcagaataaaatcactccccagctccccacacaatgagcaatgagtatgctatttctattttgtgtccatgtgtccttgctcatattcttaatctgcagcccaatgctctacctctgagctataccccctcctccttgctcatactcttacttgtgacttgaagtgacttcctgctcctgcctattgtcacctcccccatgaaggcttccccaattatcctgaagcagagacagtccatccctccctcccctgtgcaaccagggcccctgggctgacctcaagcttctcacacttggccataactagcttttaggtatttatctcccacactagactctgagctcctcga

SEQ ID NO: 156 - DNA, 621 bp, Homo sapiens
  misc_feature (616)..(616): n equals a,t,g, or c
attcggcacgagggaggaaagagggtggaatctggacagtatgaaggatttgtattgtacctgtaatgtttgatgtctgaagctgggtggtgggcatggctgtttgttattctccatccttttggtatgcctgatacatttcataataattttaaaaaggacaagactactgcagagaaatgcatagagtgagctctgtttgggtttttaaaatgattcctacatctatgcttgcagatgtaagcaccagccctggaaaacattgcaagggattcttagtaggcccaagctttgggaaagggccaagggggctggggagttgattaggaggggatacatgctttttcctgctgccttttgaattttgtaccacacgtagtattacttattaattaaaaaataatctgaactagccaggcgtggtggcacatacctagtctcagttacttggaaggctgaggcaggaggatcacttgagcccaggtggttgcggccagcctgggcaacatagtgagaccctgtctctttagaaaaaacaggccaggcatggtggctcacacctgtaatcccagcactttgggaggctgaggtgggtggatcacctgaggtcgggagntcgag

SEQ ID NO: 157 - DNA, 817 bp, Homo sapiens
  misc_feature (4)..(4): n equals a,t,g, or c
  misc_feature (7)..(7): n equals a,t,g, or c
  misc_feature (600)..(600): n equals a,t,g, or c
  misc_feature (683)..(683): n equals a,t,g, or c
  misc_feature (685)..(685): n equals a,t,g, or c
  misc_feature (728)..(728): n equals a,t,g, or c
  misc_feature (811)..(811): n equals a,t,g, or c
  misc_feature (814)..(814): n equals a,t,g, or c
atantgnatcactcattggaacattagctggagctccaccgcggtggcggccgctctagaactagtggatcccccgggctgcaggaattcggcacgagctcgtgccgaattcggcacgagaaattcatgggagtgggattattaaatagaataatatgaacaattgtatggcttatgtttgccttattgtattcccaaagagctgtaacattttatagcatcaccacttgggcaggggtattacctgttgttgctaatttagtaagtagaagagagagatcaaagtttctctaatttgtgtttgtgtaatttatctgtatactttcttcatttatataaataaatgtcttcactttgggaggctgaggcgggcagatcacctgaggtcaggagttcgagacaagcctggccaacatggtaaaaccccgtccctactaaaaatacaaaaattagttggatgtggtggctcacatctgtagtcccagctactagggaggctgaggcactagaatcacttgaacccgggaggcggaggttgcggtgagctgagttcacagcctgggcgacaagagttaaactccatctcaaaaaaaaaaaaanaaaaaaactcgagggggggcccggtacccaattcgccctatagtgagtcgtattacaattcactggccgcgttttacaacgtngngactgggaaaaccctggcgtacccaacttaatcgccttgcagnacatcccctttcgccagctggcgtaatagcgaaaaggcccggaccgatcggcctttccaacagtgccaacctgaatggcgaanggnaaa

SEQ ID NO: 158 - DNA, 1653 bp, Homo sapiens
  misc_feature (1111)..(1111): n equals a,t,g, or c
  misc_feature (1613)..(1613): n equals a,t,g, or c
  misc_feature (1625)..(1625): n equals a,t,g, or c
  misc_feature (1631)..(1631): n equals a,t,g, or c
  misc_feature (1637)..(1637): n equals a,t,g, or c
  misc_feature (1651)..(1651): n equals a,t,g, or c
gcaaccttgcagagtcagaatcctgatcagcagttttgaccagcacatcaagagtggctttacctcccaggcattgatccagcattagtcaagctacaagacactgatgtagaaaaccataatgtcagtttactaatgtagaataagaaataaaatctcagaagacctgagctctcctgtcagcatgacttgcacttgtacttttcctttttgtagagaagctaaattataatcagaaagttgttttggtgagcttggaatcagaaaataggagtttaagtcatctgttcaacatgcagctttcctcagctgtgatagctttttcctgctgtccagtcttcatgtggagcctggtcaatagcaccagaattctaagtctgctggccaaggtgctgcctyctgcagagagagaaagcccatcaaagttgacttcagtgactcccccttcactcacccctcatcttycacgggcaaccaactycctttttgattgacacatcatttctttacatacattaatgccttccatattaccacagagagtttggtagactggaaatcattttatttctttgatctacttcatctttctctgcattgagcctttgcgtactaatttatagctattttctcacaggatagtctatttccattatatctatattttctagtggtcctttgcgtttgcctcttttccagactgtatagggcatggtgccaggcacagtttatttgttttattctatatgctgatagtatcatcttttccatctttagatgttttatctcattcagagtgagaggggcacttggtcagtcctttttgcatctcaatagttgatcctcttttgattaaaaaatatttaatttctaataatgtgtgttagagtgaaaataacaggaattattaggcccagtcaagactaacagttcttgactcatagttccaaatcacagttccaagatttccttaacctttctgatcctcacttccctcccaaaaaagtaagaatggctataattacctacctcatggaaattataaggcttcagcaagattaaatgtactcatttatttaacatgcatagtaagaactataaatgttaattnattcttacttacattargatactgacttatgaaacagagattaaacacattctgcaaaaggactggtattgacaggctttgattctaatagctcaaaagataggccatggcttgctagagaaaatgaaaggatactcaaggctcattagattaaaaggctgctaatgttctctaagctgtaagtagatttttgcccacatttatgaaggttgatttctaatcagattagaaatggcataggctggtggcgtcatctcagagctgccacagcattctcaggagactcagccatatcatgttgggttgctctaagaacacacagagacctttatgctttttcacaaaagcatactctttccctggagtgtgtaactctatgtgttgacctttagtgggataagttcttacaatggagctattctgggtacaaaacatcactactctgtgagattttggaagataacactgtttgctgattttacaagcccgctcgggggggggnccggaacccggngcggtncccgtncctttccccccccncg

SEQ ID NO: 159 - DNA, 1298 bp, Homo sapiens
  misc_feature (237)..(237): n equals a,t,g, or c
  misc_feature (1291)..(1291): n equals a,t,g, or c
gagctcccttcctcgtgctcggcgttragctcctgcagccgccgccgctgcagtggtcgtccctgccctccccggccccggggtgcaccccgcaaggctcccgctggtgtccctggagcatgggaggctgctgagcgtgagtggcggtgtctggcaggagctgcgtggcagggagggcgtccatggctgcagccaacaagggcaacaagcccagagtccggagtatccgctttgcgncaggccacgatgcagaaggatcccacagccacgtccactttgatgagaagctgcatgactcggtggtcatggtcacccaggagagtgacagcagctttctggtcaaggttggcttcctgaagatcctgcacaggtatgagattaccttcactctgcccccagtgcacaggctgagcaaggatgtccgcgaggcacctgtccccagcctgcacctcaagctcctcagcgtggtgcccgtccctgaaggttatagtgtcaagtgtgagtactcggcgcacaaagagggcgtcctcaaagaggagatactgctagcctgcgaaggtggcactggcacctgtgtgcgcgtgacggtgcaggcccgcgtcatggaccggcaccacggcacgcccatgctgctggatggtgtcaagtgtgtgggcgccgagctggaatacgactcagagcacagcgactggcacggctttgactgaggcccgaggccccgcctgccccgggcccctcagccttaaaccccgccttgtccccccgacatgctgcgtgatggtgtggcttcctcgcccctctctggggtgggtgtgggggtggagtggccttgcccacgcctctcacctctgccttcatttgtgctgccaccctgcccctccctcgtcctcctctcccacttcctcctctctgtgtgcctcagtctcctgccggaagaaatgggttgagcccgaaaggaggctgtctgaggaagggagagggagggcctggggtgggtcccccactccccaccccaagccacagggrctcccaccagggtctgggagaggacggagctggctctgtggcgtcgtggccccattactgctgccttgcttcagccacctctcctgcccctccctagtccccactgctgtccaccatgagtaggagggaggtgcagtccccagcccccacccctcaggtctgtgttacttggtttttaagcgactggttgggatagaaccctaaagaaataaacttccagtggataccggaaaaaaaaaaaaaaaaaaaaaacttgggggggggnccccgta

SEQ ID NO: 160 - DNA, 604 bp, Homo sapiens
  misc_feature (152)..(152): n equals a,t,g, or c
ggctgcaggattcggcacgagaatcatcagagatgaaactgtttgagagactcatgtgaccttacgaaaattacaacagcagtcttaaagtatgaaaaagatgcatcacagcagagacattatggcccagttgatatcaaatgtaaaatgtnaatgcatgtaaatgcacacttcattttatgtattatttagtaatttgcagtggtatgtgtttaatatttttgctacctacacattaggcaaaaaaaagatgtaaataatttgggagaaaaagaggaagaacagtgtaaaataaaactttctataagtactccatttcaatgtgttcaacatcatcctaaaaggcaagattttcccacgcaggtgacaaggtggtttatgtactatttaagggcggaaggtgcgtgcccgttcaataagcatgttttttgccaggtaggaaatatgttccatatctttacttatcattgcatttcagatgggaactagaaaaactggagagaaaaatgtaatgaaactgctgctgtaaattattccttttagcatgtattcacttgctaaatacacatttcttcaaaataaaaaaaaaaaaaaaaaactcgta

SEQ ID NO: 161 - DNA, 2218 bp, Homo sapiens
aattcggcacgagctcagccacccgctgggaatcgtgcagggattcttcgcccaaaatggagttaatcctgactgggagaagaaagtaattgagtattttaaggaaaagtgaaggaaaataatgctcctaagtgggtaccatcactgaacgaattccccttcattatttgaaacctaatagttttgtgaaatttcgttgcatgattcargatatgtttgaccctgagttttacatgggagtttatgaaacggttaaccaaaacacaaaagcacatgttcttcattttggaaaatatagagatgtagcagagtgtgggcctcaacaagaacttratttaaactctccacgaaataccactttggaaagacagactttctattgtgttccggtgcctggggaatctacgtgggtaaaagaagcctatgttaatgcaaaccaagctcgagtcagtccctcaacatcctacactcctagtcgccacaagaggagttatgaagatgatgacgatatggacctacagcccaataagcagaaagaccaacatgcaggtgccagacaagcagggagtgttggtggtcttcaatggtgtggagagccaaaacgtttagaaactgaagcttctactgggcaacagctgaactctctgaacttgtcttctccttttgatttgaattttccattgccaggagagaagggccctgcatgccttgtgaaggtttatgaagattgggattgtttcaaagtaaatgacattcttgagctatatggcatactgtctgtggatcctgtgctgagtatactgaataatgatgaaagggatgcctctgcactgctggatccgatggagtgcacagacacagcagaggagcagagagtacacagtcctcctgcttcattagtgccgagaattcatgtgatcttagcccagaagttgcaacacatcaacccattattgcctgcctgccttaacaaagaggagagcaaaacctgtaagtttgtttcaagtttcatgtccgaattgtctccagtcagagcagaacttcttgggttccttactcatgcccttctgggggatagtttggctgctgaataccttatattacatctcatctccacagtatatacaagaagagatgtccttccactaggaaaatttacagttaacttgagtggttgcccacggaatagtaccttcacagaacacttgtatcgaattattcaacatcttgttccagcatcttttcgtctgcagatgactatagagaacatgaaccatttgaaattcattccccacaaagactacacagccaatcgcttggtcagtgggctcctccagctgcccagcaatacttcccttgtaatcgatgagactctcctggaacaggggcagctggataccccaggtgttcataatgtgacagccctgagcaacctcataacgtggcagaaggtggattatgacttcagctaccatcagatggaattcccctgcaatattaacgttttcattacttcggaggggaggtcactcctcccggcagactgccagattcacttacagccccagctaattccaccaaacatggaggagtacatgaacagccttctctcagcggtgctgccttccgtgctgaacaaattccgcatttatctaactcttttgagattcttggaatatagcatatctgatgaaataaccaaggcagttgaagatgactttgtggaaatgcggaagaacgaccctcagagcatcactgctgatgatcttcaccagctgctcgtggtggctcggtgtctgtctctcagtgctggtcagacaacgctgtcaagagaacgatggctgagagcaaagcagctagagtctttaagaagaacgaggcttcagcagcaaaaatgtgtgaatggaaatgaactttaaagatgtaatacctatgaagagtaatgggcaaactgtagccacataattgtaaaattcagatattcatttataccacattgttttataggtaatttctatcacaaaccagtgacatttcctgaaatcaagcctggtaacacctgatgtttatatgatattcagtaaggacttttaccttactgatttcatggagcttttgaagtttgttttataataattatataaattagtaatgatgtaaaaaaagtatttgatattaaaagtttaatattgaaaaaaaaaaaaaaaaaaaaattgcg

SEQ ID NO: 162 - DNA, 1142 bp, Homo sapiens
ccacgcgtccggtcgggtctacgtgggcaatgtggcctggatgcacgtgctggcggcccgggagctggagcagcgggcggctctcatgggcggtcaggtgtacttctgctacgacgactcgccctataagagctacgaggacttcaacatggagttcctgggcccctgcgggctgcgcctcgtggagtcccgcctgctggtgccctactggctgctggtgcttctggccgctctcaacgccctgctgcagtggctgctgcggcccctgtttctctacgcccccctgctcaacccctacacactggccgtggccagcacgaccttcaccgtgagcaccgacaaggcgcacgccacttcggctacgtacccctgttctcttgggaggacagccggacccgcaccatccgctgggtgcaggccgtggagggctcagcccggtgacgtggagctggggcctggagcccggtgcgtggcacgtccgtccatccaggtccagggccctctagccctcggggcagaggggctggtgctacaccagctcgcctgccttgcagctccccgtgcttctaagccacgagccgcgagtctgcatcctcacgcctcttaagtcctggggcagggttttgggacaggcacatcttcactctcgacccaggccgacggctggctggggagtgtccgatggcccgattgttctcaactgccctgtcccatctggcttttcaagcaggaagtgagaaggggtcccacgggcttcgtgcaggccttctgaggtctgggcatggattcaggcctggattcggcctgaagatcctttctgactcctcctaccacctggggccctcttggagggtcatagtctcattttttcaggcctggattcggcctgaagatcctttctgactcctcctaccacctggggccctcttggagggtcatagtctcatttttttaaaaaacatttatcgccttttgacagctctctgctcttcaatgacgcctgagcaaacctgcagctttttccttcttcccacctctccacccaaatcacttcctacagtattgtgctgtacccagccgagccctggattaaagctcctaatccaaccctgaaaaaaaaaaaaaaaaaaaaaaaaaaaaaa

SEQ ID NO: 163 - DNA, 1036 bp, Homo sapiens
  misc_feature (869)..(869): n equals a,t,g, or c
  misc_feature (894)..(894): n equals a,t,g, or c
  misc_feature (915)..(915): n equals a,t,g, or c
tcgacccacgcgtccgtgaaattcagacacaacagcaagaggaatggagcactaccggaaagctggctctgtggaactcccagcaccttctccgatgccgcggctacctcctgataccctggagatgcgggtccgagatggcagcaaaatccgcaacctactggggctggcactgggtcgattggaggtggtggtgcacggcatgtggtgttctcaggttctggtcgggctgcagggaaggcagtcagctgtgctgagattgtcaagcggcgtgtaccgggcctgcaccagcttaccaagctgcgcttcctgcagaccgaggacagctgggtgccagtctcacctgacacaggcctggatcccctcacggtacgccgccatgtacctgcagtgtgggtactgctcagccgggaccccttggaccccaatgagtgtggctaccagcctccaggagcaccccctggcctgggccccacatcaagctccagctgtggtccacgaccccgaagaagggttcgagacacctggtcctaaagatgtgccaagcaagctgttttccacgcatgaatgtctaggatggctttgcctcctcaggaaagcctcttgtaactgttcaacatccccaacaagacttgaattcacagcctccctgtcctgcttccttctttctgcagtgtgaaaagggactgctatgaagagttaaaaggtgtgcggtctcagctggggtctggattgcttaagaagggtttacttggcattctacctactgtgcctctgtcctttcttctgacagagatccagggagtgggttaggaaataaacgttctgcccatttgttaaaaaaaaaaaaaaaaaaaaaaaaaattaanaaaaaaaaaaaaaaaaaaaaaaaanaaaaaaaaaaaaaaaaaaaanaaaaaaaaaaaaaaaaaaaaaaaaaaaaaaaaaaaaaaaaaaaaaaaaaaaaaaaaaaaaaaaaaaaaaaaaaaaaaaaaaaaaaaaaaaaaaaaaaaaaaaaaaaaaaaaaaaaaaaaaa

SEQ ID NO: 164 - DNA, 1790 bp, Homo sapiens
  misc_feature (639)..(639): n equals a,t,g, or c
  misc_feature (827)..(827): n equals a,t,g, or c
  misc_feature (852)..(852): n equals a,t,g, or c
  misc_feature (858)..(858): n equals a,t,g, or c
  misc_feature (886)..(886): n equals a,t,g, or c
ttggcggtaacaatgctctttatttgtggcgtttaaaggcggggttgggcgggacagcgcccttgcgtgtattaggcacaggttcggaacgcagcatctttccaggggcttccctactagctcagccccataaagtcactggtttcctccatctggaccagcagccgcaccagccaaggcgcccactgggtgtcggaggtgggcgatgtcaatccccgtggccttcgtcgggagggtggagctggccaaaaagagagcggtacagttctgtcctggcatcatcattcattgtagtatggtcaataggtgccatgaaactcagtagcttgctaaggacatgaaaccgaagtttcctgcctttgctggctttcctatctacttttttgtggattttgcttcgtaacttctggattgcaagccactgccttcccatggccacctgatcgttgggatccaaggagctggtcttccgttctatgagttctcgaaggagctggtggtaaaagtcatcatcatcaaagatttcttcatccaagtccttcagatgagcattagcaggggcttgaggaaggatctccggttcccctggcaaactctctgggacaggctgagctgctggctcaggtttgccaagaactngatagacggagcgcttggtctgtgtccttcgaagtaatctctctttgtccatcagaatatggtcgatctgagtcaagattgagcgttcaaaggcaccaaaacccttcccagttttcagaagccagttggtcttatcgtgccatttcttaagtgtccggttcctgtagactgaaaagtcggcaaagcgntttgccaatgaagttggaatagtcntccatntccagcttcctctttgcagggacctttnttggttgctgcttcttctcttctaccagctcatcatcttcactagaaatctcctcacttcccgcattgggctttgtcccatctactagatatctagtgtctgggtactggaaaagcaactcttcctgaagacctaccaatgacctcaacaatgctttaagtgccttgtgactatttttcagggcactggaaaattctgggccacctttgtccttgaacaatgggaaaacatctggttgaggaagctggttggtggtcaacagagctttttgtagtttgatccttccttccaagagctggtcccacagtgctatctggttcttcacggctcttcctttctccacttcctcagaaactttgacactagagaaggtcatcaccacaccatcatcctcactgtttctatctccagccctgtcttcctcactctcgccttgggagtcttccgcgtcatccccttcttccatgccactctcttcgtcttcctgtatggtgccagttgcttcttcatcaaagcaagcaaaggcatttctgatgacatcttcaggatctgtgccatttaacttctcaccaaacatggtgaggaacatggtgaaattgatggggcctggagcctcattcatcatggcatctagatactcatcagttggattcttccccaatgaagcaagcatatcatgcaaatcttccttgtcgatgaaaccatctctgttctgatcaatcatgttgaaggcctctttgaactcctgaatctgtgactggtcaaacatagcaaacacattggatgttgcacgctgagggcgcttcttggtcttggtctttgttcttttgctcgacatggtggtggttaagtcccggcacagctacgagaatccgagcacctctccgagcccctcggtcgacgc

SEQ ID NO: 165 - DNA, 1125 bp, Homo sapiens
cggcacgaggtgatgatggcctgttttggagtgtgtctgagactgggattgcatttggggtttcccgtgtgcttgggatgctagagggtcacctgcaggaggcctggggccggcgagaaatctcctgtgatgccctgtgaaatggcttgtctcctcccccatcagggcccaccgaaagctcaggggagcacagaagcccatggaagcccagggagatgtccctggggcagacactaaggcaggtgttgaagacaagctgcttgtcaagaagcatttcccggcaagagaggggcaagtcgggggctccaactgggtacagcctgggtgcagttataagcccctttggcttacttggtagaagatggctacttggatgtacctcacttaaagatgttttgtaccacactaggtctctgggcccttgtgcttcctgtgggtggggtgagggccaaaggctatggtttcctgcctccaggagaatggagagaaagggcttccaggcccctccaagcctggggaaggacgtggcatccaagctgagccagagggaactgctgctggcctcccttcatttctgtggaccttggaggctttggctttgtggcagggcctccccaggcagctctgggacctaggagtttgcttctgatagggtcagctttcccatttcccttcaatgcttgggaaccttctcccttagcttcacacttgccatttcaagccctgctgggaccttgtggcttggctggaatccaggactgtattttcatggagaagaacctgcagattcttccatcctcagctggccatggcccacagctctgcatctgcatctgagcttctcaggactcctggagcatggggggaatggggcggggccactgctctgtgctgacgggctccgtctcggagattcttgtcctgtttttttttctgttgtttttttttggctggtgctggggacaagcctgtgcctgccaaagctcccaggccaagtttgggggctggtgtttggggttgggtttggggttcaggatgctgcagtctgtgcaataataaacccgcatctgctcaaaaaaaaaaaaaaaaaaaaaaaaaaaaaaaaaaaaaaaaaaaaaaaaaaaa

SEQ ID NO: 166 - DNA, 1157 bp, Homo sapiens
cccccgggctgcaggaattcggcacgagaatgtggctcctgtgtgtggcgttggcggtcttggcatggggcttcctctgggtttgggactcctcagaacgaatgaagagtcgggagcagggaggacggctgggagccgaaagccggaccctgctggtcatagcgcaccctgatgatgaagccatgttttttgctcccacagtgctaggcttggcccgcctaaggcactgggtgtacctgctttgcttctctgcaggaaattactacaatcaaggagagactcgtaagaaagaacttttgcagagctgtgatgttttggggattccactctccagtgtaatgattattgacaacagggatttcccagatgacccaggcatgcagtgggacacagagcacgtggccagagtcctccttcagcacatagaagtgaatggcatcaatctggtggtgactttcgatgcagggggagtaagtggccacagcaatcacattgctctgtatgcagctgtgagggccctgcactcagaagggaagttacctaaagggtgctctgtgctcacgcttcagtctgtgaatgtgctgcgcaagtacatctcccttctggatctgcccttgtctctgcttcatacgcaggatgtcctcttcgtgctcaacagcaaagaagtggcacaggccaagaaagccatgtcctgccaccgcagccagctcctctggttccgccgcctctacattatcttctcccggtacatgagaatcaactcactgagcttcctctgaagccttgaagggttttcagatccaaggaacaaaggggaaaatagacaaaggagtgcagaggacctggcctggcactggcttatttacctgagctcaaggagatccccgctggagcagcctctgcaaaagggagcccatgtaggccaggggctgtccaaactccagcttcttcccctgggaaaaaacccaaagaaccaaaaacaaaccaccccaaggataataatagctacactgctagcttctcaagttcttgtgaaaaacaatttacataatgacacagtagatgtggaacacctagcccagtgcctgggcaggtccctattatcataaatgaacataaaagtgctctaaaaacaaaaaaaaaaaaaaaaaactcga

SEQ ID NO: 167 - DNA, 902 bp, Homo sapiens
ggcacgagctctgaaatatgaaatgcagctattggatgaactcccaatgatatacagctgttgcatatttgtgtactgcatgtttgaatgtttcaagatcaagaactcagtaaactaccatctgctttttaccttagttctattcagtttaatagtaaccacagtttaccttaaggtaaaagagccaatattccatcaggtaactgctacgtgagcttcaggtataaaattttaaacaccgtatcctccagaaagactttctactgtgtcatgtatggaatgttggtctttacattagtacttcgatctatttatattgttacatgggtttatccatggcttagaggactgggttatacatcattgggtatatttttattgggatttttattttggaatatagataacatattttgtgagtcactgaggaactttcgaaagaaggtaccacctatcataggtattaccacacaatttcatgcatggtggcatattttaactggccttggttcctatcttcacatccttttcagtttgtatacaagaacactttacctgagatataggccaaaagtgaagtttctctttggaatctggccagtgatcctgtttgagcctctcaggaagcattgatgaatcattccaccaagaaaacaaacaagcacctaccatagacctggcagaataaataaggaaatccttaaagatctacaagttcaaatatgtcatgaccatcacagcagaggagtgactttctgactaatgctgccacccacacagagaataaggagtagggcctgctgggtgtttagctcatggctttatcttatttgtccccctcctcctttcacgctccagtttataaagaaacagagatgaaaaaaaaaaaaaaaaaaaaaaaa

SEQ ID NO: 168 - DNA, 897 bp, Homo sapiens
ggcacgagggacaatgaagagtatgaaattgaagtttttctccattgaaaacattcagggaggactttgattaaaactttttgtaaaaagtttcagtagtgttgacttgaggatgatacaaagctgtatactatgttagttagatccttgcttctcaggtctgggaaacatcttcatacatcttccatgcacaggtgtactcatgtgcgtgtttgtatatgagcttatgcttctctctctggtgtttcttcctcattggtctttaccttctcttccttacttttcctttgcccttcatagcaatactgttaagccagatatttacttcttatgtggatcaaatagtcttatatttcctgtggacaagagatatgttttctactcatttatttctctaattgtgaataggaaacagctagaaaattggaataccttcagcttatgtggctgttgattgactttgtgattcagtgggccttgatatattagaaaaaagtcttttcttttctcttaaaattagtataaaggaacgcatgaactcagtatatgaccttagagacagaaagaaaaaaaaattatgtaacagccctttgagagtgaggaaacattggcactgaaggtaaaagcaacttgtctggagccatataacaagtggcagagccaatagtagaactccagccttctggagagttcttgctcccagatcttgctctctacatgagatgtggactatgtgtctcttcaggttgtcacctggttctttcaagttgctgagttcttccttggggaagtgcagaagggaattaatagagaggatccatttcgtagtctctgccactttttgtgcttatctccctctcatttcagtgtgtcttatttggcaaaaaaaaaaaaaaa

SEQ ID NO: 169 - DNA, 1284 bp, Homo sapiens
ggcacgagactcgtgccgaattcggcacgagcaacagcaaaagcctagtgcattgggagatgtgcaacctccctgaaaatcttttctgtttctggagtacttcaggggtggcctctggccccagagcctttgccacagtgctcccaccagcccccacctcatccgtctgtttgcagagcctcatctacaggtccccacgctgccttctttactcactctgcgcttggccgttttgttatttggcttagtctacattgggcggaagtctgtgtgcacagagtgggtgttccttcgagccccttccactcagagggccacacccagcgatgccagtgaaggtggcacagcctctcttcagtttctcctgactgtgatctcactggggtagaattcccctgagagaatccctcactcacggctccctttgccagagtcagttcaatcaggtctgatgtgagcaatttacacacttgtctcagaaagtccctcagggtttgtagaggactgcaggggggcatccgctgcagactcagcctttctctgcagccatcctgcagtgggggtgagcgggcacaggctgagaactgctcttgggtggtggaagcaggtgtcacggtgcaagtctccccctgcacccctcccccagcttgagccgtgtcacccccctctccctccagcatgggcctgtgtctcaggctctctggaaggtggccctgccccggaccctcttgcaggtgtcctggtttgacttggaactagatggccatctttccaggctttggtggcccaagagcagtctgggtggatggaagtggctgtcccctcctctccagcccctgcccacccactggtggaggtgctaactagcagggacgtggcataggatgggagctgggcgtgaggtgcttggggtccattctttgtccctcagcttctcagagtccggccagcccttgtgttcccgtgccccacactttcctcctccccactgcagtgagtcaatagtccagggtggggcctggcctccctgccctgattggggactcaggaggtgaggcctgcggggcttcctgccccctccttgcccacctgcctgcccccgggcagcacgggagggagagcagggtgagcacgcttgttggtttcagatgcactttctgcttgccattgmccgtatctgtgcgttccttcatcctggtcctggctttatggaacaccatgtttttagcatgtttttaaataaaaacggataaagtgtcaaaaaaaaaaaaaaaaaaaaaaaaa

SEQ ID NO: 170 - DNA, 3097 bp, Homo sapiens
ccagcttgctcgcactcggctgtgcggcggggcaggcatgggagccgcgcgctctctcccggcgcccacacctgtctgagcggcgcagcgagccgcggcccgggcgggctgctcggcgcggaacagtgctcggcatggcagggattccagggctcctcttccttctcttctttctgctctgtgctgttgggcaagtgagcccttacagtgccccctggaaacccacttggcctgcataccgcctccctgtcgtcttgccccagtctaccctcaatttagccaagccagactttggagccgaagccaaattagaagtatcttcttcatgtggaccccagtgtcataagggaactccactgcccacttacgaagaggccaagcaatatctgtcttatgaaacttgctctaccagcaatgcgatgcccagccaggggccagcgggtctggggtctatgtgaggatgtggaagagacagcagcagaagtgggagcgaaaaattattggcattttttcagggcaccagtgggtggacatgaatggttccccacaggatttcaacgtggctgtcagaatcactcctctcaaatatgcccagatttgctattggattaaaggaaactacctggattgtagggaggggtgacacagtgttccctcctggcagcaattaagggtcttcatgttcttattttaggagaggccaaattgttttttgtcattggcgtgcacacgtgtgtgtgtgtgtgtgtgtgtgtgtaaggtgtcttataatcttttacctatttcttacaattgcaagatgactggctttactatttgaaaactggtttgtgtatcatatcatatatcatttaagcagtttgaaggcatacttttgcatagaaataaaaaaaatactgatttggggcaatgaggaatatttgacaattaagttaatcttcacgtttttgcaaactttgatttttatttcatctgaacttgtttcaaagatttatattaaatatttggcatacaagagatatgaattcttatatgtgtgcatgtgtgttttcttctgagattcatcttggtggtgggtttttttgtttttttaattcagtgcctgatctttaatgcttccataaggcagtgttcccatttaggaactttgacagcatttgttaggcagaatattttggatttggaggcatttgcatggtagtctttgaacagtaaaatgatgtgttgactatactgatacacatataaaactataccttatagtaaaccagtatcccaagctgcttttagttccaaaaatagtttcttttccaaaggttgttgctctactttgtaggaagtctttgcatatggccctcccaactttaaagtcataccagagtggccaagagtgtttatcccaacccttccatttaacaggatttcactcacatttctggaactagctatttttcagaagacaataatcagggcttaattagaacaggctgtatttcctcccagcaaacagttgtggccacactaaaaacaatcatagcattttacccctggattatagcacatctcatgttttatcatttggatggagtaatttaaaatgaattaaattccagagaacaatggaagcattgcctgtcagatgtcacaacagaataaccacttgtttggagcctggcacagtcctccagcctgatcaaaaattattctgcatagttttcagtgtgctttctgggagctatgtacttcttcaatttggaaacttttctctctcatttatagtgaaaatacttggaagttactttaagaaaaccagtgtggcctttttccctctagctttaaaagggccgcttttgctggaatgctctaggttatagataaacaattaggtataatagcaaaaatgaaaattggaagaatgcaaaatggatcagaatcatgccttccaataaaggcctttacacatgttttatcaatatgattatcaaatcacagcatatacagaaaatacttggacttattgtatgtttttattttatggctctcggcctaagcacttttttctaaatgtatcggagaaaaaatcaaatggactacaagcacgtgtttgctgtgcttgcaccccaggtaaacctgcattgtagcaatttgtaaggatattcagatggagcactgtcacttagacattctctgggggattttctgcttgtctttcttgagctttttggaaggataattctgataaggcactcaagaaacgtacaaccacagtgctttcttcaaatcatatgagaaatactatgcatagcaaggagatgcagagccgccaggaaaattctgagttccagcacaattttctttggaatctaacaggaatctagcctgaggaagaagggaggtctccatttctatgtctggtatttgggggttttgtttgtttttgctttagcttggtgaaaaaaagttcactgaacaccaagaccagaatggatttttttaaaaaaatagatgttccttttgtgaagcaccttgattccttgattttgattttttgcaaagttagacaatggcacaaagtcaaaatgaaatcaatgtttagttcacaagtagatgtaatttactaaagaatgatacacccatatgctatatacagcttaactcacagaactgtaaaagaaaattataaaataattcaacatgtccatctttttagtgataataaaagaaagcatggtattaaactatcatagaagtagacagaaaaagaaaaaaggactcatggcattattaatataattagtgctttacatgtgttagttatacatattagaagcatatttgcctagtaaggctagtagaaccacatttcccaaagtgtgctccttaaacactcatgccttatgattttctaccaaaagtaaaaagggttgtattaagtcagaggaagatgcctctccattttccctctctttatcagaggttcacatgcctgtctgcacattaaaagctctgggaagacctgttgtaaagggacaagttgaggttgtaaaatctgcatttaaataaacatctttgatcacaaaaaaaaaaaaaaaaaaaa

SEQ ID NO: 171 - DNA, 582 bp, Homo sapiens
  misc_feature (575)..(575): n equals a,t,g, or c
attcggcacgagtcggtgctcgctccatcgggtctggcggggctggcagcggcgaggacccgggtctggcgctgtgggccgggagccgtggggcggcatggaggggctggttgtcgccgccggcggggacgtctccstgcacaacttcagcgcgaggctgtgggagcagctggtccacttccacgtcatgcggctgacggactcgctgttcctgtgggtgggggccacgccgcacctgcgcaacctcgccgtggccatgtgcagccgctacgactccatccccgtgtctacctccctccttggagacacttccgacacgacctctactggccttgcccagcgcctagccaggaagaccaacaaacaggtgtttgtcagctataaccttcagaacacagacagtaacttcgcattacttgtagaaaacaggatcaaggaagagatggaggctttccccgaaaagttctagctgagtggcagaagtgagaatttgtaaacttatgtacaatgtacgtgtaaataaatggattgaattcaaaaaaaaaaaaaaaaaaaaaaaaaaaaaaaaaaaaaanactcgag

SEQ ID NO: 172 - DNA, 1160 bp, Homo sapiens
ttaagtggtctgcccttccactgaaagtgtagctttttgacagtctcagccatataaacaggatctcagtttcatccttccatccatccattagaggcacaaggtctcatctcttttccttttgggcattaaaaccaaagttcatacattattgagacaggccgactctgctaaggcagcctgtttggcctttaagttttattgcttattttttgagtatgtatttatttttttgattattattatttttttttttgagctttaagccttcaagtttcctttttattcttgacccctagacatttcctttgcttgtggactcgggtatttgtttttaggtaatatttttwttccctatgacacagccctcaggagatcctgagaacatgtgccctcatttttaggtaattttaattaggaagggttttaggttgtctgatctgccttgttgctagaaacagaaattctcctatkgattgatttttcaaaccacttcttagtggcctctacaactactccagtcaggtcaagaatggctctcacattgccaagtcagtgggtatttttagtcttcatcttagatgacctttatgcacatttgtctttgtctaggaacttctgttggaaacatcttctattttaatgttattttaaatttttttgcttttgtaacattatgcttagcatgtgtgtccaactctttgacaatttctttttagttttctggtggcttccctttatccaaatttagtattgaaattcctcgagccgctgcttttctcactccataattctggccagaatttggtacttaaaatattttgtctaaaatattacaatagctacttaagtcatctccctgactccactctgttgtctttcagggcgtcgtccacactgtagccaaagtgatcttataaaaacataattctaatcatggcactcttctgcttaaaaatgttttaatggctttccgttaggttaaaatttaaaagtcctttgtagcctgtgagactctacatgagttgactccctagcttcatctttgagcatcttatttctttacttattataccatcagttagagttgattgttatataatccacagaagtgaattctgtccgatttaagcaaaaaaaaaaaaaaaaaaaaactcgag

SEQ ID NO: 173 - DNA, 879 bp, Homo sapiens
ggcacgagaaactacaaattttaaatagtatatttccagggataggttgtcctgttcctcgaattccagctgaggccaatcctttagcagatcatgtctctgctactcgaatcttgtgtggagcccttgtctttcctactattgctacaatagttggtaaattgatgttcagtagtgttaactctaatttacaaaggacaatcttgggtggaattgcgtttgttgccataaaaggagcatttaaagtttacttcaaacagcagcaatatttacgacaggcacaccgcaaaattctgaattatccagaacaagaagaagcataaaactgacttctggttgttctgcagttctctcatccttatgaatctgttgtgttgttttgattccatcattaatgcacttgtggagacttgtgataagctgctgctcctatattttttaagaaatataataaagcacttagggcaggggaaatcatctcggtaatcatggaacctaaggatgtgatttgttttcattgtttgtatgtactacttttatggcagtcatatgaaccattatcttagcatggtaaacctgggttttgttcatattttctccagacagaaatgcaaagatcaaactgtgcaaatattaaaaaaatgcacatgctgttttattcaaatgcctcttttgtacatgttcatgtttagtgttttctcagaatcagcaactcaaggtactatgaggatttttctcactgacataatttgattacatactaaataagaggatatgttaatatgaggaaatgtaaattaaattagttataaataaataaccaaaaatgtatgtaaacattcaaatgattatctgaaaaaaaaaaaaaaaaaaaaaaaa

SEQ ID NO: 174 - DNA, 352 bp, Homo sapiens
ggcacgagcaaggactggcagcagggaagccctgtgcatgtgtgccctgggaaagctctgcttgattctgcaaagctggcatcctctttaaggaagccctaggacaggccaaatggagctcttgtccaaggggtcatttctgtcttgacagatcgaaggtgccttggaatatggaatcacaagtgatgacatcttctggctgaaggaatcccctggaaaaacgtaaggcctgcgcgtgcttggtggggtcctctttttgttcaccagagtgagcactggacccttagagcctgtgctggtgctgggctcctggggctttctttccggtttacccaaaaaaaaaaaaaaaaaa

SEQ ID NO: 175 - DNA, 919 bp, Homo sapiens
ggcacagagaaaagctagccactggtattttgttttgtttaaaaaaaaaaagaaagaaagaaagaaagaaaaacggaaaggaacctagctgcctgtatctttcatttttaaaatagcacttgagttattttctgagtaatccaataaagaacttttgatgacagccagaatgtgttagaactctggctgaacatttcatctcctgtgagtcagaagggctttatttctccctttgatggggccccttcttctttctggtgctctggaarttgtttagrggaaagaattctaattttaattaattgcgcrtgagttaatctcactcgcttttctgcttccaggcatcttaggaaaaacmaatggttttagtaggcatcccttatctactaatgcttttttaaaacaaacagggacatttttattatagatttgatttttttaatgaatgtttttaaaaatatataaataggacaccaaagcggcagggttttttttggggggagggggtttgtttyccaactcaagatggcacattagtggccagcaatattttttaactcattccaaccaggaagcttttttatacattgcctaaatctacgccaaccagaaaatagtctcatctctttttttctcaaatgagatccgtgttttattttagcattaaattagttacactgtgatgactggcctattacctgactcagctccctctaccttgaaattgacatttttaaaaaatgcaactaagtggttaatagtgtgtgacgctcaaagttaatgtaaactggaaaggttgtgtgtcgttgctttttgtgttttggttaggcttggttttgttttttaatttttatactttctaataaatttgcagtttcattctttcaaaaaaaaaaaaaaaaaaaaaaaaaaactcgag

SEQ ID NO: 176 - DNA, 1165 bp, Homo sapiens
ggcacgagattttttcctttatttttgtcaaatgagtttatttgaagaaccagcctttgagctctgagattatgtcctcagtttggtctgttctgctgttaatgctaccaactgaattatgaagttcttatagtgaactttccaattccagaagttcagtttgattttttcttaaaatggctatttcttatgtcagctcttggatcattttactggattacttgggttccaaggatgggtttcaactttttcctgaatcttgatgaacttctttgtcattcagactctgaattccatttctgtcgttttaatcatttcagtctagttaagaattattgctggggagctactgggctcatttggaggtaaggggtactctggcttttagaattgccagaattcttgagctgattctttctcatctgtgtggattgatattccattaacttttgaaattgatattcttcagatggagcttttagctgttatgtttttttaatgctgttaagagtttgactgtggtataccttgggcttagttgattgtctttgtttctgacactgatgctttcagaggaacaaagctcagttcagcctccctaggcagaattctttaactctggggtactgggactgggaacacagctttattctctgtccccttaagatcaagcatttgctgcactgggggtgtgggaggatatggtgctcccagcctgctggcaacagtgctctgttggaggtttccagcagaagcactgttggggctgttgagtggccttgaacaaaacctctctgatgggtgtctgccagcaaaagcactccagtgggatggcaggggtggccaatgagagagctatggtggtggctctggtaaaagcactaacagcaggttgggtttgggttgctgcaagcaagtgtgcttcagtcaggcagcgggcaggcacaggcaaaagtgctctggcatggtggctgaggattcatggacgaaaggactccagcaggttggcagggtggccatgggtgaaagatctccattgcagcagcagggacactgcagatactctggtgtgagtaagcactctggcagggcagtggataggttccaggcaaaagcactctgatatgggtcccctatttctttgcagtaaacatttaaaaaaaaa

SEQ ID NO: 177 - DNA, 908 bp, Homo sapiens
ggcacgaggtaatggctgaggcacaaggagcgagtattttaaatcaggcttatgaatgtgctctgtggatacggtttgcccatagggaggtggttttgggggttgcgaatcatactcaagctgtccctgaccgactcaccagtattctacaaacttactacaaacctctcaaaggaccatcttggaagacactagcaagggcgtgcacaatcccctctgacgttgctggctggtggtggaggccacggagcctccctgtgtgagactgtactatgtggtcactagaatgttttgaaagacagttctctgcaggcccggcaccgtggctcacgtctgtaatcccagcattttgggaggctgaggcgggtggatcacgaggtcaagagatcgagatcaccctggccaacatggtgaaaccctgtctctactaaaaatacaaaaattagccgggcgtggtggcgggcacctgtagtcctagctactcaggaggctgaggcaggagaatggcgtgaacccgggaggcggagcttgcagtgagctgagattgcgcaactgcacttcagcctggcgatagagcgagactccatctcaaaaaaaaaaaaaaaaaaaaatagggacttactgggccggtcggggagggggaggcgggatgggacacccaacactttttccatttcttcagagggaaactcagatgtccaaactaattttaacaaacgcattaagaggtttatttgggtacatggcccgcagtggcttttgccccagaaaggggaaaggaacacgcgggtagatgatttctagcaggcaggaagtcctgtgcggtgtcaccatgagcacctccagctgtactagtgccattggaataataaatttgataaggtggtgaaaaaaaaaaaaaaaaaaaa

SEQ ID NO: 178 - DNA, 1673 bp, Homo sapiens
  misc_feature (515)..(515): n equals a,t,g, or c
tctccggataactgtgctcctgacatccttccttatggttttgggaactggtctaagatgcatacctatatcagacttaatccttaaaagaagattaattcatggaggacagatgttaaatggattggcaggtccaactgtaatgaatgcagcaccatttctctctacgacgtggttttctgcagatgaaagggccacagccacagctattgcatcaatgctcagttatcttgggggagcatgtgcatttttagttggaccacttgttgttccagctcccaatggacatcacctcttcttgctgcagagagcagcagggcgcatattaaagatcgcatagaggctgtgttatatgcagaatttggagttgtctgcttaatattttctgcaacactagcttatttcccaccccgacctcctcttcctcccagtgttgctgcagctagccagcgtgagttatcggagaagcgtttgtagattattaagcaattttcgatttttgatgattgctttanatatgccataccacttgggtatttgctggctggtctggagttctggacttaattttaacaccagcgcatgtcagccaagtagatgctggctggattggattttggtccatagttggaggctgtgttgttggaatagctatggcaaggtttgcagattttatcaggggtatgctgaaactaattcttctcctcctgttttcgggagctacactgtcatccacgtggttcaccctgaactgtttgaacagcatcacacacctacctttaaccacagtgacattgtatgcctcctgtattctcctgggagtgttcttgaatagcagcgtgcctatattttttgagctttttgtggaaactgtctacccagttccagaaggaattacttgtggagttgtcacttttttaagtaatatgtttatgggagtacttttattttttctcacattttatcatacagagttgtcttggttcaactggtgccttcccgggtcgtgtttgctcagtctcctcctcattctgtgcttcagggaatcctatgacagactctatcttgatgtggttgtctccgtttaatagcacagacttgaaggagtttaaaaggaggctggaaatcaatactgcacactgcacatttgctcagaattgcacatctaacaggaaaagagggagaagaaagaaacttcattcagaggttttgttaggttacagattatcacattaatttaattactactaggtaataataatgggagacttgagtgataataggggattttaaaactctacagatggcatacctgtgcctgcttctggggttggaagtgtgacttcttacacataaagcactacctaagtaattctctctctgttttgtgccagtgctaaactactgattacttgtaattatgaaaagaaataaagggtgtctatcatatgaagataacgccttccctaagtcacatatcagaataggaagatatgccactaacttctaaagaagttcaaaccctgtatccaattttaatgataaaatagccaagaggtatatcgatgatggaaattagccacatgtacactacattttttctaataaagccatttcttatatgaaaaaaaaaaaaaaaaaaaaaaaaaaaaaaaaaaaaaaaaaaaaaaaaa

SEQ ID NO: 179 - DNA, 709 bp, Homo sapiens
caagatccgactccctgcacagccgtcctggtatgtacagtccttcctgtttagtttatgccaggaaattaatcgggttggaggccatgccttgccaaaggtgacattacaggagatgctgaaaagctgtatggttcaagtagtagctgcctatgagaaactctccgaagaaaaacagattaagaaagaaggtgcatttccagtcacccagaaccgggcgctgcagctgctttatgatctgcgttacctcaaacagcaaccttcatcgcctgggtgcagcgaacttcttgttcctgttttgggattggtgactggtacagagaatcagctcgccccccggagcagtacgttcaactcccaagaaccccataacatcctgccactggcatccagtcagatcaggtttggacttctcccactgagcatgacaagcactcgaaaggctaaatcaaccagaaacatcgaaacaaaagctcaggttgtccccccggcacgctccacagctggtgacccgacagttcctggctccttgttcagacagcttgtcagtgaagaagacaacacgtctgcaccttcattattcaaacttggctggctctctagtatgactaagtaacatggcaacacatctgtctctccctaaataaatactaccacattatttcttctaaaaaaaaaaaaaaaaaaaaaaaaaaaaaaaaaaaaaaaa

SEQ ID NO: 180 - DNA, 2455 bp, Homo sapiens
  misc_feature (2454)..(2455): n equals a,t,g, or c
ggcacgagcttgaaagcatgaagaccagttatatagggaacaggtttctctcagtggcacattttgctttttctgagccccaaatacattgcctgggcatgaacattgttaccgtaaattgcacatggtcatggactgaattatgtgactttaaaggatgtaactgcccaacatttgcagattctgggtggtctatgtgaccatttgtctcgtatccaaaaaccccggggctattggaacccttccaacactttttcctttgtcatagacaagtttatatataacttaccaagatgttggctgtcctggtgtattgccagacagctctcttttggttcccattccaaatgtgctgctgtccttctttgcatttcacaatatcaaagaaaccaccacccttcttcctaacagcattttatgccttttattccacattaaatgggaattgtgcctacttaggagtgcccctccaattaattacatgtgtccaagaataatccaagctagagacacaaggtgggaaaacatttcaaaaaaaaaaagtcctcttaaggccagtaatttatctgaaaaggtattttatcacaccttgacaccttatatatgagcctattaggagctgcaggtggtttcatagggtaaaatccaagaaaagagaaggatgtgtggggtttctattagaagataattttgttctcattttaccttttcttttatgatccttctctgctagaacaggttaattctccaaatttgttttgttttgttttgttattttttagggaactcttttgcaaaagcaatggtcggatgtaaataacatttaaagtatagtgcacataacttccccggactgttccaatctgataatttgtaaatgctttagagtttttttaattaacacttgtgttgctaaattctatttatgtaagtctgctaaagttttttagcccacttaaaacttaagacaaccatttaaaataatggatgggttactatgagcaatttcgctttcagaacccccttgttttagtatatgaaaaagcctaatgcgcattaatgaggttgaagagactatgagaaatatgtatagtgtatattttaaaacagctttgcttgtattgtgaagatttaaaaacaaacttgagatttttaacgtaactattaacacagttttaacataagttatcccactgggtttaagagcatcttgaatgtataatcctttttgtaacccaggttggtttctacttttaccagtcacccaaacatatttatgtttttagttttatgtactcatttccctttgttttcctcaaacagcatgatttttttgcacatgtagaaattttttaaaagaaagaaattagtacatcattttctctggattttcttcacttccctcttcctttctactaactccttccttaaaggccatatcactccatttgcattatttgtgcaaatgccagggttggtttttatttttatttttgctatttacctaaaaaaagaaaatgcttcagtcaattgcttttttatttaaaaaaaaagaaaagaaaaaaagctgtaaccttatcatttctgagtagaccattgagcgatgaatgcacacctgtagtagcccaggaccagctgtggtggctaaagggaatatgttaattaagcaagaggttcttttctaaaagtggtatctgttatccacaatgtattttagttattcccacaagtcaggggtccagataaaatgagggttatcagctaactgatatgctatcattgaggttcatcaatgaatttgtacatttctagttccctttggtgaagggaaaaatgatgattttgcaagacctagattttggcttggtttcttgcctccttttttggcagccttcatcttctcatctcccaaaccccctgagcccgtagkttttcatagtggacaaagaacttgtggtcttttaaaactgggactgatacttttttgagagagtatcgtgtcgaaagtgtgatgttctaccactttaccaataactaattttaaatacacattgtcctctcgatttttggaccaaacagacgctcacagtggaggcttatcaagggttgcattggggaagaagcctctccctctctgtcagcaccagctggtaaaggtgactgtacagatgtgcattttccttttggtataaatggtccacagcactaactggtaaggcttattgtacagtatattgtcagtattcttctggttcagcataccttatagttcatatataacctgtattaattgtatagattgtgcattaaaagctgttaccaagttgtcagaacataagagcgaaaacaaggtcatatgtaatattttgtttgtaagtatcctttgtatcatagcaaaggaaatgtttaaaaaaatcaactgtaataaagtaattttagtacaaaaaaaaaaann

SEQ ID NO: 181 - DNA, 1173 bp, Homo sapiens
gaactagtggatcccccgggctgcaggaattcggcacgagccgatctgctccggccgtagtaatccgtgaagaggccgtcagggttgagcaggtagatggcaatggagtggtccacgatgtagtcctggtcctcatccttggggcctgcattgtagtacacgcggtaactgtgactagcctgggcaacctgtttggtggagccggtcagacccaacagtcttgggtggaagtcctggacgtagcgggccatggcttcaacgtcgtcccgctcggggtccacagtgatgaagacaggctgcactggaggcaaaccaggctctgcttccagctgccgcaccacctgcaccagcttctccagctcgtctgggcagatgtcagggcagtgagtgaagccaaagtacatcagcacccactggccccggaagtcagccttgcagcgagcccggcctctgtgatccagcaggtggaagtcgccctggcccacagctgcctggcgcagggcttctgttcgcttttgctgctgcagcctctccttctcagccctcagggccagccaggccccaccgagtccagccccgaacaggcctgtgatcagcagccgggttcgaagcccagggccctggggctggccctgcccacctgtctctgcagggccctgccttgacaaaagccaggacctcagatgcagggcctggcctcccagggtcccagggaggacccgaggcttgagctgagagagcctgtgccaagctgtggggctccgagtcagcagcagcatggatctgatgctcctggaaacaagcacaggcgtcaggagccagaagggaaggcccaggacagtgcctgggctgcccctgcgacttgagaccagccacccatctgaaggacccagcccacgttcaggcttaacaggcatttgcagctgctcacctgagctcagaactccacctccaccaaacatccacacctgggcaaccacacctgtcactcctgtcctctacctgggatcaccagcctgtcaccgcaccctgccctgcacctgcacctcagcaaggtgaacctcttgctgacggaaagcattccaagtgcatgccttgcctgaactaaccacgttatctatttgcaataaacccatttcttaaaaaaaaaaaaaaaaaaaaaaaaaaaaaaaa

SEQ ID NO: 182 - DNA, 1098 bp, Homo sapiens
gcgagccccaggaggcccctgattccactgctgcaggaggctcagcctcgaagcggatggcgctggtgctggaacgggtgtgcagcactctcctgggcctggaggaacacctgaatgccctggaccgggctgctggtgacggcgactgtggcaccacccacagccgtgcggccagagcaatccaggagtggctgaaggagggcccaccccctgccagccctgcccagctgctctccaagttgtctgttctgctcctggagaagatgggaggctcatctggggcgctctatggcctgttcctgactgcggctgcacagcccctgaaggccaagaccagcctcccagcctggtctgctgccatggatgccggcctggaagccatgcagaagtatggcaaggctgctccaggggacaggactatgctggattctctgtgggcagcggggcaggagctccaagcctggaagagcccaggagctgatctgttacaagtcctgaccaaagcagtcaagagtgccgaagctgcagccgaggccaccaagaatatggaagctggagccggaagagccagttatatcagctcagcacggctggagcagccagaccccggggcggtggcagctgctgccatcctccgggccatcttggaggtcttgcagagctagggtgtgtgactgcctcccttggcctcagctcctctcactgctgtgctgaggtggcctttgtcacttccttctgccttccaaccctcaccttcccccggcctggccccattggcccaccctctaagttgagcaggaaatcctccaccaagcttccagaactacagacagcacccagagtgagctggagtgggtccccatgcctctccagcatgccctttccctttgcaggagggtggagtccctgggtcatgccctcccctgccagctctgggcttcagagataaggcattttccttgtgcagcctttacctggcaatcctaatttggttttaagactccctgtgaaatgctttccgaaccttaaccccagtgagcgtgaaaaagaaagttaataaactataatacatggaagcaaaaaaaaaaaaaaaaaaaa

SEQ ID NO: 183 - DNA, 1760 bp, Homo sapiens
ggaggagctcaacagcgggaaggtgatgtacgccttctgcagagtgaaggaccccaactctggactgcccaaatttgtcctcatcaactggacaggcgaggacgtgggaccccaggccccagtgggctctgtgtaccagaagaccaatgccgtgtctgagattaaaagggttggtaaagacagcttctgggccaaagcagagaaggaggaggagaaccgtcggctggaggaaaagcggcgggccgaggaggcacagcggcagctggagcaggagcgccgggagcgtgagctgcgtgaggctgcacgccgggagcagcgctatcaggagcagggtggcgaggccagcccccagaggacgtgggagcagcagcaagaagtggtttcaaggaaccgaaatgagcaggagtctgccgtgcacccgagggagattttcaagcagaaggagagggccatgtccaccacctccatctccagtcctcagcctggcaagctgaggagccccttcctgcagaagcagctcacccaaccagagacccactttggcagagagccagctgctgccatctcaaggcccagggcagatctccctgctgaggagccggcgcccagcactcctccatgtctggtgcaggcagaagaggaggctgtgtatgaggaacctccagagcaggagaccttctacgagcagcccccactggtgcagcagcaaggtgctggctctgagcacattgaccaccacattcagggccaggggctcagtgggcaagggctctgtgcccgtgccctgtacgactaccaggcagccgacgacacagagatctcctttgaccccgagaacctcatcacgggcatcgaggtgatcgacgaaggctggtggcgtggctatgggccggatggccattttggcatgttccctgccaactacgtggagctcattgagtgaggctgagggcacatcttgcccttcccctctcagacatggcttccttattgctggaagaggaggcctgggagttgacattcagcactcttccaggaataggacccccagtgaggatgaggcctcagggctccctccggcttggcagactcagcctgtcaccccaaatgcagcaatggcctggtgattcccacacatccttcctgcatcccccgaccctcccagacagcttggctcttgcccctgacaggatactgagccaagccctgcctgtggccaagccctgagtggccactgccaagctgcggggaagggtcctgagcaggggcatctgggaggctctggctgccttctgcatttatttgccttttttctttttctcttgcttctaaggggtggtggccaccactgtttagaatgacccttgggaacagtgaacgtagagaattgtttttagcagagtttgtgaccaaagtcagagtggatcatggtggtttggcagcagggaatttgtcttgttggagcctgctctgtgctccccactccatttctctgtccctctgcctgggctatgggaagtggggatgcagatggccaagctcccaccctgggtattcaaaaacggcagacacaacatgttcctccacgcggctcactcgatgcctgcaggccccagtgtgtgcctcaactgattctgacttcaggaaaagtaacacagagtggccttggcctgttgtcttcccctattttctgtcccagctcatccgtgtctctgaagaacaaatatgcttttggaccacgaaaaaaaaaaaaaaaaaaa

SEQ ID NO: 184 - DNA, 658 bp, Homo sapiens
tcccttgcttgatgcaacactgttccaaaagagggtggagagtcctgcatcatagccaccaaatagtgaggaccggggctgaggccacacagataggggcctgatggaggagaggatagaagttgaatgtcctgatggccatgagcagttgagtggcacagcctggcaccaggagcaggtccttgtaatggagttagtgtccagtcagctgagctccaccctgatgccagtggtgagtgttcatcggcctgttaccgttagtacctgtgttccctcaccaggccatcctgtcaaacgagcccattttctccaaagtggaatctgaccaagcatgagagagatctgtctatgggaccagtggcttggattctgccacacccataaatccttgtgtgttaacttctagctgcctggggctggccctgctcagacaaatctgctccctgggcatctttggccaggcttctgccctctgcagctgggacccctcacttgcctgccatgctctgctcggcttcagtctccaggagacagtggtcacctctccctgccaatactttttttaatttgcattttttttcatttggggccaaaagtccagtgaaattgtaagcttcaaaaaaaaaaaaaaaaaaaaaaaaaaaaaaaaaaaaaaaaa

SEQ ID NO: 185 - DNA, 520 bp, Homo sapiens
ggcacgagcggagtttgagccccggaggcagagcggctgccatggccaagtacctggcccagatcattgtgatgggcgtgcaggtggtgggcagggcctttgcacgggccttgcggcaggagtttgcagccagccgggccgcagctgatgcccgaggacgcgctggacaccggtctgcagccgcttccaacctctccggcctcagcctccaggaggcacagcagattctcaacgtgtccaagctgagccctgaggaggtccagaagaactatgaacacttatttaaggtgaatgataaatccgtgggtggctccttctacctgcagtcaaaggtggtccgcgcaaaggagcgcctggatgaggaactcaaaatccaggcccaggaggacagagaaaaagggcagatgccccatacgtgactgctcggctccccccgcccaccccgccgcctctaatttatagcttggtaataaatttcttttctgcaaaaaaaaaaaaaaaaaaaaaaaaaaaaaaaaaa

SEQ ID NO: 186 - DNA, 325 bp, Homo sapiens
gcacgggaactattgatacatgcaataacctaggtggatctcaaagtcattctgctgagtgaatgattccagttacatagcattctggaaaaggcaaaactgtggtgaccaggtaacaagcatgattgccaggggttggtggtggggaaagcgtgtgactaccatggggtagtatgaggtgatttttgaggagatgaaactgttctgtgtcctcattgtggtagtggttacatgagttagtacatgtgttaaaactcatagataatacgcttccccaaggaatccatttactatacattaatttgttaaaaaaaaaaaaaaaaaa

SEQ ID NO: 187 - DNA, 1500 bp, Homo sapiens
atggactgccgtgagcccagaccttaaacgtaaacattcagcttcgcaggtactttgggctgcacacgcttctccggacccaaaagatgcacatgcttttcagaaaccgtaagtttacctggggctgtaaaaccgcacatcgcgactttgcaccgtgcacacgcttgccccgatgtgagatttcccctgggttcgcgctcgggtccgcttcttaaatacactgcctcagcggtgtggatggcacagagctgtggcagccctactgaaaccttaaacaggcttcctggggtcataaacatggataccgagacttagatcacctcccacaacttaaacgtaccccttcactccactgccttcgccccttcctgcagcattcgcatctagttgttcaaaagtgctttccgggtcctcagacatgcaccccaaggttttaaacctcacgtgcaagtactagatgggcttccctgtgcaatagggatgtcaggcgcgcagttttgcacacgattgccaagatgtgagatttactttaggttgcaccttaaccgtcgtttttaaatatgatcgtcccatcttgatgtgctgctcctgctgtggaaggtatccctgggttttaggcaagcatatgtgttctttactatggctccagatcccagcatatttgaagtcctgagtcaacctgctctcctagacaagcagacattaagtatgtcgcttgggctcttaagtgcgttctcctgacttttacccatctttgtggcagtaaatgcatacgtgtcactgtatatgcggactagatacctcaggtcccagcgccataaacaacttgtatgttgtaagtgtaccctcatctcgaaagtcacctccagctgtgcgttttaactcatctcagatgctggatgtccggtgtggtgcctgaagcccccggggcaacatccactctctgtccaactcattctaacgccaagatactcaggttttctatctgatcttctgacgactgcccaaaagtcagaatcacctgcgtgggtgaagaatcacctgcgtgggtggagaatcacctgcgtgggtggagagcaagtttgttcaggtttttctctttttaagcactcacaaaataaaattttttgtgtttgctagtattctggaaggaaagatctccttgtgcttcatagaaaatttggaaaatacctgtttgtaataagataaaaataaatcacccttataatttgttttcccccgcctggaggcgcctattacggggaaactctcgtgggtttcctgctgccaggctgtttgcggagctttcccttgtttgctttgagatgtttttggttttaaaaaacaataagtgaggtcaggcttggtggccctcgtctgtaatcccagcactttgggaggccgaggcgggcggatcacttgaggtcaggagttcgagaccagtctggccaacatggtgaaaccccatctctactaaaaaaaaaaaaaaaaaaaactcga

SEQ ID NO: 188 - DNA, 776 bp, Homo sapiens
ggcacgagtgaagtagaacatgcatgagaaagaatgcagaaatcatgaataaacagctccagaaagggatcacgcccaactaaccagcacccgaattcagagcccaccagcccccgggatcccggccacgtccactctgaccccatgcctgcaaggatagggtctctatcgtgacttctaaccccaccaggtacttttgcctctttttagaaatggaatcatacagtctgtactcttttgtgcctggtttgttttggttaacattgcgtctgggagttttatctctgtccagggttggcgaaccccagcttacaagccaaatctggtcctttgcctgttttcatatggcctgtgagctaaggatggattttatgtttttaaatagttgcgggggggggcgggggggggaggaaagaatgatattttgtgacgcgtgaaaattatatgaaattcaaatttgtgtccacaaattgactgggcatggtggctcatgcctgtaatcccagcactttgtggggccgaggtgggtgggtcacttggggccagaagtttgctaccagcctgaccaacatggttgaaaccccatctctactaaaaggtacaaaaaaatagctgggtgtggtggttgatgcctgtaatcccagctactcaggtggctgaggcaggagaatcacttgaacccgggaggcagagattgcactgagccaagattgtgccactgtacttcagcctggatgacagagtaacactgtatctcaaaaaaaaaaaaaaaaaaa

SEQ ID NO: 189 - DNA, 1681 bp, Homo sapiens
gtcagaatcaccatggccagctatccttaccggcagggctgcccaggagctgcaggacaagcaccaggagcccctccgggtagctactaccctggaccccccaatagtggagggcagtatggtagtgggctaccccctggtggtggttatgggggtcctgcccctggagggccttatggaccaccagctggtggagggccctatggacaccccaatcctgggatgttcccctctggaactccaggaggaccatatggcggtgcagctcccgggggcccctatggtcagccacctccaagttcctacggtgcccagcagcctgggctttatggacagggtggcgcccctcccaatgtggatcctgaggcctactcctggttccagtcggtggactcagatcacagtggctatatctccatgaaggagctaaagcaggccctggtcaactgcaattggtcttcattcaatgatgagacctgcctcatgatgataaacatgtttgacaagaccaagtcaggccgcatcgatgtctacggcttctcagccctgtggaaattcatccagcagtggaagaacctcttccagcagtatgaccgggaccgctcgggctccattagctacacagagctgcagcaagctctgtcccaaatgggctacaacctgagcccccagttcacccagcttctggtctcccgctactgcccacgctctgccaatcctgccatgcagcttgaccgcttcatccaggtgtgcacccagctgcaggtgctgacagaggccttccgggagaaggacacagctgtacaaggcaacatycggctcagcttcgaggacttcgtcaccatgacagcttctcggatgctatgacccaaccatctgtggagagtggagtgcaccagggacctttcctggcttcttagagtgagagaagtatgtggacatctcttcttttcctgtccctctagaagaacattctcccttgcttgatgcaacactgttccaaaagagggtggagagtcctgcatcatagccaccaaatagtgaggaccggggctgaggccacacagataggggcctgatggaggagaggatagaagttgaatgtcctgatggccatgagcagttgagtggcacagcctggcaccaggagcaggtccttgtaatggagttagtgtccagtcagctgagctccaccctgatgccagtggtgagtgttcatcggcctgttaccgttagtacctgtgttccctcaccaggccatcctgtcaaacgagcccattttctccaaagtggaatctgaccaagcatgagagagatctgtctatgggaccagtggcttggattctgccacacccataaatccttgtgtgttaacttctagctgcctggggctggccctgctcagacaaatctgctccctgggcatctttggccaggcttctgccctctgcagctgggacccctcacttgcctgccatgctctgctcggcttcagtctccaggagacagtggtcacctctccctgccaatactttttttaatttgcattttttttcatttggggccaaaagtccagtgaaattgtaagcttcaataaaaggatgaaactctggaaaaaaaaaaaaaaaaaaaaaaaaaaaaaaaaaactcgtagggggggcccgtacccaatcgcctcatc

SEQ ID NO: 190 - DNA, 2576 bp, Homo sapiens
agctttcctgtaccttctctgcaggtagatgggacaaatgagtgtccggatcagcgggagtgggaaattgaaatactacaaagatctgtttaatcctgataccaactaatctccctttcaagggagagtctgggaagctgtacagctcatttatttttaaactttttctgtttacagagatctgttggtaatctgaggatttttattctacgtcgtcttgacagatggaaaacctgaagtaacttcgggctaaccttgtgtttttggaaaattagtagacttggtggtgaagaaactgggaggagtaggatattagctaactttgcatagccacatatagagcgtcgcagctgcattccaccaaagaggaaccaaaaggcctgtggtgttcccagggtacatattcatgccagaagtgaagtgcttggtgaattcgtttcctgaaagtttatcgcatacttgtactgggttaggtttttagaacttcagccataaaaatgggcagaattttccttgatcatatcggtggtacccgtctgttttcttgtgcaaactgtgatacgatcctgaccaaccgctcagaactcatctccactcgtttcacaggcgccactggcagagcatttctttttaacaaggtagttaacctgcagtacagygaagttcaagatcgggtcatgctcactggccgccacatggttcgagatgtgagctgcaaaaactgcaatagcaaactgggatggatctatgagtttgccactgaagacagccagcgatataaggaaggccgcgtgatcctggaacgtgctctagttcgagagagtgagggctttgaggagcatgtaccatctgataactcttgaagatacagagagaaatccatcttttcccaggtctccttcactgaaaacaaaaatctacttacatacactgtcaccttagcatcagagtcggattaatgaactgcggaacaagaggttgtgagaatctaagatggaacctttctttctttctttctttttttttaaattttgtattttccatccaacagcagtgtgtagagagaatattatgcagatgccgttaattttttaccctatgtttacatcttgaggcagcagagtctgtctgcagctatgtggtgagctatgtaaggaaaaaaatctgggctgttagagtgaaaaagtgtgttttatgtcaattgtgaaaggaaaatgttaggagtatggtttttaaacttgggcttcattttaaacttttttttttaaacccagttatttcacttgatttgctagcttcagagaagagatccgaatctgtgcccagcgctaaaggctcagtgttagcatggcttgtgctggccggtgtgccatattcttgttggagatgaaccgtagcaccagagcccattcttccttgtcagtcttggcccaaagatgtcaccattcctagttatttgtcaccacataattggtgttgattggaaactttttctgagatgggacagaactgctgggttgtctttttccatgtaacttaagcatagtaatataaataaagtaatagttggatgcttttggtcctgtgttgcttttaaaaacaccttataaaagaggagagtatttgataagcaattttcatagtagtaaagttttttttcatctcttaaactaaattgaccatgcatataatattctttgtttaaatgaaagcatactgttgaaacccgcagtgttgcatttagaaaacagttgaacagaatgtcaatgtgcattcatgcaaaaaaacatttaatctgcatctgttttagaaaagggggaaatgaagcaacttgtctaaaaatactgctttacaaagcatttcagcctttccccctcagttttgcattgattttttgacaagtctgtagagcctaatagtttccatcaaaggcctagatctcttatttagcatttttttcagctcttctctcagaagttcagctgttgaaacgaaaactgtactttgtaccctcacatacaaagggatcaaatttgacctggtgttattttagccccaaatttatgacattacacaatattaaaatgtaaatgtttctttacccaaactacttctagatattctagtatttgcttctggtggaattaaatgacggtaaaattggctaattatttgaatgaatgaatggatggatgttttgcatgctcaatttctaggtcctttgtctagaaaggaaatttgcctcagttgaattagtgaaatatttctgtcgttgatattaaaagtgacttctgagtacagttaagttcctcctatttgccactgggctgttggttagaagcataggtaactgattaagtaggtatgatactgcatttgaaataagtggacacaaactatcctttctccaccatggactcaatctgagaacaacagcattcatttccattcatttccatactggcttttgattatatgcagattcctagtagcatgccttacctacarcactatgtgcatttgctgtcacaataaagtatattttgtcttgcaaaaaaaaaaaaaaaaaactcgag

SEQ ID NO: 191 - DNA, 595 bp, Homo sapiens
cacgagcggcacgagagcaagcaagacacaactgagacagatgtaccaggtgaaaaaaatcttcagtatggatacacatgggtattctgaaggctacaatgaatggtttagtctttgacataaggaggatgaacatattatttatactgtgtaatctaatctggcttctatggggaaagcaacatgtacataagtgaattttctacatgaagtgggctacttctgattttaatcaaagctataaaatagattgtatatttcactagcttcttaaagtaactcttccattttcatttatctctaaaaacagttaacttcctgtgctctaggaaatgcaccaataccaaaggtcaatgtggaaatatgggcatgtttgcccctatgctgtgtggtctctagatttctatatttgctttgcttttgtctgctctagtaatctccctccttttgatctgtggcctgggaaaatgtggtttctttgtatttcaaataaaagtaaaatagttttttgagtggttcactcaagagtaaaaaaaaaaaaaaaaaaaaaaaaaaaaaaaaaaaaaaaaaaaaaaaaaaaaaaaaaaaaaaaaaa

SEQ ID NO: 192 - DNA, 349 bp, Homo sapiens
ggcacgaggtcaaaactaagaaattactactgctgtaagactgctaactaaactatgcatattcgaattgcaccagtttttccattaatgtccttttgctgttctaggacagcatattgagtttagtgcaacttgcctttatgctttattttaatgcccttgaattctcatctgttattagtgagtctcttatttatctctttgttttgagcttccttctctgctgttggtatgttgctttaatggagaggttgcatcaaccttcatttttttttttgagacagcctgggcaacagagggagacttcatctcaaaaaaaaaaaaaaaaaaaaaaaaaaaaaaactcgag

SEQ ID NO: 193 - DNA, 1019 bp, Homo sapiens
  misc_feature (1)..(1): n equals a,t,g, or c
ntggtgggatttttgtataaagtaagagataaggatccagtttcattcttctacatgtggcttgccagttttcctagcaccatttattgaatagggtgtcctttccccactgtatgtttttgtatgctttgtcaaagatcagttggctataagtatttggctttatttctgggttgtctgttctgttccattggtctatgtacctgttgttatactagccccatgctattttggtaactatagcattgtagtatattttgaagttgaataatgtgatgcccccagatttgtyctttttgcttagtactgctttggctatttgggctcttttttggtgccatatggattttaggattgtttctgattgacaaaggtattttgatgggagttctgtgaagagtgatggtggtatcttgataagaactgcattgaatctgtagcttgctttaggcagtatggtcattttcacaatattgattctacccatccatgagcatgggatatgtttccatttgttkgtgtcatctatgatttctttcaatagtgttttatagtttttcttgtagagctattttacctccttggttaagtataaccataagtattttattttattttttttgcagctgttataaaaggaatggaattgttgatttgattcttagcttggccgttgttggtgtatagcagtgctactgatttgtgtacattgattttctatctggagaatttactgaattcatttattagatctaagagctttttggatgagtctttagagttttctaggtaaatggtcatatcattggtggacagtgacagtttgacctccttttttccaatttggatgccctttcttttctgtctgattgctgtggctaggacttccattactatgttgaatagaagtggtgaaagtgggtaaccttgtcttgttccagttttcaggggcgtaggcaaagaattcatgactaagaacccaaaagcaaatgcaacaaaaaaaaaaaaaaaaaactcga

SEQ ID NO: 194 - DNA, 214 bp, Homo sapiens
ggcacgagctcgtgccgaattcggcacgagaggacggaggcttttggaccctcggaccccatcccactcagccaagtgtctttctgtgtctggggggaggaggggatgatatccgtgtggttcgatgtattatttttaagctccgtgagtgcgtgggtcagtgtctgcatgaagtggaataaactgcccaccgccaaaaaaaaaaaaaaaaaaa

SEQ ID NO: 195 - DNA, 1057 bp, Homo sapiens
ggcacgagccttcttcaagaaaggctgtccaactagctctcacttcctctcgtgtgttcagtgtcacccggaagcagagtttaatgtgactaaagtcaacattggctcacactgtcagggagtgtgggaagatgagtaaggactcatcgcagggcgatacccacagcttaaaataggcaccttcccctcccaggtctggttagggcagttgttacatatgaggggcgtggagttttgtcttgtattttggccttgttggtaaagcattccaaagcttcgacacaccctcctttcagcccattaggaaaggctgttgattgtaatattcacacagctccctgggctatggttaagagccttgcagaaggactgggagaagccctgtgtgtttgaagtattgtagcatcagaaaaaaacaccggaagaaggcaggtggggacaaggtgcctatgtctgctccttggaattcctttccttactgtccgaggcaactacagggaaagcaaagcgtgagcccccaaatccacacctgggaggaacgttcccctttgcaaggcatgggactggctggccctgtgtctcacgggggctctgagttttgaggtcacactagcctcctgaggcctggctgagagggctgggttgggggtcaggaggccccctgtagccacgaagcttcctctggggcattgttaaaggttcaccctctttttttgtggggtatcctggaagatctcaagaaactgagcttggaagaagagaggctgagagggtctcccgccgcctgcgttctctgcagctatggccccacagcctccagtgaccatggaggggaaggtgccacccgccttggctgctgaaagggtgatgctcttatgcctgagtcttggctcctgtggtcctgcagagaccctgtgggggccgcccggtcgtcacctgcactcatcttgggttttccttccttttccaccctaagctgaaggtatttttttcctgttttcttcactctaacttggggaagaaggaagatcctttatggaaaaaaaaaaaaaaaaaa

SEQ ID NO: 196 - DNA, 1287 bp, Homo sapiens
  misc_feature (1287)..(1287): n equals a,t,g, or c
ggcacgaggcamgatggccaccaccaagcgcgtcttgtacgtgggtggactggcagaggaagtggacgacaaagttcttcatgctgcgttcattccttttggagacatcacagatattcagattcctctggattatgaaacagaaaagcaccgaggatttgcttttgttgaatttgagttggcagaggatgctgcagcagctatcgacaacatgaatgaatctgagctttttggacgtacaattcgtgtcaatttggccaaaccaatgagaattaaggaaggctcttccaggccagtttggtcagatgatgactggttgaagaagttttctgggaagacgcttgaagagaataaagaggaagaagggtcagagcctcccaaagcagagacccaggagggagagcccattgctaaaaaggcccgctcaaatcctcaggtgtacatggacatcaagattgggaacaagccggctggccgcatccagatgctcctgcgttctgatgtcgtgcccatgacagcagagaatttccgctgcctgtgcactcatgaaaagggctttggctttaagggaagcagcttccaccgcatcatcccccagttcatgtgccagggcggtgatttcacaaaccacaatggcactgggggcaagtccatctatgggaagaagttcgatgatgaaaactttatcctcaagcatacgggaccaggtctactatccatggccaactctggcccaaacaccaatggctctcagttcttcctgacatgtgacaagacagactggctggatggcaagcatgtggtgtttggagaggtcaccgaaggcctagatgtcttgcggcaaattgaggcccagggcagcaaggacgggaagccaaagcagaaggtgatcatcgccgactgtggggagtacgtgtgaggcggcactctctctgcttccccctccgctcttgaccctgcatatccaggaaggaactgccagcctcagaggaggcagcaccgagggtgcctgtttgaagcaagcagcatttgggatatgtgcccttcctcagggtctgcttggagcagctcctctgcaggcacagcctggactattcccaggcacagctgtgggcccaggagccagctcaggtgctcccctccaccatgggcaggctgtgcaaaaagcactggcttttctcagcatttgctgctgggcctctcctgggactaccagtgtggctcttacgtgttttctttgctaaaataaaccctagttcttawaaaaaaaaaaaaaaaaggcggccn

SEQ ID NO: 197 - DNA, 762 bp, Homo sapiens
ggcacgaggtgacttcgctcatcacggtcagtcattccttctcctttccagggtgctgggggctggggttccctggcccaagggtccagcctcctctcaccccattccaggtggcatactgcagtctggctctttctcccctccctccccacccaagcctcacctccccaccccttgaacccccatgcaatgagcttctaactcagagctgatgaacaaaagcccccccacccccaatgcctgcctcctcactcctccgtcgctgcccttcacaccttttggtgctacccctccccagagttaagcatggatgtctcctgatcccaggctgggacccctacccccaccccctttgatcctttctacttccacggtgaaaggactgaggtcggactacagagggaagagggacttcccttgactgggttgtgtttcttttcctgcctcagcccagctctgcaaatcccctccccctgcccctcacctccccaggctcaccttgccatgccaggtggtttggggaccaagatgttgggggggtgaatcaggatcctaatggtgctgccctatttatacctgggtctgtattaaaagggaaagtcccccctgttgtagatttcatctgcttcctccttagggaaggctgggatatgatgagagattccagcccaagcccggccccccaccgccaggccatagggcataatttgcatctcaaatctgagaataaactgatgaactgtgaaaaaaaaaaaaaaaaaa

SEQ ID NO: 198 - DNA, 2186 bp, Homo sapiens
  misc_feature (174)..(174): n equals a,t,g, or c
cgcccggtgcactgtggacgatgagtcagggttaggggcgccaggacgcgggcgtgcaggacgccagagctgggtcagagctcgagccagcggcgcccggagagattcggagatgcaggcggctcggatggccgcgagcttggggcggcagctgctgaggctcgggggcggaanctcgcggctcacggcgctcctggggcagccccggcccggccctgcccggcggccctatgccgggggtgccgctcagctggctctggacaagtcagattcccacccctctgacgctctgaccaggaaaaaaccggccaaggcggaatctaagtcctttgctgtgggaatgttcaaaggccagctcaccacagatcaggtgttcccatacccgtccgtgctcaacgaagagcagacacagtttcttaaagagctggtggagcctgtgtcccgtttcttcgaggaagtgaacgatcccgccaagaatgacgctctggagatggtggaggagaccacttggcagggcctcaaggagctgggggcctttggtctgcaagtgcccagtgagctgggtggtgtgggcctttgcaacacccagtacgcccgtttggtggagatcgtgggcatgcatgaccttggcgtgggcattaccctgggggcccatcagagcatcggtttcaaaggcatcctgctctttggcacaaaggcccagaaagaaaaatacctccccaagctggcatctggggagactgtggccgctttctgtctaaccgagccctcaagcgggtcagatgcagcctccatccgaacctctgctgtgcccagcccctgtggaaaatactataccctcaatggaagcaagctttggatcagtaatgggggcctagcagacatcttcacggtctttgccaagacaccagttacagatccagccacaggagccgtgaaggagaagatcacagcttttgtggtggagaggggcttcgggggcattacccatgggccccctgagaagaagatgggcatcaaggcttcaaacacagcagaggtgttctttgatggagtacgggtgccatcggagaacgtgctgggtgaggttgggagtggcttcaaggttgccatgcacatcctcaacaatggaaggtttggcatggctgcggccctggcaggtaccatgagaggcatcattgctaaggcggtagatcatgccactaatcgtacccagtttggggagaaaattcacaactttgggctgatccaggagaagctggcacggatggttatgctgcagtatgtaactgagtccatggcttacatggtgagtgctaacatggaccagggagccacggacttccagatagaggccgccatcagcaaaatctttggctcggaggcagcctggaaggtgacagatgaatgcatccaaatcatggggggtatgggcttcatgaaggaacctggagtagagcgtgtgctccgagatcttcgcatcttccggatctttgaggggacaaatgacattcttcggctgtttgtggctctgcagggctgtatggcgggcagggctgggcagcggcctgagtctcagcggacttgtccacccggagttgagtcggagtggcgagctggcagtacgggctctggagcagtttgccactgtggtggaggccaagctgataaaacacaagaaggggattgtcaatgaacagtttctgctgcagcggctggcagacggggccatcgacctctatgccatggtggtggttctctcgagggcctcaagatccctgagtgagggccaccccacggcccagcatgagaaaatgctctgtgacacctggtgtatcgaggctgcagctcggatccgagagggcatggccgccctgcagtctgacccctggcagcaagagctctaccgcaacttcaaaagcatctccaaggccttggtggagcggggtggtgtggtcaccagcaacccacttggcttctgaatactcccggccagggcctgtcccagttatgtgccttccctcaagccaaagccgaagcccctttccttaaggccctggtttgtcccgaaggggcctagtgttcccagcactgtgcctgctctcaagagcacttactgcctcgcaaataataaaaatttctagccagtcaaaaaaaaaaaaaaaaaaaaaaaaaaaaaaaaaaag

SEQ ID NO: 199 - DNA, 1889 bp, Homo sapiens
  misc_feature (1859)..(1859): n equals a,t,g, or c
  misc_feature (1864)..(1864): n equals a,t,g, or c
gttctgattatgctgccttcacaaaacactctaagtgacctaagtggttatgaagcaaatgcatttatggtgaaaacagtctttgctcattgctttctcttgtttcatttagtgacaaatgatcaagatgacttgattttttttccttcttaacaatgtcttttttatttaaaccaaaggtgaagccagtgtactttctcagtgagttctctgcataaagactaatcagtgggaccaggtaaaaaggtcatataatacattgtggagattgcttacttaatacttctgaaaaatggagtaagggagaaactgtaatgttgcaatatgaacctcccattgggccttccatagggaaagctgtgactactctgaaatggaacctagcattatatccttgtagggtagattataaatcatttccagttcatttctcttagaggtgattacctctagccatcagccttactccatcccatgtttggtatgcaatttgagccacaaggctcgtatcgccaacagctatatacattttgttccatttttctgtcttacagagccatgataraactgtggttagtgagttaaaattcctggagtaactactgtttttctcctttgaaacttaggtttctaaagttgcacctaaggaatctgtcacattttctgttgaatcatggtttttgtttttgtttttaacagatattccttctgatacggacttgaaaattagtgtatggtgacctgtgtttaaaaaaaaaagtacaatacaactacatatagctatatagcttaatgagacttccacccccccccttttttttttttggtttgttgttgttgtagtagtctggtgctggccacatttaagtcttaaaaatttttaaattttgytgttgatgtttgtagacagccctgttgttgaaatcatggctttattcattttatttattttttaaacttgcctgaatttgttctaaaggaatatttaagagacataattttcttctctttaccataacattacacaaaactttttcctaaaacacggttgtgaggtactgatgaggtgtaagtggagctgttaaaaacagcagtgctgtattgyagttatgtatattcgtgtacagtatgtttagatcccaggtaaacatattcttttctgagaggataaatacctgcattcagatattccaggtaaatataattgagtcagggagtagtaaatctgatggagaattcactttggggaggggaaaaagaatagtatgcaagacccttattggcttttaattatacctgaaaccaaaatggatatttttagtctctctgcatgtgagatttggtgtaacaagatagaactataatatatacagtatatggaaggatagatatagtgctttgttcattttaattgcaaagctgccaaaatagttgaagcttaattacttgacttgccttgatttataggactggggcttggagaaaatgagcagatgttcctctaagacatcgattacagaagccttatatacatggatttgattttgtatttgtagctgaaagtcactgttgtctaaaactaacttttctaagttatcaaaacaacctaatttcttttccaacaaggagaacttaatggcatgaaggattgtgtgacacattggaaaagccagcttactgccactctcttcctttggccattagagggaggtgttgcctttcattgacgcttagaagcaaattgttcacttgttaagaaaagtaaatccttaaaaaaaaaaaaaaaataaccaatttttcttaatacccagaagggattttactcaatatttccctaggtaaggaaagggggggttatnttccncttaaaaccccaccgtgtattacaa

SEQ ID NO: 200 - DNA, 1053 bp, Homo sapiens
ggcacgagcccggatggaagctccggccgcggagtgatggtggcctcagcgaagatgggccgggcagggaccatggcggtggcagcagagcttcgagagctgtgcccaggagtgaacaaccagccctacctctgtgagagtggtcactgctgcggggagactggctgctgcacctactactatgagctctggtggttctggctgctctggactgtcctcatcctctttagctgctgttgcgccttccgccaccgacgagctaaactcaggctgcaacaacagcagcggcagcgtcgaaatcaacttgttggcctatcatggggcatgccatggggctggtcctttccctaccggttcactgcttgaccttcgcttcctcagcaccttcaagcccccagcctacgaggatgtggttcaccgcccaggcacaccaccccccccttatactgtggccccaggccgccccttgactgcttccagtgaacaaacctgctgttcctcctcatccagctgccctgcccactttgaaggaacaaatgtggaaggtgtttcctcccaccagagtgcccccccccatcaggagggtgagcccggggcaggggtgacccctgcctccacacccccctcctgccgctatcgccgtttaactggcgactccggtattgagctctgcccttgtcctgcctccggtgagggtgagccagtcaaggaggtgagggttagtgccaccctgccagatctggaggactactccccgtgtgcactacccccagagtctgtaccgcagatctttcccatggggctgtcttccagtgaaggggacatcccataagtagttttgagagggtggatgggttacttgcccaccagaaacagccctagtcccaactccttgcgttcctttggcccctccctgcctacctagaatctgcctgaaagggctggagaggggcagtattgggggactgtgctagctttacccccgcaggacatacacaggagcctttgatctcattaaagagatgtgaaccagctaaaaaaaaaaaaaaaaaa

SEQ ID NO: 201 - DNA, 1954 bp, Homo sapiens
ggcacgagcggcacgagcttgagttagaagaacctcagctctgtagtgatcttattttactgttttcccaggatagaatgcccttggtaccacatactgtatgcagagtatttatgattgcttgagtacagttccttggaaaggacacaaggggtttcataaagcggtactaaaaatctgcttttctccctagcatttaccaacaaccttgcgatccgatggcttgaaataatggtcagagtgcatgttacccaacttctcctggctgctcctactctgtcacactgcacacagatcatgcccgccaccaccctacactccccgacctcacccaccagtcagacagtttaagtcctgctgacgcaccaggcgtgtgttggctcgtggttgtacttttcatgagtagcagggaagatacactccaggaaggygggatacaaattattgaactgtgtgacttaaaagctccagtgagtttcgtcggaagtataggagtttgaaagtgctccccagtcaaacccagaactacatagggtcagccgtggttgagctaatttctgcttacacatgtgtggagggtgtcattttctgactacgcctaggcctgagtggacagccgattaaaagatgtaaattcgtggattgtatcaaggagagcgggttccatctttgtggtcaggagggggcccactcttttgttccgcaaagggtttatctggatgttccttgctggaagttgcttttccagtttggatcaaaccacttaagtggagctccagcctcagtccttgcaataaaaaaaaaaaagtcctggaaagccagaattttgctaatatcttacatagaatctcaatgatgggaattgggagtagaaggcagagagtggtgcttggctgatggaagttaaaagttgggttaataataaactacatttatatatcagttaacagcttgctaagtgcccacatattatttgagcttcatacttgcttgctgagaaagaatggctattattatcattatcatcattaccactttccattttatagataacaaaattgaggctctgagaatttaaagagattttccccaaatcattaaacggtgacttctgaatctggatatatgacaagacctctgtccccagtccccttgctttcacctctataatatatagtagctaagctcagctttctgagaacttccctgkcttatgtcatatttgacattataggagaattgaagatgttttgtaagtacatactttgtttactacctcagtagccagtataacaaatggcactgaagttttatgctttgcttgctaaaaccagcaccatttgtgaaacaggtcttggctccgagttacccttaaatgtaactcctttattataaaatcatttgcaargagctgcagagawcaaggaatasactcttcccacttccctaatgccaggtagtactatgacaggacttcatagtaccacttcttcaacaaaataagtgtctgcagtgaaatatttgttaaaatgcacatttctcagtgaatatatttcttttaaaactgaaaaaaatagtacctaacggaaattttatcattgctttaaaatgtattttaatgaagatattaaaaaatacctttgatggattcttcaatattgtcgaactgctcaaaatgattatactgttatatgaagtctaaaatctttcatgcaacttacaagaatatttttgttgtatgcaacacagttggaaaattctagtgggaccatgtccatgcaattactgattatgtaatgctgtaaatttttgataagcatgttccaagttttcctgttctaaaaacaaaaacattaaaatcacccactgttgaagacaaaagatcattactttattaggagatattattagatatgtttagaactagttaaaaaaaaaaaaaaaaaaactcgag

SEQ ID NO: 202 - DNA, 464 bp, Homo sapiens
cggcacgagctggtttctacatggaagactaaactcatgcttattgctaaatgtggtctttgccaactaaatttaagatgcagcattttagaaatttacatatcaatgtttctacagtattgtttgctaatttttaaataaagtcatgatcagtgtgcatttgtgattatatgtgtactcattctcttacctagcgaacaagatcttttcagagtggtgtttctaaaagagcatgtacaaaagtggcctgtggacatttaggcctgggtgatgcatttgctcttcctgtttgtgccaatgtatcaatgtagagttgctctgttttcttcaactgtatttattgctgcatttctcagcataaacttatcccattgtattttttataaataaatattttttttgaactttaaaaaaaaaaaaaaaaaaaaaaaaaaaaaaaaaaaaaaaaaaaaaaaaaaaaaaaa

SEQ ID NO: 203 - DNA, 956 bp, Homo sapiens
aatttcccccaggtccctgcaggtaatccagggaccccatagggagaacaggctgactggggcattaggaatgtttgtacctctctgcttccctggcagcctggggaagggtgcagggctcagtgcgctaaaccatggtaaacatcttcaatagaactaccctagaatttagtgagtgtgagactgagatattgctcagaataaatttattccatagccatttaggattgcatgttctggacaaaccttgtccagtatgttttctgtttgagctttttcattcttttgttaagccaacaagttgagaatttggccctgctgggatccatgtagtgggcactagctgctctttggccaaggccttcataaatgattcagtctctcattatctgtcctctagccccacaccctgatttagaccgtggcaaaggaagaacttgaggtcaagaccaaccaaatctgtgaattaaagctgttatttttttctctgcaagggcgctttgcttcaggtctgggctatgtgcagaacctaagcaggctgtgagagttagaagaggcagtattacatgttaggcccagaacaccatgggaaaaggtttatgtagtgtatcttagtggcctgcctagctgcctctggggccaggctgacttctgatgtccacattagctcgtacctgaaccctgttgctgaatgccagccctgttctcctgtaactattatatacgccatggcctggggggcattgaaggaagtaagctctcagagatcctaacactggctgggaacctctgactcagagcatgtctttaaagagtccacatctggccaggcgcggtggcacatgcctgtaatcccagcactttgggaggccgaggcgggtggatcacgaggtcaggagtttgagaccagcctggcaacatagtgaaaccccatctctaataaaaaaaaaaaaaaa

SEQ ID NO: 204 - DNA, 1764 bp, Homo sapiens
cccgggtttttctgttgctctccgagactggggggggattgtttcttcttttccttgtctttgaacttccttggaggagagcttgggagacgtcccggggccaggctacggacttgcggacgagccccccagtcctgggagccggccgccctcggtctggtgtaagcacacatgcacgattaaagaggagacgccgggaccccctgcccgatcgcgcgcggcctccgccaccgctcctgccgcaaggggcctggactgcaggcctgacctgctccctgctccgtgtctgtcctaggacgtcccctcccgctccccgatggtggcgtggacatggttatttatctctgctccttcttgcctggaggagggcagtgccagccctggggttctgggattccagccctcctggagccttttgttccccatgtggtctcagtgacccgtccccctgacagtgggctcggggagctgcatcacccagccttccccttctccgactgcagggtctgatgtcatcattgacagcctttgcttcgtgggggcctggcagggcccctgcctccccgacccccgacccactgcaaatccccgttcccctgcactcctcttctcccagcccatccctccggcccctgtgcctctgcggccccagcccagctcccagggccgtcacctgcttggccctggcccagctccctgccctgagtcctgagccagtgcctggtgtttcctgggctcggtactgggcccccaggccatccaggctttgccacggccagttggtcctccctggggaactgggtgcgggtggagtactgggaggcaggaggtggcccggggaggccttgtggctcctcccctcgctcctcgccctgggcctcagcttcctcatcaatagaaaggatgtgttcggggtgggggcgtcaggtgagaacgtttgctgggaaggagaggacttggggcatggcctctggggccacccttcctggaactcagagaggaaggtccgggccctcgggaagccttggacagaaccctccaccccgcagaccaggcgtcgtgtgtgtgtgggagagaaggaggcccgtgttgagctcagggagaccccggtgtgtccgttctttagcaatataacctacccagtgcgtgccgagcaggcttggtggggaagggacttgagctgggcaagtcctggcctggcacccgcagccgtctcccttccgtggcccagggaggtgtttgctgtccgaaggacctgggccggcccatgggagcctggggttctgtccagataggaccagggggtctcactttggccaccagttcttcggccagcacctctgccctccagaacctgcagcctggaggggtgaggggacaaccacccctctttcctccaggttggcaggggaccctcttctcccgtctgcctgcgggttgcccgcctcctccagagacttgcccaagggcccatcaccactggcctctgggcacttgtgctgagactctgggacccaggcagctgccaccttgtcaccatgagagaatttggggagtgcttgcatgctagccagcaggctcctgtctgggtgccacggggccagcattttggagggagcttccttccttccttcctggacaggtcgtcatgatggatgcactgactgaccgtctggggctcaggctggtgtgggatgcagccggccgatgagaaaataaagccatattgaatgatcaaaaaaaaaaaaaaaaaaaaaaaaaaaa

SEQ ID NO: 205 - DNA, 1743 bp, Homo sapiens
ggagaagagagaggcaagggcaggagtgaaggagagagctgaagcctggggctccgagatggtcagaggatgggagacggggcagtgaaacaaggcttcttgtatcttcagcagcagcagacgtttggaaagaaatggcgccgcttcggcgcctcactgtatggagggtcggactgcgccttggcccggctggagctgcaggagggcccggagaagcctcgtcggtgtgaggctgcccggaaggtcatccgcctcagtgactgcctgcgggtggccgaggccggcggagaggccagcagcccccgggacaccagtgccttcttcctggagaccaaggagcgcctgtacctcctggcggcccctgcagcggagcgcggcgactgggtgcaggccatctgcctcctggccttccccgggcagaggaaggagctctcggggccagagggaaagcagagccggcccttcatggggaaatctaattgtacagcttgcgcagtcacagtcggcccccacaaggaatttgctgtgaccatgagacctacagaagccagtgaaaggtgccacctgcgggggtcctataccctccgggctggggaaagtgccctggagctgtggggtgggcccaagccagggacccagctgtacgactggccctacaggtttctgcggcgctttgggcgggacaaggccgtcgctgcgtctctggagagggcaactttgagttcgaaacccggcaaggcaatgagatcttcttggccctggaagaggccatctctgcccagaagaatgctgcacccgctacaccccaaccgcagccagccacaatccccgcctcgctgccccggcctgatagcccctactctcggccgcatgactcactgccgccgccttcacccaccacaccggtgcctgctccacggcctcggggccaggagggggagtatgccgtgcccttcgatgcggtggcccgttccttggggaagaacttcaggggcatcttggcagtccctcctcagctcctggccgacccttctgtacgacagcattgaggagaccctgccccctcgacctgaccacatatacgatgagcccgagggagtggctgccctgtccctctatgacagcccgcaggagccccggggtgaggcatggaggaggcaggcgacagctgacagggaccctgctggcctccagcatgtccagccagctgggcaggatttctctgcttctggctggcagccaggaactgagtatgacaatgttgtactaaagaaaggcccaaagtgacagaggcagcagagggatggtccaccgccccttggcttctgctggtgactcctcctggccactgcatcagaagaacctcctctgccccttctggagcccgaggcctggcctgtcttcgttggggctgataaattgcctctcccagggcctgctgggtgagtcaccatcccaaagcaggaagggtgccctggagagaaccaccctcctcctactctttttccacttcctcctctttctttccccagctgaggaggaacctggggcatttagggcagaggacaaaaggatgtcagcaattgcttgggctgcttggctatgcaagcctcctgcctgctgatggccacttcagggacagcctgggcccaggcacccagggggatggcggcagcttcctgcacctttcagatttcttggtggcaattaaagcattttcagaacaaaaaaaaaaaaaaaaaa

SEQ ID NO: 206 - DNA, 825 bp, Homo sapiens
ccacgcgtccgtgctgaggtagaggcagcgcaagaagaggcctttgccgctggtcgggattgggatgtcgaagaacacagtgtgcgtcggcccgcttccggaaggtggacgtggatgaatatgacgagaacaagttcgtggacgaagaagatgggggcgacggccaggccgggcccgacgaggggtaggtgggactcctgcctgcggcaatgatccttgcattcaccgccctccccaccccagcccagcccagcccgcccttctcctggggacccgggagcctgcaggatccgcggggcaccggcgcggagctgccctctcaacctgcggcttaacctgtctctttgggatcgcccgctctgaaaaggcaagggggaatcccccgtttcctacccagtcggcaggaaacgcgaaggtcccactcttggaaacctgccctcccccgcgcgccttccacgcccccagattcctcaggttggacccgaatgcctgcctgcctcgggaactggtcccgccggccgcgccctcgcggcgctttggggaagcggtcccttgctggtggggaaggctggtgccgaacgccttagtttttcttcctagaactctgatttcctggggtcacattagctccagaaatttctgattgtggggaacctgcatctttccttagtggttttgttttttgttgtgtttttgttattggtagcgttaacgtagtttattccttaccggggggcggggggagatgggactgttcgaaaattgagggtccctgtgctttcagcccattggcctttttaaaaaaaaaaaaaaaaaaaaaaaaaa

SEQ ID NO: 207 - DNA, 2221 bp, Homo sapiens
ccttgtcctcggcttggaacatagcttctcttttatatggttaacaaatgcctatttgtttggtggcctggcaaacgaaagcgaagattcaaacaataatgttcccagatatttaaatgatttttatgagttggagctacagcatggctctggtgttgtgggttggagcattccagtgactaaaggggttgtgccttctccaagagaatcccacacagctgttatatattgcaaaaaagattctggaagtcctaaaatgtatgtttttggtggaatgtgtggtgctcgcctggatgacctatggcagcttgacttagaaactatgtcatggtcaaaaccagaaactaaagggacagtgccacttccacgaagccttcatacagmcagtgttataggaaacaagatgtacatttttggtggatgggtcccacataagggggaaaatactgagacttcacctcatgattgtgaatggagatgtaccagttcattttcttacctaaatctggatacaacagagtggaccaccctagtatcagattctcaggaagataaaaaaaattcaagaccaagaccaagagctggccactgtgctgttgcaatcggcactcgattgtatttttggagtggaagagatggctacaaaaaagcactgaatagtcaagtttgctgcaaggatctttggtatcttgatactgagaaaccaccggcaccatctcaagtacagctgatcaaagccactaccaactcctttcatgtcaagtgggatgaagtgtctacagttgagggctatcttttgcagttgagtacagacttgccataccaagctgcatcatcagattcttcagcagcaccaaatatgcaaggagtcaggatggaccctcacagacaaggcagtaataacatcgttcctaacagtatcaatgatacaataaacagcacaaaaactgaacagccagccacaaaagaaacttcaatgaaaaacaaaccagactttaaagcactgacggattctaatgccattttatatccatctttggcatcaaatgcttctaatcataatagtcatgtggtggatatgctaaggaaaaatgaaggtcctcacacttcagcaaatgtaggtgttctaagtagttgcctggatgtaagaacagtaattcctgaaacatctgtatccagtactgtttccagcacacaaactatggtaacccagcagaccattaaaactgaatcatccagtacaaatggggcagttgttaaagatgaaacttcactaacaacattcagtaccaaatctgaagttgatgaaacatatgcactgcctgcaacgaagatcagccgtgtagagacacatgctacagcaacgccgttttctaaagagactccttcaaatccagtggccacagtgaaagcgggagaacgacaatggtgtgatgtgggaatttttaaaaataatacagctttggtgagccagttttatttgctgccaaaagggaagcaaagcatctcaaaggtaggaaatgcagatgtacctgactacagcttgcttaagaaacaagatcttgktccaggcacaggatacagattcagggttgctgcaatcaatggttgtgggataggtcctttcagcaaaatcagtgaatttaaaacttgtattcctggttttcctggagctccttctgcagtcagaatttcaaagaatgttgaaggtatccacctttcctgggaacctccaacctcaccttctggaaatattttggaatattcagcctacttggctatccgcacagcacagatacaagataatccaagtcaacttgtgttcatgaggatttattgtggtcttaagacatcatgtatagtaactgctgggcaacttgcaaatgcacatattgattatacatccaggcctgccattgtgttcaggatatcagcaaagaatgaaaagggatatggaccagctacacaagttcggtggcttcaaggtaacaataagaaagcacctttaaattgaattggtttttttactgaagctattgtgatgatgattatttattagtaactggttatgaagatttgtcatttaaaagagtattctctggctgtatttccagcagttatgaacttgagtttgtaaattgttcttaaaatgtatttgctgaattatagatccaaataaaagaaaagaagcaaagacaaaaaaaaaaaaaaaaaactcgag

SEQ ID NO: 208 - DNA, 1662 bp, Homo sapiens
  misc_feature (382)..(382): n equals a,t,g, or c
gcgcgttcctgcaaaggtagaggcacgggctgggggcgaccaggacggtgcccgcccacaagtacgtcttggctgtcggcagctccgtcttctatgccatgttctacggagacctggcggaagtcaaatctgaaattcacattccagacgtggagcccgcagcctttctgatcctcttaaagtacatgtacagtgatgagatcgatctggaagccgacacggtgctggccactctgtacgctgctaagaagtacatcgtcccagcattggcaaaagcctgtgtcaactttctggagacaagtttggaagccaagaacgcctgcttcctgctgtcccagagccggctgtttgaggagcccgagctgacgcagcgctgctgggnaggtcattgacgcacaggccgagatggccctacggtccgaagcttctgtgagatagaccggcagacgctggagatcattgtcactcgggaggccctcaacaccaaagaggcggtggtcttcgaggccgtcctgaactgggccgaggcggagtgcaagaggcaggggctgccaatyaccccacgaaacaagaggcatgttctggggcgagccctctatctggtccgaattccaaccatgaccctagaggagtttgccaacggsgctgcccagtcagacatcctgactctggaggagacccacagcatcttcctgtggtacacggccaccaacaagccccgcctggactttcccctgaccaagaggaagggcctcgccccgcagaggtgccaccgattccagtcttctgcctaccgcagcaaccagtggcggtaccgcgggcgctgcgacagcatccagtttgcagtggacagaagggtatttattgcagggctgggcctgtatggctccagctctgggaaggctgagtacagcgtgaagattgagctcaagcggctcggggtggttctggctcagaacttgaccaagttcatgtcagacggatccagtaacaccttcccggtctggtttgaacacccggtccaggttgaacaagacaccttctacacggccagtgccgtcctggacggcagcgaactcagctactttgggcaggaggggatgacggaagtgcagtgtggaaaggtggccttccagttccagtgctcctcggacagcaccaacgggactggggtccagggtgggcagatccctgagctcattttctatgcctgaggtgcccggggaggctgcagcaggtcagcgagtgagtggaggggaagtcaagatgctaactgcttcttgacaccatgaaaggctgctcttaactttgtctctctttgacatgtagtcagctgaagcttgactgtgtagagacattttccacacagccagaacccagggattggagtcttaggcatctctggtacagtggggtgcacgtctcaggtggaggaagatttacggctcaagacaggccccagatcccctcccagtggcacccaygccacctgctttgaggggttggatcttcctgctaccctcttggattctaagtggttccaagcttaacttgagaccttcccttcaaatctaaaattggcaaaaagtcacttaaaatagtggacttctgtaataaaggttgcctaaaataaaaaaaaaaaaaaaaaaactcgaggggggg

SEQ ID NO: 209 - DNA, 1247 bp, Homo sapiens
aattcggcacgagagtccacacagcaatctcctttcctcttcagtgagaacacctctcctttgatcaacattatttattcggcttagtttaaaattcctcttgaggagaagtttctgggactaaacatttgaaaatatttgaaataaaaaaattacctgtttttaagtgacaaaaattattaatttataagttacttaggaatgttctcaggtgcaagtaacagatgacacaaacacagcagattgaatcggcgatggtacaattttctcatgtaacataaatgcagcagctgcatttgttgggtggctcagtggccttttgggcttttccttcatggttgcaagatggcactactccaactcaagcatcatgtttgtattcaagacagaaggaaagggagacggtttgtatcagtcactctgacccttttatcagaattgcataagtgctcttagaagcagtctgcttctccctaagatctttgctcagatgttattgggcagagcttttttgtgtgtgtagtgtctaatggttgcaagggaggttgggaaaaatgattcttttttttctggcttttatagtggaagcaggcaaaagattagttgggtgtagttgttgggttagccggtcatcatgctctgcccctaagtgctcagaatactgaagactaaagatgcaatgacaaacaagatagtccttattgtttttgtttgtttgtttgttttttgtttttagatacagctataattttattacaaaactgttcttttggcattagttagttacagtgatagcaagataatgtgagtgtgcagactggctctgatggaaccactgtattccctgcttactgaaccaaacttcagctacctcatatccattacatacaagtgacctgcagttattactgctacaaatcttgacgcgtgtaccgctgagggaggagctgatgctaagggatttgattacatgttgataagactacaaaagttcgtttatgggactttttcttcctcttcccatgcaatgactttgctttagaacaatcacatggcttagagctagtctgagtagcagcagcacccaaggagcgtcagttcttgttaaaaagcaatacctgtgtgatgcatttttacgccacaggcaaagggaaggatcaccctcattttaaactcctgcagagtcccttaataaaatatcaaagcattccaaaaaaaaaaaaaaaaaaaaactcgagggggggccc

SEQ ID NO: 210 - DNA, 1523 bp, Homo sapiens
ggcacgaggttgtcttccatggcctgtttctcctgctgtctgggtgagtgagcctgcaacgcaatgcccatgagagtaaatgcctcctgacctaccctgctcagcactgttctagtgtcttggccttgaaagaaaagcctgacttcctgctgacacatgtggtaggggcatggcagctatgaggcacctcctacgtctgttttctggctgtggtgacttgggatttttaaccttatatatctttttcctttactcaaaacaaaacaatttttagcacactgaaaaaaaaaaaaagccaaatgttttgtgcctttctaaggcagcactgtatcccaggctgcattttaggacttaatatggaaataccagagtctgagctcctctaccttgagtttcattagtccttagtgtctaggagacaggaaagaatgctctctgtgactggagaggtgacatgcaggtgcagtgtgtctggagtccctttcccctgctgtgagacttcagtggaggagagaagcattgtaccctgggatcatttggttggttccaatcacaagcttagttatcaggttgcatgccttgtctcctgcaaaagacagaatgtttcacaattcccaggtaaactctggaccattccaagtgtcctagccttctgatgacattaattacctagttgtgtcgaggagtataggatggactctcctgagaaggggaggttggtggctttgtcttttctttttgctggatcctgaactggtctagacctcctgcccccaccccccagcccccatcagatgtggctggcctttcatttgaaggcttcagacttaaagcattaagcagctagtgccctctgcagggcctggtttccccagggaagggcagcaaggaacatgggaccagaagcctgtcctcagtaatgtgactatagtgagctttagcaaaagtttttctatataatgacatcttacttatcttttaccctttcctcagttttcccctgcctttaactaataaagaattgggagacagaaattttaaagtcctccttattcaagattttgaaattcttagcctgggagtgctggagagaacctgatgctttctccagaatgaagagtcccaatttgtatatcagtgttaagaagaaaacaaaacaaacacataggtgagattttcgtggactattttaaaaatgtgtcattaatataaaaaatttatattagcagtatttaatcattctcacctgtaaagaataagaaaaacagaaggtaaatattcttacagagaatagcagagctttaagattcattttcattttaagtccattttattttgccagtgtattaatgtttagaagtctgttttactaatgttatttattaattttttttcatttccatacacagttagttaactaaagagctttttcaagcacccatgtctgtaaaaaaatatttttaaataaagtttcttttgttgtagcagaaaaaaaaaaaaaaaaaaaaaaaaaaaaaaaaaaa

SEQ ID NO: 211 - DNA, 1324 bp, Homo sapiens
ggcagagtgcagctggaggccaattatcgtaaacgaattagtgcaggaaccagaataccaaataccatgtgttctcacttaccttacccctaaaagttagatgcccttcctccatactcccacagtaccctctatatttttacgagtcattatattcctctttactttgtgagccccttaaaagcagagaccgggtctgttttactcactggtatgtcactacagtgccaggctcattgtttgcattcaggtggttgttgaatgaacaaactcaaatgtaactgcctatttacttgtctgtctttcctcaacaggctgtatgttccttggtggatggatctgtggtttattaagctttgtttcttttagcatttagcactcagcatgaagacctagcacacagaagtttattgaataaataaatttgtcaggattaataattaatctttaaaatacagtatatagcattgaagaatatatagaaagtattctcaagatacagagagacatgggttgytcaggwttattcctykgygkttcacttataggaaagatctcatactacagactacaaatgccaaatgacctactgtgctcataccacccttaacctagaaataaaatagaaacaattcctaaagaaacagtcttaaaaataaccagctaaaattttatcaacaacaacaaaaaagtagttggggtttctgctcattaaattagtttgtatrggtaagcaccacctaagtttcttgattcatggcatgtgttcttaaaccaatttactatccactaaaaataaatggtgatcattatataaaaagcagttgtatttsttgacactagcaatgaaccatctgaaaatgaaattaagaacacaattscacttacagtagcatcaaaaagaataaaatatttagaaataaattaaaccaaagaagtgtaagacatgtcactgaaaactaaaaaacacagttaaaagaatggaaagatagcctatgttcatggattggaagactgaatattgctcagatggcagtactccccaaattgatctacagattcaatgcaattcctatcaaaattccatcttcctctttgkagaaatggacaactggtcctaaaattcatatggaaacttaagggaccccaaataatgaacaaatgttggaaaagaagaacaaagttcatgggttcacactttgacttcaaaatttactacataatcaagacagtgtggtatggtctgtcataggacagacatatagaccagtggaataaaattgagtccagaaataaaaaaaaaaaaaaaaaaactcgagggggg

SEQ ID NO: 212 - DNA, 2116 bp, Homo sapiens
ggcacgagcctgattctacactgggaagttaggggtagaagcacacaggagcccagcacttacagccagtggccctgggggtctcctccagctccacctcatgacaccccgtgctgctgcgtgactgctcctggtgccaaggccaccgctgccatgagtctgaatggctaatgctgagattagcagggcctcccttctactggcctgtcctcctggctctcctcccttttgcctcttctggatttcaggtcagtttgaaagtgggtggctgtctcagctccctgtgagcttccatttccagtctacgctacggaagtcagagagctcagacacaaatccctcccaatggcaaaggtgctatagctgcaacttcctctgcagtgacccggtgggcagtaatctgtattagcagaattcctctcatgccagcaccagctgggggaggagagggtagtgcctgggcattctgctttgggaagaaaaaggacaatcaaaaccaagtgaaatccaaccaccatggtgtacccaacaggtggagtgggctgcaaagtccttaaacatctcaacaggagaagtagctccattttgcgggcaattattttctgcttgaaattagctgttctcaccaagaatggactgcatactaaatcaattgctccactgaggctgccataagcttcatgaagcaaagaatgattcattcttctaaagctgtgatttcctatttgctcacaagccattgcaggggaaatcctcatctttcccactcactgctacactcactgtgatgtgtttatagaccttcggggaccacacctcctccagctgtctgccttactcgaaaattagacccagcttgtccctgacttctagtagccagaaagtcttccacaagatccagccgcatgatacggagtacacacataaatgtgaaaacaaacccctccatcctttcccactgtaaatcaacagcacatgccctctgtgtctgacaattcctctcaaagacagtggctccagcagaggaaattaaggctggtgcaggtgccccagaagctgagtcatccgggatgactggtggccctgaagtcccgcccacagaaggacggccatgggagcctggcacactgccccttggtggcacaaatcctgagcaagccatgccctaaccttaaacaaggacctaggactgttttctctcccacagcctctgagaacttgccctttctctcccaatgtgatttgtaaacaattctcctacccagcctcaagtaaatatcagagttaagctggtttcatacaccatgttgacagtaaacatcttagaggacactttcaatccacccacactgcagctcagtccatctgcacaaagagaagaccccccccccacccccatcgcggtccaacttgggggtacatagatggaaaggcagcagtagtcagcaggtcaactctgtctgaaagaggtccatggcaatgtaaataccaatctactggcaaccacaaagcacccacatagacaggcactgcaaggaatggagggtttgaagaagcaggtcttgatggagttttaaagacacaaaacctccttcctttcagggtcaagggtttgttgattccgctactctgatgtggaattcaaagagatggataattatcatcctttctaagtgctgttttccataatcaggtccccgtgcttatccacatccacactccccttctctcacaaagtcctacttgtctcctgggagcccctgcacgcctcccctctctgaatctctgcgaattttcacttataaaacagtaacaactctctcaaggtcatcaaaaatggcagaacagtgttcccccatctctgaaaaatatgaatgtgagaaacggtttcatactgctgagagaatttataagacttaagcagaagaatcttcagatcccccatcccccagagatttttgcaaatgagccagcccagccacaaaaatgtatgcaaacttgaagataaaatggaattaaaatatgttttaaagagaagcaggctttggaaaaatgaggattttaataaaaacagaaattacgacaatatttctaccacaaaaaaaaaaaaaaaaaa

SEQ ID NO: 213 - DNA, 1591 bp, Homo sapiens
ggcacgaggcggaacggcgtttgcaatggctgctactgtgaacttggaacttgatcccatttttttgaaagcactaggtttcttgcattcaaagagtaaagattctgctgaaaagctaaaagcactgcttgatgaatctttggctcggggcattgattccagttaccgtccatctcaaaaggatgtggagccacccaaaatttcaagcacaaaaaacatttccattaagcaagagcccaaaatatcatccagtcttccttctggtaataataatggcaaggtcctcacaactgaaaaggtaaagaaggaagctgaaaagagacctgctgataaaatgaaatcagacatcactgaaggagttgatattccaaagaaacctagattggagaaaccagaaacacagtcatctcccattactgtccaaagtagcaaggatttacctatggctgacctttccagttttgaggagaccagtgctgatgattttgccatggagatgggattggcctgcgttgtttgtaggcaaatgatggtggcatctggcaatcaattagtagaatgtcaggagtgccataatctctaccaccgagattgtcataaaccccaggtgacagacaaggaagcgaatgaccctcgcctggtgtggtattgtgcccgatgtaccagacaaatgaaaagaatggctcaaaaaactcagaaaccaccgcagaaaccagcccctgcagttgtttctgtaactccagctgtcaaagatccattggttaagaaaccagaaactaaactgaaacaagagacaacttttctagcgtttaagagaacagaagtcaagacatccacagttatttcaggaaattcttctagtgccagcgtttcctcgtcagtaactagtggcttaactggatgggcagcttttgcagccaaaacttcctctgctggtccttcaacagcaaaattgagttcaacaacacaaaacaatactgggaaacctgctacttcgtcagctaaccagaaacctgtgggtttgactggtctggcaacatcatccaaaggtggaataggttccaaaataggttccaataacagcactacgcccactgtacctttaaaaccacctccacctctaaccttgggtaaaactggccttagtcgctcagttagttgtgacaatgtcagcaaagtaggtcttcctagtccaagtagtttagttccaggaagcagcagccaactaagtgggaatggaaatagtggaacatcaggacctagtggaagtactaccagcaaaactacttcagaatccagcagctctccctcagcatcccttaaaggcccaacttcacaagaatcacagctcaatgctatgaagcgattacagatggtcaagaagaaagctgcccaaaagaaactcaagaagtaatgtggccaagtaggtttttgtatcatattagcctaaagatgaaaggcttattattatgatataatctgtaatacactgtaatttaataaaagtcttcataatcaaaaaaaaaaaaaaaaaaaaaaaaaaaaaaaaaaaaaaaaaaaaaaaaaaaaaaaaaaaaaaaaaaaaaaaaaa

SEQ ID NO: 214 - DNA, 1131 bp, Homo sapiens
gcaggatcacagctcacggcagcctcaacctccctggctcaagcgatccctcccctcagcctcctgagtagctgagactacaggtgagtgccaccacactcagctaatttttaaattttttgtagacagggtctccctatgttgcccaggctggtcttgaactcctagactcaagtgatcctcctgtcttggcctcccaaagtgctgagattacaggtgtgagccactgtgcccagcagtttcccagaatatatttaaatgcaaagttacatgaggggaaaacatgtatgtttgctcctgttgttactgggtaggttctgaacagcagaaacccatgtgcagggtgggctggtgaaggcccctctccgcaaggtggtagcaggaaaaggtccttgacttgatgaatttggtctgcctctgagccactggaggaagctgttttgagccagggttttttggcctaaagccagcatttcctcagtctccctttgtggttcgaaggatatggactattgcaatacatttcttccttcaaatcctgccactgttttgttggcccacaactaataggacctcaaaataagccatgctgctttgcacacacactagccttcttttgtacttttcattctggatgggcttggccaaaacaggctcaggccaaagacctcccaagctgtatgtacttccagtatcctgaaacagtgtttggtgacataatgccaagggtaaacaagcctgatttaggcactgctttatccaggggcttcacccatgaaattaataaaacttatctgagtcacttgaaacttggttcccagaaaacacatttctggtttataatctccttttatgctcacctgacattaattatctatccttgatgatgtgtttaaactgagtagcagaaaacagaggccacactttctgggaaattttaaaggaagaaaccatttttaatgagatgaaaatatttaacgaatttaaaaagctaatgacaattttgagaaaaggtttgggatgtatattgctatgtaatttaataaactgattttatggatataaaaaaaaaaaaaaaaaaaaaaaaaaaaaaaaaaaaaaaaaaaaaaaaaaaaaaaaaaaaaaaggtgc

SEQ ID NO: 215 - DNA, 3016 bp, Homo sapiens
gacagattaatgtccctgtaaatctgataatgataaatatagcataaaggtgttatattcaaatggattttaatttttctccaaactaatatttacataaatgtatgtaaactatttgagttatgtggagttccagttagttttcttttgtgtatgtctcaacaaatgtttagtgttaatgcttgtcagctcacattttcttttcctttgttttgtaagattactttcttcccttcctctcttccttacctccattaccttcctttactccccttcctccccttctcttttcctctctctctattccttctcttacccttccttctcccctttgtccttccttcccctgyctctgatctcattccctcctcccatgccctcctcactattccccttcccctgcttctttcctcagcctctctttcttttttaatattgcctccctccctcccttcccttccttccttccttcctttttcctcttctctttccacccacctttttattttttcagactggcttaatgaacagtctagtgatagaaagtggtaaaaataagttatagtagatctatatagctatataatccagtatatccaatataatagaatattatgcaataattacaaactatgctttttgtgcttcttcatatctacctcatgcccctcatatttttcatcttcatattctgtcatttaccaaatcctatgaaaataatctctcaaattcatcctttcctatctccttcatcttcacatcctgcatttgctaaatcctagaatttttcaaattcattcttttcatttctcctaccatcccccmatttccccttamcagamctattaaaatagctgccctgagttggtcttgactattcttctatttagccmataggctatggscatattttaatcgtcctaaagcccagktctcatcagattacyacctgcttaaacctttctgttactggctgcccatttcctaccaacttaatataataccgtagtcttcagtgacttgcagattatggctctaacctgcttttttagttctctcaagctccattttacccttaacttccagtggaacttgctttctgcttccatgtcttttttcccactatttgctttgcctggagtacttaacttcttagtctgccctttagaacctacctccttcgaggcccaattcagatgccacctttccattttctctattattatctaagtgtctcttctcccccttatctatgttataaattccttaagttcagagactgtgtcttgaaattctctgaatttttaacacagtgccttgctattataaatatttggtagttttaattgtgcagtaaacacttccatttatgaaaatttctgttttcttgtctctagttaaagaagagtgtaagagtcctaaagctgagtgttggtcccaaaaaatgtccaataagcagcctaactctggaattgagaactttttagcatctttgaatatctccaaagaaaatgaagtacagtcatctcatcatggggagcctccaagtgaagagcatttgtcaccacagtcatttgccatgaagggaacacggatgcttaaagaaattctaaaaattgatggctctaacactgtggaccataagaatgaaatcaaacagattgctaatgaaatccctgtttcctctaacagaagagatgaatatggattaccctctcagcctaaacaaaataagaaattagcatcttatatgaacaagcctcacagtgctaatgagtaccataatgttcagtctatggacaatatgtgttggcctgcccccagccagatccctcctgtatccacaccagtaactgaactttctcgaatttgttcccttgttggaatgccacaacctgatttctcctttcttaggatgccacagggctccttaggcatgaatttccctttgccttcacaagtatttgcaaattatccttcagctgtaccacctggaaccattcctccagcctttcccccacctactgctaatataatgccttcgtcgtctcatctctttggctcaatgccatggggaccatcggtgccagttcctgggaagcccttccatcatactttatattctgggaccatgcccatggctgggggaataccagggggtgtgcacaatcagtttatacctctgcaggttactaaaaaaagggttgcaaacaaaaagaactttgagaataaggaagcccagagttctcaagccactccagttcagactagccagccagattcttccaacattgtcaaagtaagtccacgggagagctcatcagcttctttgaagtcctctccgattgctcaacctgcatcttcttttcaagttgaaactgcctctcaaggccatagtatatctcaccataagtcaacaccaatctcttcttcaagaagaaaatcaagaaaactggctgttaattttggtgtttctaaaccttctgagtaaatttggctcttagaattaagttaatttcttctctttccatctacctttttataaatacatatctatgtctcataaaaattagaatgtactattttaaaataatatgtgtaaattgaaatttttttcatttttaagttatcaggcacttttcatgctgtttaaaagactgtgtatcaaattgtgcactttaagtatgtgcagtttgttgtatgtcaattatacctcaataaatctgtaataaaaaactaaattaaaccttgcattaaaataatatcacagtatcagtggactaaacattaaaatgtaccactctaatcattggcctcatgattgaagcatcctgaactatgaattagacatcagttagcaataataagcattttttacactatcattgaggrataattacatggagcatgaaatttgggcctccagtgataacttactgaatgtggattttatttctctttttaatgatgtagaaaatgcaggagaatggctcttattttatgtgtggtttttaac

SEQ ID NO: 216 - DNA, 623 bp, Homo sapiens
tcgacccacgcgtccgttttttttttttttttttttaggcccatttragtagttaggaactgcccaggttttttttgttttttaagcattgatttaaaagatgcacggaaagttatcttacagcaaactgtagtttgcctccaagacaccattgtctccctttaatcttctcttttgtatacatttgttacccatggtgttctttgttccttttcataagctaataccactgtagggattttgttttgaacgcatattgacagcacgctttacttagtagccggttcccatttgccatacaatgtaggttctgcttaatgtaacttcttttttgcttaagcatttgcatgactattagtgcttcaaagtcaatttttaaaaatgcacaagttataaatacagaagaaagagcaacccaccaaacctaacaaggacccccgaacactttcatactaagactgtaagtagatctcagttctgcgtttattgtaagttgataaaaacatctggaagaaaatgactaaaactgtttgcatctttgtatgtatttattacttgatgtaataaagcttattttcattaacaatttgtattaaaaaaaaaaaaaaaaaaaaaaaaaaaaa

SEQ ID NO: 217 - DNA, 2101 bp, Homo sapiens
agccggcctcgcacttccggtggggagattccggcctggagctcccagggccgagcagaccttgggacctgtgagcgctgcatccaattaaccatgggaagggtcagcaccagccaccagccccttaggtgaggactctgcctggggctctgctgatggttccgaatcatggagctgcagagagctcctccagcctggagacgttcttggtgaaagctgtggtctaactccaccggctcttcctgcacattgtattcaagaggggtgcctgcccccgctgactcaggagctccggtgctgcagccgccacgaatggggaggtgggccctcgatgtggcctttttgtggaaggcggtgttgaccctggggctggtgcttctctactactgcttctccatcggcatcaccttctacaacaagtggctgacaaagagcttccatttccccctcttcatgacgatgctgcacctggccgtgatcttcctcttctccgccctgtccagggcgctggttcagtgctccagccacagggcccgtgtggtgctgagctgggccgactacctcagaagagtggctcccacagctctggcgacggcgcttgacgtgggcttgtccaactggagcttcctgtatgtcaccgtctcgctgtacacaatgaccaaatcctcagctgtcctcttcatcttgatcttctctctgatcttcaagctggaggagctgcgcgcggcactggtcctggtggtcctcctcatcgccgggggtctcttcatgttcacctacaagtccacacagttcaacgtggagggcttcgcttggtgctgggggcctcgttcatcggtggcattcgctggaccctcacccagatgctcctgcagaaggctgaactcggcctccagaatcccatcgacaccatgttccacctgcagccactcatgttcctggggctcttccctctctttgctgtatttgaaggtctccatttgtccacatctgagaaaatcttccgtttccaggacacagggctgctcctgcgggtacttgggagcctcttccttggcgggattctcgcctttggtttgggcttctctgagttcctcctggtctccagaacctccagcctcactctctccattgccggcatttttaaggaagtctgcactttgctgttggcagctcatctgctgggcgatcagatcagcctcctgaactggctgggcttcgcctctgcctctcgggaatatccctccacgttgccctcaaagccctgcattccagargtgatggtggccccaaggccttgaaggggctgggctccagccccgacctggagctgctgctccggagcagccagcgggaggaaggtgacaatgaggaggaggagtactttgtggcccaggggcagcagtgaccagccagggcaaatggcttagaagcaggccactccccagcctgctgccagcactcactgtgctcaagccgccagggctcatcatggtagctgggagctgtggacgggagtcaccaggtggtggggccaagccagggactcatgacttttgcccctcccttcagagcctggtcacacaaggggcgagcaccaggccagcctgggactggccagagctgggcccaagctgcgctggaatcgcagcaggagaggggagtgggctggttcttcccaccacttcccaggctctgacagccgagactcatttccaaggcacagcagctttctaaagggactgagtttggactgggttttggacctccaggggctggagcttcatcacctgggcagtgtcttttctcagagagcaggtttctttatagtttggaaataaatggttcacggtccactggccgccttgtgttgctggagacgtgggggcagggaggggacagtgtgggcctggcctctcctttcctttccctgcctggagccttcttcaaatgtctggtcttaagccaggcctccttcattttctcgctcctgttagaacaccagtcccctycccagtggggccccactgcacctgctggcaggaaataaatgaatgtttactgagwaaaaaaaaaaaaaaaaaaaaaaaaaaaaaaaaaa

SEQ ID NO: 218 - DNA, 920 bp, Homo sapiens
gagcacctcaggggaggtgaaactcaggtggtcttgtggcatgcgtgggtgtccctctgcactctggcctctgtgctcttgggtgctggtgctgtgtcacacgccagggcatgtgaaggcaccacaggtgtgaacgagtccccgatgatgacctggggggaggttgagaacacacccttgagagttgaagggtcggaaacgccctacgtggacaggacacccggcccagcttttaagatcctggagccaggccgcaggaacggctgggtctgaagatggccaacgaggccgctgccaagaaccgggccaagaagcaggaagccttgcggagagtgacggagaatctggccagcctcacccccaaaggcctgagcccagccatgtcgccagccctacagcgccttgtgagcaggacggccagcaagtacacagaccgggccctgcgggccagctacacaccatccccagcacgctccacccacctcaagaccccggccagtgggctgcagacccccacaagcacaccggcgcctggctctgccacacgcacccctctcacacaggacccggcctccatcacggacaacctgctgcagctccctgcccggcgcaaagcttcggacttcttttagagccaggcctgggctgggctcatagacgcttcacagagcctgcagggcagctgtacacccagcagaggactccagccttctcggggcccaggcctgggccagaagctgttgaccataccaggagtcactggagaaaggggctgtgctggggccagactggcacaaggcactcgtgcccacaccacaccccagggccttgccaagctgtttgctgtttaattggccccttgaactgtcattaaagaacacctaggtaaaaaaaaaaaaaaaaaaaaaaaaaaaaaaaaa

SEQ ID NO: 219 - DNA, 1318 bp, Homo sapiens
  misc_feature (557)..(557): n equals a,t,g, or c
ggcacgagaattaattgccagccttggttcacactgatgagtgtgctcattggagagactcagcatgcaaaagaaaagactcatcaatttgcagttatttaatttcacgaactgccggatggtggagtcagtagcagcggctgggccgcaacatggcgcctcccacctagacttccggtcaggaaacttccaccttcctccgatttacgtgggcctgcatgagcctacttctcttcttattctagtgccagtggcctctgggagtcttggtccttcttactggaatagccctcctctcctgttacagaggcaataattctccagccttccggtcgccgccaaagcctcctgcctaatcacttcctgtattgtctccctgcggctctttgcacagaccttgggctccgtcgtctctggattcttactgatctcttcctcttctcccaaccgccttgtcatgtctctttgagctatgtcaggaggaacggaagggcactttcttactacttttgttagccaaacggacaaactgtcccctcccctttgttgtaaccacncattcaaggcttccttcagtccagccccatctcccttttcgttgcctccctttcactactccaaatgagcttgccatactttaaacgggtcttgtactttcttatcccttctctggaatgtcatttctactgaagaaaatcctactcttccctcaagacccttctttaatcccctcttgccatggaaacttgagattttcattgaggagctaagttggaaaatataaactagagctgagtctctaccctggcactattgacatttggggccagattattcttggttggggagactgttctgtgcactgtaggatgtggaacagcctcccaggcctctacctgccaaaagcacactcccctttccccaagtggtgacaaccaactgtttccagacattgccagatgtcctgaggtgggagtgagggtgaacagaattgcctcccagctgggggctgctggactaatcaacaagaagtggcaaggactgcaggcaaattgcctcagcacttagatttagcactgcaaggccacttcgacaggtggtagtgatttgtgcgtctcatttcctattcttgattgtgacaaggttctggaggatggagacagctacccctgccacagttcccacaggctatgttgtacatagggcttcatatttaacatgtgagtgaatgaaacacatgagcccgagtgctcttcaggacggcaaggcctacatcaagatggtaaaccttcagttcttaaaaaaaaaaaaaaaaaaa

SEQ ID NO: 220 - DNA, 1070 bp, Homo sapiens
ggcacgagcagtgacgagggaaacctctcgctgagggttggggcaaagtcacccctggaaatcgaaggggccgctggtggtctcttgaggtccaccagcctcaaatgcatctcttcagacggtgttgggggcacaaccctactccccgaaaagtcgaaaacccgattcagttcctgcgagtccctcttagaatccagaccgagcatggggagaaaactgagctctccgaccacacccagggacatgctgttgtcgcccacactgcgtcctcggaggcggtgtctggagtcctctgtggacgatgcgggctgtccagaccttggaaaggagccgcttgttttccagaaccgccagtttgcccacctgatggaggaacctctaggcagtgacccattcagctggaaactcccaagcctcgactacgaacgcaagaccaaagtggacttcgatgacttcctcccagctatccggaagccccagacacctacctccttggctggatcagccaaaggtgggcaagacggttcacagcgttcaagcatccactttgaaacggaagargctaaccgttcctttctctcggggatcaagaccattttgaagaagagcccggagcccaaggaggatcccgctcacctgtctgactcgtcctcatcctccggctccatcgtgtccttcaaaagtgctgacagcatcaaaagtcgaccaggaatcccacgacttgcgggtgacggtggcgagcgaacgtcccccgagcggagagagccagggacggggaggaaagacgacgatgttgcgagcataatgaagaaatacctccagaagtaggaaccagttcagcctccttgaagctgcccttgaagacttcccgactctacaataacttggagacagagagactggccaggcctccccggtggccakagccagccagcatggccaccctcaagaggcgagatgagcccacagaggcatatcctgcggggatgctgggctcccagtgtggttggcctgaacaaaataaagtgttgactcctgggaaaaaaaaaaaaaaaaaaaaaaaactcgta

SEQ ID NO: 221 - DNA, 1160 bp, Homo sapiens
aattcggcacgaggatttttgtcttcagccgtgcaactatgttggggtcatcttattcctccttttcggcggtggacacagtcaaaaacattttaatacaatggaagtgcatcccctggcagccctgcggcagtcacagcctccttattggcaaggctgaagtcaaagccttgggctgcccagcctgaatgacactggcttcctgggatggttgttgctgtgtcagggacatttctgggtctctgccactgctactggtgctcttggtggagaaggccacagggtgttgctggggaggtggtgagccagaggtttctgggtctgcaccactgctgctgttgctctgggtataggggtaggccacagggtcatgctgggcggcttgttgagcctgggatgtttctgggtctccaccactgctgctggtgctctgggtggagaagaaggccacaggctgatactggaaggcttgttgagccagggacgtttctgggactccaccactgctacaggtgctctgggtggaggggaagccatggggtcatgctgggggccttgttgagccagggaggtttctgggtctgcactactgttgctggtgctctgcgtggagggggaagacacaggtcatgctggaagcttgttgagccaaggacatttctgggtgtatccagttgtgcaggtctcctcctcttgcatactctgttactaaataaataacagggtgatgctcaggggcttgttgagccagggatgtttctgggtcttcaccactgctgctgttgctctgggtggagggggaggccacagggtctttatgtatttaagcataaaggcaaggcttggcgcggtggctcatgcctgtcatcctagcactttgggaggctgaggcgggtggattgcttgatcccaggagttcaagaccagcctgggtaacatggcaaaacctcatctctatagaaaatacagaaattagccagctgcagtgcatgcctgtggtcccatctactcggagggctgaggtgggaggatcgcctgaacctggaaggtcaaggctgcagtgagccaagattgtgtcactgtactctagcctgggttagagagccagacactatctcaaaataaaataaaaaaaaaaaaaaaaaaaaaaaaaaaaaaaa

SEQ ID NO: 222 - DNA, 2377 bp, Homo sapiens
agctgtcgcgrgcggcgcccggccttgctcaacgcccagcagtccccaccgtcgctgccgccgccaccgccctcggccgctgccgaggcctcctgcagccatcatgtccgccagcgccgtctacgtgctggacctgaagggcaaggtgctcatctgccggaactaccgtggcgacgtggacatgtcagaggtggagcacttcatgcccatcctgatggagaaggaggaggaggggatgctgtcgcccatcctggcccacgggggggtccgtttcatgtggatcaaacacaacaacctgtatctggttgccacatccaagaagaacgcgtgcgtgtcgctggtcttttctttcctctataaggtggtgcaggtgttttccgagtacttcaaggagctggaggaggagagcatccgggacaactttgttatcatctacgagctgctggacgagctcatggacttcggctacccccagaccaccgacagcaagatcctgcaggagtacatcactcaggaaggccacaagctggaaacaggggccccgcggccaccagccaccgtcaccaacgcggtgtcctggcggtccgaaggcatcaagtatcggaagaatgaggtgttcttggacgtcatcgagtctgtcaacctcttggtcagcgccaacggcaatgtcctgcgcagagatcgtgggctccatcaagatgcgagtyttcctctcgggcatgcccgagctgcgcctgggcctcaacgacaaggtcctctttgacaacacgggccgcggcaaaagcaaatccgtggagctggaggatgtgaagttccaccagtgtgtgcggctatcacgcttcgagaatgaccgcaccatctccttcatcccacccgacggcgagttcgagctcatgtcctaccgtctcaacacccacgtcaagcctttgatatggatcgagtcggtgatcgagaagcactcccacagccgcatcgagtacatgatcaaggccaaaagccagttcaagcggcggtcaacagccaacaacgtggagatccacattcccgtgcccaatgatgccgactcacccaagttcaagacgacggtggggagcgttaagtgggtccccgagaacagcgagatygtgtggtccatcaagtccttcccgggcggcaaggagtacctgatgcgggcccacttcggcctgcctagtgtggaggccgaagacaaggagggcaagcccccgatcagtgtcaagttcgagatcccttacttcactacctccggcatccaggtgcgctacctgaagatcattgagaagagtgggtaccaggccctgccctgggtgcgttatatcacgcagaatggagattaccagctccggacccagtgaggggctgtcgcagccaacaccccggcctcggggctcctggtggcagcaccaggggacacacctgccaaacccaccagatggaggggccctccctggtctctggccaccctcccagcctctgcccagggacccctgccttccccaggccatctgctctgccgtcgacactcgtctcagaagcccctttcccagaagaggctggtcttcaagaagtctcgtttctttgcccctgaagtcagtttcaggggaaggatgtgaaatttttccgtgtagaggttacagccttttatgctgttgagctcccaggtaccaaaaagcttggccaacgcttgccagccagccagctgcaggtggcatctgccacgaaggaagcgccagcytcgccaggccagcaggggcgtcgttttgttgccattttgttgaacgttatgggtttatgggtgttcctggaacttgtctttgtgcattcgttgctgtttgtgttaccctcactgtccccatgtcccacccacgtcctacggcactcaggaagcacttggtgaggacgagccctcacccttcttgtcttccttcccagcagcgcccgcagcgggccatttacacgtcgaggctggcacctggcgcgctcgggggccactgtagcgtctgcctgctccctggactcgcaggcctgcctgtggcgccttcccagggccagcctgggtcacgagatgctgtcactcagccagatcagtattgacccaccaggggaggtggggtttggtgagagacgccagcctcagactttttcccactgagggtccagagagcggggccacgtgtcacccacgtctgcgcttggtcacccgtcctccccaccctgtgtgtgtttatgtcatagttacattaaattccattcattgaataaaaaaaaaaaaaaaaaaaaaaaaaaaaaaaaaaaaaaaaaaaaaaaaaaaaaaaaaaaaaaaaagaaaaaaaataaaaaaaaaaaaaaaaaaactcga

SEQ ID NO: 223 - DNA, 1160 bp, Homo sapiens
ggttgggtcaaggtaactctgggctacagagtccttgctgggggttcggggagcgcttggaccccggcttctgggacgcgtcaggagaagggagcactggctttgctttcatcaggccaaagatgcctttytttgggaatacgttcagtccgaagaagacacctcctcggaagtcggcatctctctccaacctgcattctttggatcgatcaacccgggaggtggagctgggcttggaatacggatccccgactatgaacctggcagggcaaagcctgaagtttgaaaatggccagtggatagcagagacaggggttagtggcggtgtggaccggagggaggttcagcgccttcgcaggcggaaccagcagttggaggaagagaacaatctcttgcggctgaaagtggacatcttattagacatgctttcagagtccactgctgaatcccacttaatggagaaggaactggatgaactgaggatcagccggaagagaaaatgaagaccccagagacatttattggggagtaggatgtggctgagtgctttttttttggccagactagcggattcagtcctggaagagagtatcatataatgagacccacaggcactggcacccttgggttggcaatagaaggtgacatggaatggagaaaaccaagattccagatggggatagtaactagaaggtgcttcagatgcactgcctgcgggtgccagtctgaaaaccagaccgcacagaggcctggggctgctgatgagctttttggtgctctccacacacaagctcgcaaacacacatgtcccagaatagctctgttgggttgtgttgggagaagcggctggagttcattctctcacccccttatgttggtgtttggcgtgtgacagcagttctacagagctctgtgttggggtcatggatgagcggctctcttggctcttaaaggcaggcctctctcttcttgcctttaaagaatcctccttcctcacacctggcctcctctggcttcagcttctcagcagcaagcaccagccttccacaacaacactatatttttatgctactttcctgtttgcactactacttttttattaaacgatgttaaataaaaaaaaaaaaaaaaaaaaaaaaaaaaaaaaaaaaaaaaaaaaa

SEQ ID NO: 224 - DNA, 1200 bp, Homo sapiens
ggcacgagaaaaaatgtaagctgaaatgatgacgtgttcttttagaaggtttatcatagcaactactataggcagtgattctaagaagatgctattctttttttccattgctttgtctagttttttttttttaaatctgtttttgtgcctttgtaattctagggttattggtatagttctcaccatatcttgaatacagatgctttttcctttggaaataatttctcataaagcacattgcttatagctgcttcccttttcccagagtagtaaaagttgtgatacaagacagtgatatcagctgggcgtggtggcacacgcctgtaatcccagcacgttgggaggccaaggcaggcagatcacttgaggccaggagttcgagaccagcctggccaacatggtgaatccccgtctctactaaaaatacacacaaaaaattagctgggtgtggtggtttgtgcctgtagtcccagctactcgggaggctgaggcacgagaattgcttgaaccagggaggtggaggttgcagtaagctgagattgcaccactacactccagcctgggtgacagaacgagactctgtctcagaaaaaaaaaaaaagagacaatgatatgaaaaggtcttacatgaatgagttttacgcatgattcaatctgtaagtcctataaattatttttgatggatggtatctattttcttcctattagtagttttgggcaaaaataaatttaactgaatgtaaaaatattcagctctatggggagctgagaagaactaaatattttcagacacttgttatgtgcaggttgtttggcatatatttttaaaaatctttataataccattttgaattaaattctatccccatttaacaaatgaggaggtggtttctattcttaagtaactttcccaaaatcactcaattaagtggcaagggtgggatttaaatcgaagcctatactctttcacttgtttccaaagatgccaaactcaaaatgtggctaaacagtaaatcttgagcaaagaaatgatttactaggaagcagcacaatagaacatactggatgtaggaaatgttatatatcttgatctcattggtggtaacacaagtatatacatatgaaaaagttagttttatccttactgttagtactcagtgctcttattattcctcaaaaatgaaaaaaaaaaaaaaaaaa

SEQ ID NO: 225 - DNA, 1981 bp, Homo sapiens
ggcacgagtcacccaacaatgtttttttcatgttgatcactttactaaagcgaacaattggggttttaccaaaattgtgaaggattttattcttccatacttatgtctgtgttcagggtcatacagattctactttttccttttagtttaaggtattctcttggagatttaatgtacttaaatttgaccacaatttattgagagcatattctgtgtcagacattgcactctgcactagatattcaggaatttctaaaaagaatgttaacattgctgttacatagtcagttactgatcacattcttttcctctcaacttttttcaaaataggaatctgcggtatgttttcacgtatggagttcaggtcaggcttaggggtccctgacaatgtgaatagttttaagctgggcctcaattcgtggtacccttatactaatttaacaagccgtggactctaggttccaccaaaaatattttgttccatcctctctggtttcagtccatggtggtacagaaagaaaactaaggaacttcagccccaaattgtcaaattttgctacttaagaaacagaagatttaaatctatcattttgtcttatattccagagttgactggttcctcctgtctttaacttcttgtccttgaagggtattctaattttcattcagaaatatgacttctcatagggtttgtgttagatattttcagggccagatggatatgatgttcccatttctgttttattgttaaactactattccttttgagctgtaatgaacaattcattctgagaggcaatatatgttttccagtaattgacttgaataaaagtaaatgttaaacatggagttactaaagttaatacagtgggtattagtactaatttgttcaaattaagatagaattcttaatttgataaatagaattcttatattacagcatcagtccaattggattgatagtttgtaaaaggtaatttcttacatgaagaaagacaggttttctttctcttagcaaggtattaatgcaaaaatgaactcttcatttcctaccagcttccgaaggaaatgctggttaggagtaaattcaatttactctaccaaccaacttcacatctgttatgctgaagtcagagtttatctttcttgttatgtggaacctagaaatataccatgaggaatactgaaaataaactagcagaaattttgcgtgatgctgaggatttttagatggctgcaaaatgggtgaaagtaatataaacttaacaaagaatgttgtcacaactctctggaacttagtactgtttttcaactacaaatggaagatttgtgagactaggtcgacttaatgtgatttcaatgcagtaattactgtgtggcatgggcatggtaagagataggccttttctagaaatattctcatctctgttttttttagttgctcttacttagatttatattaactcagcttcacattttcatttctttttattttattttaaacaatgagaaaaatactccacgatgtcactgatttagttatcagatttgctttatttctgtatataataggtaatgtgagtacaggaaatatatctgaaaaggttacttgtacctaaattttaagttagatcatttaaaaattacttataagtctcttgagtgttttatatagtagggcagatggaaaaacttatttgatattcatttttggtacctcttaggaaaataattgggaatgtattcagttggaaaaaatgttgagaagagtgttttatataatgattatttagtaaaacattaaaaataatttcttattctggaggtttatagacatcaaaattgacaaagattacatggattatacatttgcattcaaggtacctttaagcgattttttaaaaaaaattctgactctaacaatgcatgctcattgtagagcgttaaaaatacaaaaacatgcaaaaaaaaaaaaaaaaaa

SEQ ID NO: 226 - DNA, 1594 bp, Homo sapiens
  misc_feature (1090)..(1090): n equals a,t,g, or c
actcgtgccgaattcggcacragggaaactttggaagttcattcttaaaaattttataagtaatatatgagtacgtttttatgggatattcaaaccacctactgtttttaggtcttactctcttrtgwtgcagctgttgctgatccctgtagagtaaagtacacactgaaggctatggcaatgatctaccgttccagcttcctctaggaagggagtttgacaaataaaatgctagtgaactggagcacagtgagcaagggggaggtggcatgagctgaggacacagtgggcaggccagaacacacaggcctggacatcacctcaggaacttgcatgttatttggagcataatggaaaaccattagaaagttttagggagtggttatgatttcatttatttatattttataaagatctttctggttattcggtgaatagttatggttaaaccagttcaacccagtgacagtacctgtcacatagagttattgtgaggattggttgagatgtatgtgatagattatctggcacaaagtaagggccccctcaatattgtttttctctcaagtgcacccaaattggggtattggaaacacttcctccgtagtttggtagaaggcaccaaatcactagggctgataccgtttgagtggggccccagctgatggggcagggggtaaaggggtgaggggcttaatatgaggcagaaggaagggccaggcctctagaactcatcccaagccggccccattctctggctccctgtacatcctgcctttccatagaggaagccagtcccaggggtggctgcatcttattccatgcttwacatctcatcagccttgctgactttccccagcctgctgtagatcagagtgaaatctgtttttcctgtctagagcaagcgcactttttcctgaggatttccaaatattttgaattcccatatgcagtggaagccgaagaagctggagggagagtggggttgggaggtgcagaggttccatgtcttcttgcctttatgaagcttctggcattgtgctgggtgcaggtgatccatggaataagatggatgtggttctagtgacgnttcacatcacgaaggaccatctgtgtcctcttagggagtctggctttcctgctaagggcaacaggaaggcattgtagggtctgtgccaggataccaagtgaaggaagagatttccttactgtggacttgcagacgataagtaaacttttgggtcataagagaccatctcttggaagctgaagaacttaggccaaggttttcctgagaaatctagttttgcagaatgttgtgaaccttgatgctctggtgacagtgaattaatggtttattttaggaagcactacacaattttacttaagagtgaggctagaaagttgagctgtttctcaccttttataaatgaagtttaagatcagattaatctccatggagtttttagctcaaagcacaattagttttctatagaaagggcttgggctgaaccaaattatgccattgatctgcctggtagacatacaaatcattctgttcttagaaaaaaaaaaaaaaaaaaaaaaactcgag

SEQ ID NO: 227 - DNA, 1467 bp, Homo sapiens
ggcacgagcccaggtgggttgtcttcacttccttggtagtgtcttttaatacacaaagttttaaatttttatgaagtcaaatgtatctacatttttctttggttgctcatgcttttggtgttgcatctaagaatccactgccaaatccaaggtcatgaagatttactcctatgttttcttctaagaattttatagtttttgctattacataaggtctttgagccattaagatctttgacttaacttttgtatatgatgtaaagtcactgtcaaacatcattcttttgcatttggctgtccaggtatcccagcattatttgttgaaatgcctacacttctttatattcccttgactcctctaaccaaggcagttggacctttgctactaccactgccctgaaactgctgtcactgggttactgaggactgggtagcttagttgagtagataatcttttgttgtttcctccttgtaatatacaagccttggcttctgtgacatcatactctcctagatttccccctgtcactgtggcttcttctcagtctctgtccatccctggtgctcctgaaggttctgttctcagccttacacacattacctgggtgatctcattctctgccatgacttcacttgccatatatgtgctgattttccccaaattcctatttctcccgacctttacatctattttatttgcaggtcatatatctaataaggaattgatatccagtgtacatgtagaactcctgtaattcaatacagaaaccaaacagtccaattaataaatggagaagagatttgaatgaacatttttctaaagaacatctcaagctcaagatttcccagataacttttctttcttcaaaatctgcttctgtgtttcctcatctgtaggtggcacagcatacatctgatttcccaagccagaaacctcatagttattcttgactccaggaagaaatattattgagtttttaaaaactcagcttattgactcattgttttatataataaaatgcaacagttttaagtgtatatttcaatgagttttaatacatttatgtacttgtgtcactatcctcatagatagagacaaaacatttctatcacaccggcaatttcctatgtgtcccatcccaatcaatcctttcccctttgctggctccaaacaatgactctttcctatctttttagaaagattagaattgcttttctagagttccagtaatggaatcatacagtgtctaagtctgtttgtggtgctgtaacaaaatacctgagactgggtaatttataaattataggaatttatttctcacagttctggatgctgaaaagtttatgatcaaggcactagcaggtttggtgtctgagggcccagtttctaatttgaagatggtgctttaaacactgtcctcacatggtagaaggggcagatgggcaaaaaaaaaaaaaaaaaaaaaa

SEQ ID NO: 228 - DNA, 1504 bp, Homo sapiens
ggcacgagcataactggcccctaacaatgggggccatctgcacgctgttgtatgcagatttggatgtgttttctagcacttacatgcagatagtgaagctcctgggactggatgtgccatctctgtgcttggcagaactggtgaagacctattgcagcagcttcaaactgttccaagcttcaccttctgtgccagccaaatacgtggaagacaaagagaagatgctgtctcgaacaatgcagttggtggagctggcaaatgagacgtggctggtgaccgggaggcatcccttgcccgtcatcactgctgcgactttcctggcttggcagtcgctgcagcctgcagatcggctttcatgttcccttgcccgattttgtaaattggcaaatgtggacctgccctacccggcgtcctcccgcctgcaggagctgctggctgtgctgctgcggatggctgagcagctggcctggttacgagttctgagacttgacaaacggtctgtggtgaagcacatcggtgaccttctccagcaccgccagtcactggtccgctctgcctttcgggatgggacagcagaagtggagacccgagagaaggagccaccggagtggggacaggggcaaggagaaggggaggtgggaaataattccttaggtttaccccaggggaagcggccggccagtcctgcccttctcttgccaccctgcatgttgaagtccccgaagcggatctgccctgtaccccctgtctccactgtcactggagatgagaacatttctgatagtgaaatagaacagtatttgcgtacccctcaggaagttagggactttcagagagcccaggctgctagacaggctgccacgagtgtccctaaccctccctgatggatatccactgggagcacttcatcctgttctgacagcttgataacattcctgttataaccaaggatggaagtgtacaccagtccgtaggtattgcttttcttgtttgaaggaaccaagaggggctctgccattagttggaccctgggtcctggagtaaagtcaggagtgcagggatgactataggtaggagagattcccatcccttggtgtgggagagcaagttgcctatgtccatgttctgtgagatggctttcctcatagatggatgggaaaatgtcaggctctttgctgctggtttgaattggacacactgctgcggctcctcctgcaggcctgagggggcttccctctgcttgtggagtggttggcattcccagcagtatcaaccctcagaggagcgggaactggggaattctggccctacgtgcattcacaggcaatgatgggtttgtgtgtatggtgtcatgagatcctctacctcataacaaaaggacagtgggtagactaaggcagtagctcaaagggctttgcaaaattttaatatattaaaacaagaggcatctgctagaaaacattctattgtataaaacccgagttcttaaaaaaaaaaaaaaaaa

SEQ ID NO: 229 - DNA, 1992 bp, Homo sapiens
gcatcctccgccaggacagagtctccaaaggctgctactccttcatccacctcagcttccagcagtttctcactgccctgttctacaccctggagaaggaggaggaagaggatagggacggccacrmctggkacattggggacgtacagaagytgstttccggagtagraagactcaggaaccccgacctgatccaagcaggctactactccttcggcctcgctaacgagaagagagccaaggagttggaggccacttttggctgccsgatgtcaccggacatcaaacaggaattgctgcgatgcgacataagttgtaagggtggacattcaacggtgacagacctgcaggarctgctcggctgtctgtacgagtctcaggaggaggagctggtgaaggaggtgatggctcakttcaaagaaatatccctgcacttaaatgcagtagacgttgtgccatcttcattctgcgtcaagcactgtcgaaacctgcagaaaatgtcactgcaggtaataaaggagaatctcccggagaatgtcactgcgtctgaatmagacgccgaggttkagagatcccaggatgatcagcacawgcttcctttytggacggacctttgttccatatttgggatcaaataasgagatgggtctagcaatcaatgatagctttctcagtgcctccctartaaggatcctgtgtgaacaaatagcctctgacacctgtcatctccagagagtggtgttcaaaaacatttccccagctgatgctcatcggaacctctgcctagctcttcgaggtcacaagactgtaacgtatctgacccttcaaggcaatgaccaggatgatatgtttcccgcattgtgtgaggtcttgagacatccagaatgtaacctgcgatatctcgggttggtgtcttgttccgctaccactcagcagtgggctgatctctccttggcccttgaagtcaaccagtccctgacgtgcgtaaacctctccgacaatgagcttctggatgagggtgctaagttgctgtacacaactttgagacaccccaagtgctttctgcagaggttgtcgttggaaaactgtcaccttacagaagccaattgcaaggaccttgctgctgtgttggttgtcagccgggagctgacacacctgtgcttggccaagaaccccattgggaatacaggggtgaagtttctgtgtgagggcttgaggtaccccgagtgtaaactgcagaccttggtgctttggaactgcgacataactagcgatggctgctgcgatctcacaaagcttctccaagaaaaatcaagcctgttgtgtttggatctggggctgaatcacataggagttaagggaatgaagttcctgtgtgaggctttgaggaaaccactgtgcaacttgagatgtctgtggttgtggggatgttccatccctccgttcagttgtgaagacctctgctctgccctcagctgcaaccagagcctcgtcactctggacctgggtcagaatcccttggggtctagtggagtgaagatgctgtttgaaaccttgacatgttccagtggcaccctccggacactcaggttgaaaatagatgactttaatgatgaactcaataagctgctggaagaaatagaagaaaaaaacccacaactgattattgatactgagaaacatcatccctgggaagaaaggccttcttctcatgacttcatgatctgaatccccccgagtcattcattctccatgaagtcatcgattttccaggtgtgggtgaactgcctgtgactcctctcctcccccgcccctacccctcagggataatgagttcattgctgggctagatgttttagccatgattctgcctctgttttatacctgcacacgtccttatctttgttacatatgaaatatctgtatcacgggtatattgagagaaataaaggtgagagcattcacaaaaaaaaaaaaaaaaaaaaactcgag

SEQ ID NO: 230 - DNA, 1973 bp, Homo sapiens
ggcacgagcgtcacttccggcttccttcagtccgctggtcccgagcacgagctgtgaggggattcacttgtgtgcggaactcctcggaaccatggcgtccctttcccttgcacctgttaacatctttaaggcaggagctgatgaagagagagcagagacagctcgtctgacttcttttattggtgccatcgccattggagacttggtaaagagcaccttgggacccaaaggcatggacaaaattcttctaagcagtggacgagatgcctctcttatggtaaccaatgatggtgccactattctaaaaaacattggtgttgacaatccagcagctaaagttttagttgatatgtcaagggttcaagatgatgaagttggtgatggcactacctctgttaccgttttagcagcagaattattaagggaagcagaatctttaattgcaaaaaagattcatccacagaccatcatagcgggttggagagaagccacgaaggctgcaagagaggcgctgttgagttctgcagttgatcatggttccgatgaagttaaattccgtcaagatttaatgaatattgcgggcacaacattatcctcaaaacttcttactcatcacaaagaccactttacaaagttagctgtagaagcagttctcagactgaaaggctctggcaacctggaggcaattcatattatcaagaagctaggaggaagtttggcagattcctatttagatgaaggcttcctgttggataaaaaaattggagtaaatcaaccaaaacgaattgaaaatgctaaaattcttattgcaaatactggtatggatacagacaaaataaagatatttggttcccgggtaagagttgactctacagcaaaggttgcagaaatagaacatgcggaaaaggaaaaaatgaaggagaaagttgaacgtattcttaagcatggaataaattgctttattaacaggcaattaatttataattatcctgaacagctctttggtgctgctggtgtcatggctattgagcatgcagattttgcaggtgtggaacgcctagctcttgtcacaggtggtgaaattgcctctacctttgatcacccagaactggtgaagcttggaagttgcaaacttatcgaggaagtcatgattggagaagacaaactcattcacttttctggggttgcccttggtgaggcttgtaccattgttttgcgtggtgccactcaacaaattttagatgaagcagaaagatcattgcatgatgctctttgtgttcttgcgcaaactgtaaaggactctagaacagtttatggaggaggctgttctgagatgttgatggctcatgctgtgacacagcttgccaatagaacaccaggcaaagaagctgttgcaatggagtcttatgctaaagcactgagaatgttgccaaccatcatagctgacaatgcaggctatgacagtgcagacctggtggcacagctcagggctgctcacagtgaaggcaataccactgctggattggatatgagggaaggcaccattggagatatggctatcctgggtataacagaaagttttcaagtgaagcgacaggttcttctgagtgcagctgaagcagcagaggtgattctgcgtgtggacaacatcatcaaagcggcacccaggaaacgtgtccctgatcaccacccctgttaagcattcccacgtgctgtcgatctttggaccagtttctagcaaagttgtgtttgaaagatactctattaaagaagactgtggaatctgtttatcggtgcccattatatccttaagtttggatatttagctgaccttcgctttaacataggtctaatttatttgccgtgtcattttccatacaaatcagttgatttaaaaaagttcatttctcatactgtgcattaaaataaaaatttgaacaattaaaaaaaaaaaaaaaaaaaaaaaaaaaaaa

SEQ ID NO: 231 - DNA, 1361 bp, Homo sapiens
  misc_feature (903)..(903): n equals a,t,g, or c
  misc_feature (1031)..(1031): n equals a,t,g, or c
  misc_feature (1264)..(1264): n equals a,t,g, or c
gattcaaggctcactccagtccacgtttctagcttccgtcttccctcccctgcacatactactgcatgtacctccacagtcttcccttttgctttgctggcatctcatgtctttgttgcctatccaagctccctgttgaaattctatccatacttataattaacatgtcccttgattcatacagactttatcagcctgcccttagtttctgtcagacagaattaagtcctctgttcccatataaagcagatctttatagctgttttagtagatattgtttatatatctctctctttcacagccccttgtaacccatctcattcccatattctctttcaacccccatctctggattacagatagaaagggtgataagtttgtgggctgtgtctctttaatcttgtacctccacagcatctaggacagtgtcttgcctaaagcaaggatggaattaacatttgttaatacacgcttatctgtcagtcttactatcctcaccctgcttcataaggaaatwatattttattwatattttatttcaaatcagtaatactgcctgtcacatcactaaaacctcaaaaaacagaaatgtttgaaataagaattttcaggtttgccttgtgataactgtatactaactagttgaaagtatggattcagtatcttcaaagtgttctgatttgctaggactcactgttttcttgtgtttaatcttcagtttgtgaggtcatttaatttgtagcatttgcaaatgttatactgaaaaactctgagaatgaaataagtcactatactacgtatttttataaataaggaagtgcacaattatgtgacttcacatttcttgcttgcttgctttttttggggtggggacggagtgttgctctgtcacccaggctcgantgtggggtggtgtgatctctgctcactgcaacctcctattcccaggctccagtgatccttctgcctcagctgggactacaggtgtgcaccaccatactggctaagttttatattttttgttgagatgnaagtttcactgtgttgtccaggctggtcttgaactcctgggcttaagtgatccacctacttcagccttccaaagtgctgggattacaggcaggagccactgtgtccagcttacattttttgtataatcaacattagccagagtaaccacactttagatctgttggtcttcaggaaaagcaatatgtgtctggatgtggtggctcacacctgtaatcccaacactttgggaggnccgaggtcggaggatcacctgaggtcaggagtttgaagccagcctggccaacatggtggaactccatctctactaaaaaaaaaaaaaaagggcggcc

SEQ ID NO: 232 - DNA, 1162 bp, Homo sapiens
  misc_feature (1144)..(1144): n equals a,t,g, or c
ggcacgagcctgcattcctctcctctcttctttcctctctgtcccttctctttcccctctcaaccaggagaccatcatgtctctctgccttcctcctctcccctccaggggagtcaggctgactgtgaaagccatgagcttctctccctctcccactcctcctctcctactttcagatggatttattccttttttaaacaatgaacatcggaaatgagactgtggggtgtggtttctctctctcttttttttttaattttctttgttgggtttttgagcaacctcatgtccccttcccagggagccttttaatttacctcttagaactcaagtggatgggaagtagagcactatgtgtcagtatgctttgttttctgacacgattacacagcgaggctttaatgccatttgggtaggtgagcttctgcacttctgttgtgctgaactgtattttcttctctcatctcctctttgtctttttctcttttcctctccttcctgccttcttctgctggcctccttttctctttctttaccttccttggattatccttccaggttttcataataaatttatattttgtaaaaggattttgttgtaccaggttttgcatcctcactgaatctgactggctttattttcctctccaaaatcaggttttgttctcaacactttcccatcatgtctagtcactgttttggttttggcaccatcagtatcaaatgtacaaacggttcttgctaaccaacaccaggtatatctgatgttcagatgagttccaataaaaataatttttttttttttcaaaaggtgtctttttcttgagtgctggagggcttccaagcaagtccagacagctctgtgtggccccacactagtctagctctcatctggccaaagctgttatctcatttgtgtaatgggagtccttaaggtaaatttggggtccaaacttggagggctttgggggcaagaaagttggtgtgtgagttctgaggttggaaatgagttcaggtgtcttcttccaggggcagcatggtccagtgagcacatgtaagtttgggcagtagatcctctgagcctactttctcttctactcagtgaggatgctgctttctgggcaggtgattgtgatgtgaaggntagtaagtcatagacgtt

SEQ ID NO: 233 - DNA, 989 bp, Homo sapiens
gacctctctgcccccatttccactcctgctcttgggacacaggagactggttagatgagagtagaaagtttatttttgaacacccaggtgtggggtggctgggcgagaccatctgatggctttgggagccaggccgcagggtttagcttggatctgttgagtaggagacccttaaacatggccaccctgagcttaagagctggtcttggattttgctttcttttgggattaaccgagtattttgtgggattccatttgatcccttaactggctgaccagctataactcctggttatgttgttttagtgttgctccaggtgtcgttggaggagaagttgaaggtacaaggagtttgcaggagggaaggtggcagttaatgagccttcctggtgggaccggatggtgagggcaggggcatctggcccagcgtggactcgggccatagatgggaagtggtcatttggaggtcaccatctctctgacaccctgaccatagcacctgcacccctgtgctgagctgccaggtccccggcaccagcgtctgtgcagctcaggtgttgctgagccgtggcctccgcagctctccatcaggatttctcaagcttcattatgaattatctctgtgtgagctcacaacggtgactgcagagtcccaggtcatctctcagatcttctgaatcaaacatatggtctgcagttgccgcgcatgtctttggccgattttctgacaatcaaagtgaagaagttctgagctacgggaagttgggttgaaggcatgatggggaaaacatgattagttgacagcttttcccagagagtttttagacaaactcaaccttggtaaccttctcagtgggcttatgataagaaccttcaatgtgccaaaaaataaaaaaagcagcactccaggtagttaatctttgtttaaaaaacccttccccccacccagtcctgcaaacaaacaaacaaacaaaaaaaaaaaaaaaaaa

SEQ ID NO: 234 - DNA, 1861 bp, Homo sapiens
ggcacgagcttctttggtttaatgcaggatcaccagactctgtggcccaagacctgtttttgtgtagcccataagacatacctttctaagtactatagctgaaaaacatcaaaagagtagtaatattttgtgacatgtgaaaattatatgaaattcaaatttctgtctgtaaacctcactggaacacagccatgctcattcgtttgtatatggtctgtggctgctttctccctacaacggtagaattgaacagttgcatcagagaccttatggcctgctaggccagaaatgttaagccctttacagagaaagcttgctggctcctgtttaatgctttaactgccctactgaaaggcaggaggttgaaaaaatgatggtagtcaaaaggaatgcatgaaatcctgttatcttctgttagctgattgcaagtagtacacaggatatatttgagacatctcttttcctatctcccaccaaaggataattcaggcggatctcagtgcacaggcacaggcatttgcctcattcttgttttgtctgttttgaatttagttatgggaatattttaatatctctcaaaaatagggtatctggtgtgagtcagaatgattatagaacatgcttgcctggagaacaggaaatgcgggatccactcctggtgtgctgttagctgaaggacgtcagaactgtcctttaacctccctgcaggtctctaaatggtaggattgtttggggattacactagatcatctctaggcaccgttcagctcagtagagacattgctgcatggtggaaggagtgacctcagtgtgaatcctggttctgtccctttctgcccaggagaccttgagcagcttatctaaatgctgtgtgcctttgttagctcatctgaaaatgtggctgtaagaatgacctcatgagaatggactgagatcatattcttaaaactcttggcactaataggtatttaatctactataactgtgaaaattatgtctgtgaactcttttttttttttttttttgagacagagcaagactccgcctcaaaaaaaaaaaaaaaaagtaccttggggatttttctgtttttgtacttacaggcctatctcatactttttaatggctgcttagtatgccatagaatagagaaaacacagtttatttaactaatcctactaaatggacatttatttctaattttcactctaatagtcaaaaaatgaatttagaaaatgcaaataatttgtgtttttagggtctttcatttcttatttagttatataattattctagcttttaaaaaagcttattagggtgggaagtgcctcactgatactgtaatgttagaactacactgaaaactttgtttcagaagaaaaagttgaatgtaagttctctgtgactgcggacttcattagcattgtgtcttcagggctttctttttaggtatgattataaaccaaaagcactataagtggttacataattttcttacagtttgtatacctcattcaaaagaagcatacatctctaaggattagaactagaaccataagccaggtgtggtggctcacacttgtaatcccagcactttggtaggctgaggtgggaggatcatttgcacccaggagtcagagaccagcctgggtaacatagggagaccccatctctacaaaaaaaaaatacaaaaattagccgggcatgctggctcatggctgtggtcccagctacttgggaggctgcggtgggaggattgcttgagcctgggaggtcaaggctgcagtgagctgtgattgtgccactgcactccagcccaggtaatagagcgagaccctatctcaaaaaaaaaaaaaaaaaaaaa

SEQ ID NO: 235 - DNA, 1117 bp, Homo sapiens
ggcacgaggagaactaagcattaggagaagcagcatggggctcaacagtgaagtgacttgttccaggcgggtcctcaggagtggctgtgcagccccagtcacttttcatcacaccggagagggacgcacaaccccagtcctgtttagttgcagatataccgagaagggagagcccacaccgaccttaaggtcacttgggccctgaatcctatgcctctcgttccactgcttctcagttgccctcctacctggctggccaggtttggagtctctctcccctgctctggcattccagtcttggcctgaagcacgctatgcctctcatacagtctgccttttctagggtccaagcagcatcccaagttctgttgagatgcagcttgcagtccaggaggacaacggtcacccccatcttcccatgtttttcttgctttaagccctcccctaagctttcacatataatcaccaggggttcagaaattgtcagccagttctccttatgctttaagtagattttcttggggccagatgtcttgaaaaacgctctcctgactcagcagttcctggaatttttggcctatcatttatctcactgttctgagtttacttgtaagcctcttggcttaatgtttgaatcaagatgagcagtaataacagcttcttgtgtaccaattactcagaactcacttaaattgccttaacactttttaaatgttcttacacatttgaaattctttagggagggatttccagaactttcctaaatttctccacccatggcatgacagtacttagaggggcaagaagttcaattttagaataagctcttctgggcgcgatggctcatgcctgtaatcctagcactctgggaggccaaggcgggtagaatgcttgagcccaggagtttgagactagcctgcaatatgcgaaaccctgtctccacaaaaagccagacatagtggtgcatgcctgcagtcccagctacttgggggcgctgagttgtgaggatcacctgagcccaggaggcagaggctatagtgagccacgatcgtgccactgcactccagcctgggtgacagggtgagacgctgtcgtctcaaaaaaaaaaaaaaaaaaa

SEQ ID NO: 236 - DNA, 1187 bp, Homo sapiens
gagatgggtctcctggtattagaaaggagagcagacgcctagagttctgacctcttgggcctcccctaaacaaaaagcatagccccttcactaccctagtaacaagtatgacctgttgcctgttgaggtcaggtgtacctgtgtgtctctctctgtgatgtatgtgggcttggtgtccacatcaatgtgcgtgaatactcctacccacagactgctactgtgccaatatagaggytcataagaaagataaaagagaaccagcagaaccccaggttctgcctctccttcctccctttgcccagataaaggtgtacagtgtttgtggtgaggctgctggacactgctgttttgggctttctagagagaatgcaaacatgcaaaaacagtgtggtagtgtaggcagaacaagatctagaatcagaagacctggagtcgaatctcagctccaacacccactggatgaacgtggacaagctgcttgatctctcagatcctcgatttcttcatctgtaagatggaaacaatatgtgtcttttctaaggggaaagatcaaatgacatcatgtatgtgaaaatgcttagaaatgggtgatgatgatgatgatgatactgattattagggtatctaataaagttggggaaagaacaaaatccccccctcacaccctattgcaccaccagccttctccctccctgctcaattatacccatgttatagggaaggaaatagggaagaaacttgtctaaggtcacatggatgttcgcaacaattgggatgcagaacttgatctgactcccaggccaggtttgattttgatttgcagtggcagagaggactaattttttactaggttctgagccctgtactgaactctggattgccctgtacttggtggtggtatacagttcagcagtttttagcatatacacgaatttgtgcagccayaaccactatctaattctagaacatttttatcacccccaaaagaaatcatgtacccatttgcagtcacttgccattccctcttctccccagccctgggaaaccactgacctaccttatatctctatgaatttgcctaatctggacatttcatataaatgcaattgtacatgtgaaaaaaaaaaaaaaaaaaactcgagggggggcccgagtacccaattggccctacgaagaggcgaacagag

SEQ ID NO: 237 - DNA, 1040 bp, Homo sapiens
gtgattgtctctttctgttttgagttttgtttgcgtgtatcatttttgttctacattttgggaggggaaacattttccgttaaggaaggttgttgccagtggatttgactccaagggactagagtgtcgtggtgggggtggggaggggctgcagggtgatcattggctactgagcctccacaragagcatgtggtgccctgcctttgggagggtattttgctctcgttagttttgtgggcagcctcagattccctgttgagttgctgttaagaaatggagatttctggctctcattgggtaaggttttctgagttttatatcttattagatcacatccctttacccagaacaaatgcttcactgtcttctgattggcagtactcctgtggctttgtgccttgactcattttgttgtcttcagccttgaaggccccttcccacatggactgacatccactcatgtgcctgatccctgaagcctcccagcacccattcagttgcatccccagggcacaggactttgatctcttctgttgccctcgctaggttctccctggtgggttagtgctttgtatctgtctctctgcccctcactaattctacacccatgagaattagacattattctccttaaatatataaggaccatataatctgtatctttttggtgtgtgtatatggtatctggcacatggatctctgattaccagcctgacaycaacaaatcccctcagttacaacgtataggttaaacaaagcttttaaaagctcatgtggtatgacctcaaggttgctaacctggtcactcatggtaattagaaactctgattggcagctttgtatttcttgactaaaaacctaaataaactgattaggttttaggcgttctttcaaagaggttcttgagaagattgagaactatcctatttggtgcttagtgaaaagattttgaattactgtacgtaccagttgttgccatttctttattaaattcagaagtttttttgccaaaaaaaaaaaaaaaaaaaaaactcgagcc

SEQ ID NO: 238 - DNA, 1460 bp, Homo sapiens
acgcgtccgcgcagaaccaggaaagtaacggctacagacagtgagaaatagtttcgctcgccggctagaaaaactctgtcggtaccaaccccagagcgttgagagcagcccacctccacgcttccttaacggagaggtgcaggactcagacttcaccagcccactcggtcccagccttgtacgcaaagagacgtcaaggacgcgctctcccgcgtccaggcagccccagcttgctggcttgcctgcccgcctgcgtgcagcactcggccggcgtgcagcatgaccctgtggaacggcgtactgcctttttacccccagccccggcatgccgcaggcttcagcgttccactgctcatcgttattctagtgtttttggctctagcagcaagcttcctgctcatcttgccggggatccgtggccactcgcgctggttttggttggtgagagttcttctcagtctgttcataggcgcagaaattgtggctgtgcacttcagtgcagaatggttcgtgggtacagtgaacaccaacacatcctacaaagccttcagcgcagcgcgcgttacagcccgtgtcggtctgctcgtgggcctggagggcattaatattacactcacagggaccccagtgcatcagctgaacgagaccattgactacaacgagcagttcacctggcgtctgaaagagaattacgccgcggagtacgcgaacgcactggagaaggggctgccggacccagtgctctacctggcggagaagttcacaccgagtagcccttgcggcctgtaccaccagtaccacctggcgggacactacgcctcggccacgctatgggtggcgttctgcttctggctcctctccaacgtgctgctctccacgccggccccgctctacggaggcctggcactgctgaccaccggagccttcgcgctcttcggggtcttcgccttggcctccatctctagcgtgccgctctgcccgctccgcctaggctcctccgcgctcaccactcagtacggcgccgccttctgggtcacgctggcaaccggcgtcctgtgcctcttcctcccaggggccgtggtgagtctccagtatgttcggcccagcgctcttcgcacccttctggaccaaagcgccaaggactgcaagccagaagagggggggctcacctcttatcctggggacccactgcacaagcaggccgctttcccagactttaaaatgtatcaccactaacctgtgagggggacccaatctggactccttccccgccttgggacatcgcaggccgggaagcagtgcccgccaggcctgggccaggagagctccaggaagggcactgagcgctgctggcgcgaggcctcggacatccgcaggcaccagggaaagtctcctggggcgatctgtaaataaacctttttttcttttgttttttaaaaaaaaaaaaaaaaaaaaaaaaa

SEQ ID NO: 239 - DNA, 1105 bp, Homo sapiens
ggcacgagcaaaggttctttgtaatttgaagaaaaattttgttttagttatctgctaagagggcatgggtttctttgtacttctcttccctacgtccagattagcttaagcaatagaaggaactgaaaagagcagaaacagttaagtgttaattaagaagcacttacagtcttaagaagttactcggggacttaacgtaaagttctatgatacatgctattaggaacttattttaaggtgtaccttatattcaagtgtttttacattttcttatataaaagtaggaagatgcatttccatttacaaaaaagctgaccaaaagacataataaaaatcatctcatatgaccataaaccttttaaaattagaatttaaaagagtaactgtttttcagaggtattttggatactttggatagaatttcatgggtaaattctgtgcggagtatccaatggttttaaaaatctagaagagaaggattttccaaaagggtaccagccctgccctccaggatatggtggccaggatatggtgggttggccaaattatccattaggctccaaattccttaaaacctggaattagttttttgggtttgttgccaaaagatttgaccagaggcagaactttcctttggaagaacaaagaacaggttttctgtagctgagtagggaagaggaaatagcaacattgactttactgagacactggaacttgaatagagtgtaagtgtaaaatattaagatgtatttaagaaaataattctcaaggctcgttgcatagagaagagggtaagggcttgggaatcttaaattaatggtcttttaccatcatacttaccgatgtgttccttgatacacacaattgtggacttatttttaaagtttacacactgttagcatttaatcttaggtcctatatctacagataggtatgaggctacatatctgccattgttagtcccaagaatgctctaaagcagggctgtcccaatgttttggcttccctgggccactttggaggaagaataattgtcttgggccacacaaaaattcgctaacacaaacaatatagctaatgaactttaaaaaaaaaaaaaaaaaaa

SEQ ID NO: 240 - DNA, 3342 bp, Homo sapiens
  misc_feature (2005)..(2005): n equals a,t,g, or c
gcggctgtgtgtcgccggagccgaagcgcgcaggcccgtcccggtggccggggagcgggcgggtgggggcgccatgtggttcatgtacctgctgagctggctgtcgctcttcatccaggtggccttcatcacgctggctgtcgcggctggactctattacctggcagaactgatagaagaatacacagtggccaccagcaggatcataaaatacatgatctggttctccaccgctgtactgattggcctctacgtctttgagcgcttccccaccagcatgattggagtgggcctattcaccaacctcgtctactttggcctcctccagaccttccccttcatcatgctgacctcgcctaacttcatcctgtcgtgtggactagtggtggtgaatcattacctagcatttcagttttttgcagaagaatattatcccttctcagaggtcctggcctatttcactttctgcctgtggataattccgtttgcgttttttgtgtcactttcggccggggagaacgtcctgccctctaccatgcagccaggagatgatgtcgtctccaattatttcaccaaaggcaagcggggcaaacgcttagggatcctggttgtcttctccttcatcaaagaggccattctacccagtcgtcagaagatatactgacccccatgcaggcaggatgtggggggcaagatcaggagagtcaggcccctgggcctctatgccaggtggggaccagaagtcgggaaggcacctaccacctgccctggctttcttcccctcaactctggagccccatccccaccctccttggggggctcagcttggctcagatctgatgcttcaagaggctgtaacctcagagggcaccaaggagggtggcagagcctgcttagccaggaggccgaggtccctcagtcctcccctgtcccttccaaggtgggtcaggaggttctggccccgctggggcaggcagggcagggtctgtgaagcttaagagcagatggtgacaagttctctgggcaggtggccatggggaggggccatggcttggcatgtccaacagaaatagtttttgctgttgaacggtgatttctgtccaagtgcagatttccgtttgaataaagcttcgcttctaggtggcactgtttgccttaataccctgacagttcatcttcctttcttcctgctaaccttctgctctggactggactcacttttctgctccagggactccttttctgggtttgggtcttgcccttcccaagggactgttcttgtggcccttaatgggaagggggcaggggtgaggagctgagcctgctcaaggagtgggaagtggggctataggcagcctctctgatgcactctcttccatctctttccccaaggctccgtgactgacaaactgggagtaggagaggggacaatttaggactgggctagattttcagaagaacatctacaatatcctatttataaatcttcctctgggaaaaggagtggtttctggctgaatactatcttaggctcaaggagaaacaaaataaaaattagcttccaggcagcctgtttttaaagaaatgggactaatgggagaagctgtttgtcactctaagagcatccaagccctggcccgtctgtgcactcttggctcctggggagatatatctgccttctaagaaggcaggccaggtcttgggcacagacctgcatttgttgaccttgcactccaactatagtgccttgcaagtgctcaacagtacatatttggaatgaagtccctatgagagccatttctggccatgttctatacctcaaagtgaggctggcaggtacagagatgaactgtacacatgtgatacatttaagccactggaaaaacccctgtgcttgamaatatttcctctatatcatgcctggagttccatcatagcccttcatttccttggctttagcatttaccttctcttaagaataccagctttcccctttccctgaganggaagagcacatgttggtctcctcttagtgtgaacgagattgccaggcccttttctcctatgcacaccaggatagacaaggcaggggatactggcagcctgcatcatcctcccattgggctgacagctggccctactttcctccctctgctgcttggtccctcaccttgatgatgtggcttcgccccctccactctactgccagtgttctcccaggggttgctaaatccagcagacccctttcctgtcttactagatctgggcagcatttgacatggctgatcaccccttgcttcttggatggcacttccctggcacctctgtggctagttgtcctacctccctggctgttcctttcaggcttccgtgcaggcttctccacttgcccatgcacagtagggtctttcagggttctgctgtgggctccctagggaagcccatccatctggatggtttcaaggatggtgaggaatttagagttgacctccagccccaacatccttcctgatcacctgaaccacagttttgctgccctctaggtgcacagacaattcaggtccatggcccagatggtacttgctgtcttctgcaaacctgccccttctgggtacttcccttgaccccgagatcactcaggagccagacaggaaacttattctattcctgttttctctttctgcccaccacatccaatctctcaaaacggtcaggtctaccttaacatctcttgatttgagccactcccactgtcatcagctttcacctggattatcgtgacagcctcctactgcttctctatcatgtggccagagctatcttcctaaaatgcattgcatagttgatcaagtcactctctggcctaaaaccttccttggctccctgctgccctcaggataaagtctggacccctcagcatggcttgtgagactcatggtgtccttgtccctgctcacctctctggtctcatcacttgccttcttgcattctgggtcccagcctcctgtatccagagatgcagtggctctccattgccactctgattcctcctttcttttggtcacagagaaagggtactttctctgtcaaatctcaacttagacttgacttcctccaaggagctttggctatactctctcctcccgacccccaccctggcatactacacagatcactctgggctcacttgcctgcctaatggtcatctccccagtagactgtaagctccttgagggcaaggattgtgttggaatttttgtattaacagtgcctggcttggtgcctggcacctagaaagcactcaataaatgtttgtttaatgaaaaaaaaaaaaaaaaaaaa

SEQ ID NO: 241 - DNA, 1827 bp, Homo sapiens
  misc_feature (601)..(601): n equals a,t,g, or c
  misc_feature (918)..(918): n equals a,t,g, or c
  misc_feature (1825)..(1825): n equals a,t,g, or c
gaattcggcacgagatttattattatttaactcctgcagtgagcaaatgtgagtaacatttgaatgaaaataaattttcagcttatttacatgaggtaataaacttgactttatcaagtaattgtgggagtggggaataaacctcatctggggatgggaaataaacaccactataaagaaaccactaagatttgaatgccttgcttgttttaagtttgttgatgcaggtattgcattgattatgcatcagggaactggaaaccaaggcattcgttcttttaagaaaatagattcttaagcataggagtctcatgttttaagaactatttctaagttcaactaagatcgagtttttctgtctctattggcaaktwtyaagaggcataaactttaaagaaaaagggaaaatgtgataaattaatggaatagactccataggcttttattccaacttttatatgatgcaagtctatgtgcttctgtctgactcacttatttctgtwatcaagatgaactagtgaagggaatttctctctcaatgctaaattaattacatgcattggggatagtcatccagagagagggaaggtgaccttctgangttgtcacycagwaaataattgcctgagctgagaatggcatgtgggtcacagaattggtgtttctggatttaggaaatacttcctattttttttccactcctgctggctaagccaagaatggcaaatatgtgttcatgctgctgcattcccttccaggcccataaggacgttggcaatccttcatagccttctcacaggcggaacctggattaatttaagaacccttttgtgcctggcttttcaggaagccagtaccaatcaattggtgctggcatgaagcatgaaactatttgccatctctgagttatgccagtanaattggcatgcttctggtttccatgcataccactacctttcatgggttttattgtgcacaaactttgcatgcctttagaatgatatacctacgcaggtatataatttgtcaccctgatccaaaaagggkaagawgccmagaccatagtgagcctcttattagaaagctcttggcttcagtttttgacacttccctgactctttatattcacgttatcataagctgccaaattcttgactctataaattgccctttaacagcttattaggaattccaactactgtattctagcaccaactacagcatattcagagcctctgcaattcctaaaagtacacttaaaccaaatacatgggccagcctgcatcttttaaaatacattttatgcctttacacttcgtattaagttgggtgagaattatgttttaatctacactctatcttgaattgtcttacattttattctgcttaccagggttcaggttcttatccaaaatgaagttaaatttttttctcttagatagttgcattcctgaagcaattagaacagcatgatcccttggtgtttattgacattctcatcattgtctcattggctttaggtttaacatgcctcatgatgacaacaacaaatgtaaagaagaaggagttaagagtccccagcatgtcatggctccaacactgaacttctacaccaacccctggatgtggtcaaagtgtagtcgaaaatatatcactgagtttttagagtaagacttgaacattcttttagcacaaacttctagtgcctggcctacatgtagtgaactaattgtgggaaagacaatatgaagtcaaacattccttttgagttatttttgttgacattccttggagaaggcaaaaaaaaaaaaaaaaaaaaactcgnag

SEQ ID NO: 242 - DNA, 2731 bp, Homo sapiens
  misc_feature (579)..(579): n equals a,t,g, or c
  misc_feature (1532)..(1532): n equals a,t,g, or c
  misc_feature (2362)..(2362): n equals a,t,g, or c
gctggggaaggtgcagggggcctgggagactgcctctccgaagcggtgaaaccctcacccttccgtccctcccagccaccctccctaaaacttcccctgacagagggtggcagccccaggctctttgcataatcctgtggcttcgctgtcttcacccagcaccagcggacagggaagggcagagaaggccaccatggcgacactcctctcccatccgcagcagcgccctcccttcttgcgccaggccatcaagataaggcgccgcagagtcagagatctacaggatcccccgccccaaatggccccggagatccagcctccatcccaccacttctcccccgagcagcgggccctgctctacgaggacgcactctacactgtcttgcaccgcctgggtcatcctgagcccaaccatgtgacggaggcctctgagctgctgcgatacctgcaggaggccttccacgtggagcccgaggagcaccagcagacactgcagcgggtcagggagcttgagaagccaatattttgtctgaaggcaacagtgaaacaggccaagggcattctgggcaaagatgtcantgggttcagcgacccctactgcctgctgggcattgagcagggggtargtgtgccagggggcagccccgggtcccggcatcggcagaaggctgtggtgaggcacaccatccccgaggaggagacccaccgcacgcaggtcatcacccagacactcaaccccgtctgggacgagaccttcatcctggagtttgaggacatcaccaatgcgagctttcatctggacatgtgggacctggacactgtggagtctgtccgacagaagcttggggagctcacggatctgcatgggcttcgcaggatctttaaagaggcccggaaggacaaaggccakgacgactttctggggaacgtggttctgaggctgcaggttctgacgctcacgggctgggcatccccgcctgtcaggacctgcgctgccgagaggaccagtggtaccccctggaaccccgcactgagacctacccagaccgaggccagtgccacctccagttccaactcatccataagcggagagccacttcggccagccgctcgcagccsagctacaccgtgcacctccacctcctgcagcagcttgtgtcccacgaggtcacccagcacgaggcgggaagcacctcctgggacgggtcgctgagtccccaggctgccaccgtcctctttctgcacgccacacagaaggacctatccgacttccaccagtccatggcgcagtggctggcctacagccgcctctaccagagcctggagttccccagcagctgcctcctgcaccccatcaccagcatcgagtaccagtggatccagggtcggctcaaggcagaacagcaggaggagctggccgcctcattcagctcctgctgacctacggcctctcctcatccggaggttccgctctgtcttccccctctctgtctcggactccccagcccggctgcagtctcttctcagggtcntggtacagatgtgcaagatgaaggcctttggagaactgtgccccaacaccgccccattgccccagctggtgactgaggccctgcagactggcaccactgaatggttccacctgaagcagcagcaccatcaacccatggtgcagggcatcccgraggcaggcaaggccttgctgggcctggtacaggatgtcattggcgacctgcaccagtgccagcgcacatgggacaagatcttccacaataccctcaagatccacctcttctccatggctttccgggagctgcagtggctggtggccaagcgggtgcaggaccacacgacggttgtgggtgatgtagtgtccccagagatgggcgagagtctgttccagctctacatcagcctcaaggagctctgccagctgcgcatgagctcctcagagagggatggagtcctggccctggataatttccaccgctggttccagccggccatcccctcctggctgcagaagacgtacaacgaggccctggcgcgggtgcagcgcgctgtgcagatggatgagctggtgcccctgggtgaactgaccaagcacagcacatcagcggtggatctatccacctgctttgcccagatcagccacactgcccggcagctggactggccagacccagaggaggccttcatgattaccgtcaagtttgtggaggacacctgtcgcctggccctggtgtactgcagccttataaagrmccgggcccgcgagctctcttcaggccagaaggaccaaggccaggcagccaacatgctgtgtgtggtggtgaatgacatggagcagctgcggctggtngatcggcaagttgcccgcccagctggcatgggaggccctggagcagcgggtaggggccgtgctggagcaggggcagctgcagaacacgctgcatgcccagctgcagagcgcgctggccgggctgggccatgagatccgcactggcgtccgcaccctggccgagcagttggaggtgggcatcgccaagcacatccagaaactggtgggcgtcagggagtctgtcctgcctgaggatgccattctgcccctgatgaagttcctggaggtggagctttgctacatgaacaccaacttggtgcaggagaacttcagcagcctcctgaccctgctctggacccacacactcacagtgctggtggaggcggccgc

SEQ ID NO: 243 - DNA, 1008 bp, Homo sapiens
ccacgcgtccgagctatcagagtcatatcaagactgatcagtattaattatctgcatttggaagaagaggaaggaatatagacagtaaaatattatatttctatttgtgcttaggacacgtttagaatagagtttttgtttatcagctttcctaatggtgagatttggatcaaaatgcctttgcttttcctaaggctgcccaaccgtaaagggagctgtccctaaggagacgtcaggccagaagtgaaatttggctgaaagtaatttgtttatggattttaaaagttgactgttgggcaatcatttggggttaaggtttaatcattctttctcgtaatggtaatgacagtacattggactcttagaagacttttaaaatgaatataaaatgctttgttatgtgtggtggcctttatctggccagcatccttgtgacgtggagagagcatggctctcctcactttctggatgaacacacaaatgtgctgagaaaatgcatgattggttcaaagttgcaaaatcacctcccatcaagaatcattcctataatatgtacagcctctccaggagccaatggcttcatccaaagaggatccactgagctctgggttatacgaaggcagtatcctagagtgagagtcttcccttaggatgaaaagacctttagaaggtgataagaaccagaatccactcaatccccttgatgtaagaaatgggaattgtgctcagttctctctgcaggccttgctggacccaggttcagtcatgttctgtctctcaggtcccagtctgaattcctgttctgtgtgtgctctgccaaaaactttgttcaaaagtttgggaaagggctgggtgcagtggctcaggacagtaagcccagcactttggaagacctagagggagaatcgcttgagcccaggagtttaaggctgcagcaagcggtaatcatgccactgcactcctgcctgggtgatagacggacaccctgtttctaaaaaaaaaaaaaaa

SEQ ID NO: 244 - DNA, 2085 bp, Homo sapiens
ccacgcgtccgggggacagagccatcctcctttgacacctggtcttcagttctgtgcccaacgtatatagttttgacaatgaccaggttggactgtttaatgtctttcaacttaccacgtaatcctcttgtagggatcacatctttctttatgatattgtatttctctacctctaacagtaaaaattccattcaacccttaaagctcacttcaaattcttctttgagaagtttttcctttctccgcaaccagatgtacatatttgaactctctttgtacttggagggcacttctttcgtggtagttcttttatttttattaatctctgtatccttagatagtcctccaacaaccaaaggttggggactctgtcttacatatctgggtgccctcatagtgcagtaataagtaagttgattatatacgagctatgtaacttatattttttaatggttggatatcactgagtttttttttttaagaatttttttattgaggtaaacttcacataacataaaattaactattttaaagtgagaagttcagtgccacttagtattgttaacaatgttgcataaccaccacctttatttaaagttccaaaaaaaatgttctcctctaaaaggaaaccccatcccattaagcagatactctccattccttccttcctccagcccccagcaaccaccaatctgctttctgtctctatggttttatctattcttgctattttatataaatcgaattgtatgagaccttttgtgtctggcttctttcacttagtacaagtttttgagatttatttacatagtagcatgtatcaacacttcatttttatggccaaataaaattgtattatgtgtttataacacaatttatttatccactcattcattgatggactttgggttgtttctgacttttggctattgggaatagtgctgctatgaatgtttgtgtacctgtatttgtttgaatgcctattttgcattctcttggatatatatctaggagtggaactgctgggtcatatgttaattctatgtttagctttttgaggaacagacaaactgttttccacagcagttgaaccattccacattcccaccagcaatgtatgagaattccaatttctgtccacttcctcaccaacacttattattttccttttcctttttttaaaaaaaataagttatggccatcttagtgggtgtgaagtggtatctcattgtgttttttatttgcatttcctatgtaatgagctagaaactaaagtacaaactagatgggacatccagtccctttgatagataatgctgagtaaaaaatgagatgaaagacatttgtttgtttttagaacatgagtgacagtttgttaaaaagctttagaggaggaatgaaaacaaagtgaagtacacttagaaaagggccaagtggacatcttggatgtcaagtgcctagttcagtatcttttttttttttttttttttttttgagacagtgcctcactctgtcacccaggctggagtgtagtggcatgatctgggctcactgcaacctcctcctcctggattcaagcaattctcttgcttcagcctcccaagtagctgagactacaagcacccaccaccacacccggctaattttgtatttttcagtagagacggggtttcgccacattggccgtgttggtcttgaactcctggcctcaagcaatccgcctacctcagcctcccaaagtgctaggattacaggcataagccactgagcccagccctagttcagtatcttttatgtaaattataaacatctgcaacattatgtatcatatgcagatacttattgcatttcttttattagtggtgaaagtgttctatgcatttattggctcttgaatttcctcatctatgaattgtcattcacacacctacttttctgcttcgtttttacatatgtctttgcctattaaagatattatccctctgttttatattttctctcattcttgtattgccttttaaattttgttatgatgtttcattaataaacagtgttttgttttcctctataaaaaaaaaaaaaaaa

SEQ ID NO: 245 - DNA, 536 bp, Homo sapiens
gatttgaagagggcttgccttccaacctataggcactatatatgcttttggaaaaagtaattaggttaagatgcagttgttttgttttgctttgtttttcccttagctgggttggggtttctagcagcaatgatgtacaggtggatcttttttcacattaacactaccagctgctccatggctatagtgcttaggaatatctcagaatttcaacagatctatcagctgcaatatctaggagtcttgccaacacagagacacattcacatgctgaaaagagcatgagttgaaggcacagctggggacttttgatgcaggtccagaactggatggttgtgaagccattagagatatttaaattgtccagaatttcaggctctgctttaaaaactaggctacaaaccctcattcagaaagaggtcagtaatatgcctgtgagttagaaagatactggaaacatttcaatgccaaaagtaacatttttttccagaatgctatgactaaattttttaaaaaaaaaaaaaaagggcggccgc

SEQ ID NO: 246 - DNA, 1898 bp, Homo sapiens
  misc_feature (265)..(265): n equals a,t,g, or c
  misc_feature (1854)..(1854): n equals a,t,g, or c
  misc_feature (1859)..(1859): n equals a,t,g, or c
  misc_feature (1888)..(1888): n equals a,t,g, or c
  misc_feature (1897)..(1897): n equals a,t,g, or c
gggtggagagagttcggcgctcagagaggtaccagaccatgaagctcttcacccagatcttcggggtcggtgtgaagactgctgaccggtggtaccgggaaggactgcgaaccttagatgacctccgagagcagccccagaaactaacccaacagcagaaagcggggctccagcaccaccaggacctgagcaccccagtcctgcggtccgatgtagatgccctgcagcaggtggtggaggaagctgtggggcaggccctgctggngccaccgtcacgctgaccggcggcttccgcagggcctcatcctgtaccaccagcaccagcacagctrctgtragtcccctacccgcctggcccaacaragccacatggacgcttttragagaagtttctgcattttccgcctaccacaacctccaggggctgctgtggggggatccacgaggccctgcccatcctggaagccgtgagagtggacttggtagttgcacccgtcagccagttccctttcgccctgctcggttggactggctccaagcttttccagcgggagctgcgccgcttcagccggaaggagaagggcctgtggctgaacagccatgggctgtttgacccggagcagggaagcagcagtggcaagactcctaggtcacggaagtcctgcttctgttgcagaagacatttttccamgmggcttcagaggaagacatcttcagacacctgggccttgagtaccttcctccagagcagagaaacgcctgagcctgcctgtktcccccacttccactcaggaaattgggctgcccccaacctggccactgaatgtctccaggcagatatgctgccccctgacccccaccttcacccctccccgccaaggcctggctcttccggaggtcaattgtgcctgcaggatcagttgagcccctgctggtgtgctgcagggtgtgatgaggtgggagccctcagtgccagcctcatcactgtgtgaccctgggtctgctcttagcctccccatggctcacgttcctgccctggatgggatgtgagtggggcccacatcgtggagctgtggtggggcctgcagtcatgaatggcaagtggtccctgatgtgcagtgtctcattagttgcactgcagttaactgtggctcctgcagggcaccctgcccagaatgcccagaagagaaccatgcatacctgcactgcatttgagagccatgagctggaggctgtggttcgtgccagcaaggagcctactgtctggtgtgctgtaggcatctggagagggagagggcctgggtaggagctgggaggaagataattttcaactatggggcttcagtactgcagcgccccgagccaggctctgtgcttctgcctttaaggcctgttctcagcacaatgtctcaaaaataggtcatatcctgccactcccgtcgcagagccctttaatggttccaaaccctaagtccacacatagcccctggctctggcatctctccagccccactggccccgagctgcttgactcaccggcttcctatttgatgcacccaggcccccttgtggccaactccctccccttctcactgaggcagaagcactgaggtgggctggacatgggtgccctccacgtccctcatatccccaggcacactctggcctcaggttttgccctggccatgtcatctacctggagtgggccctccccttcttcaggccttgaatcaaaagccactttgttaggcgaggatttcccagaccactcatcacattaaaaaatattttgaaaacatgcagtaaaaaaaaaaaaaaaaaaaaagggcggccgctttaaaaggatccttcganggggncccaagcttacgccgggcattgccaacgncataacttnt

SEQ ID NO: 247 - DNA, 1982 bp, Homo sapiens
  misc_feature (35)..(35): n equals a,t,g, or c
cggacgcgtgggcgagcccgggcgccggcgggcgnccgtcgcgtctgacagaccactgcagaccacgggccgaggcccagcgcccgtccgcagcgcgsscggcatggcggcgacaaggagccccacgcgggcaagggagcgggagcggtctggcgctsccgccgcaggaagtgaccaagttcactcctggatgctagctacaagccaagccttagacactgtctggagaatggcaaaaggctttgtgatgttggcagtttcatttctggtggctgccatctgctacttccggaggctacatttatattcagggcacaagctgaaatggtggattggatatctgcagagaaaattcaaaaggaacctcagtgtggaggcagaggttgatttactcagttattgtgcaagagaatggaaaggagagacaccccgtaacaagctgatgaggaaggcttatgaggagctattttggcggcatcacattaaatgtgttcgacaagtaaggagagataactatgatgctctcagatcagtgttatttcagatattcagccagggcatctcttttccatcatggatgaaagaaaaggacattgttaagcttcctgaaaaactgctgttttcacaaggttgtaattggattcagcagtacagttttggtcctgagaagtatacaggctcgaatgtgtttggaaaactacggaaatatgtggaattattgaaaacacagtggactgaatttaatggcattagagattatcacaagagaggaagtatgtgcaacacccttttttcagatgccattctggaatataaactttatgaagctttaaagttcatcatgctgtatcaagtcactgaagtttatgaacaaatgaagactaaaaaggtcattcccagtctttttagactcctgttttccagggagacatcctctgatcctttgagcttcatgatgaatcacctgaattctgtaggcgacacatgtggactagagcagattgatatgtttatacttggatactcccttgaagtaaagataaaagtgttcagactgttcaagtttaactccagagactttgaagtctgctacccagaggagcctctcagggactggccggagatctccctgctgaccgagaacgaccgccactaccacattccagtcttttaagtccgctgggggccgaacagcagtgctcaccagtgacggtggtcacagttgcaataaagtctctctctgaaaccaaagctagcatttcagcatggaaggaattaggaccttttcttcaggattacaggtacactggatgcagccatgcatggatggtttttctttatttttcagtgatttcctctgaagcagctgcactgatacatttgggagttggtggcttgactttgtccataaggggcgtggccacttcacatgatggcgggcctttaagagcacaaagaagtttaatatggacaacaacaggaaaaagcaagaagaaaacaagtagggaaaaacagctaacctggagagaaagaatttctttaacctttatgttcttcattaaaaatcttatcttggactgatttgagggatttttagaaacatggccttattttatataagcattaccttcccaggaatctttgttgtatattaatttttgataaccatttgattaactttaaaattaagtatatgtgtgtatatatacatatgtatgtttatatacacacatgtatctgtatagttttatatatacatatatacacatagacatacagagaaccactactttgtaatagtgtacagtttgttttatatctctttactttttttgttactattttatctggccagcgtaatagttttatttagattttttaaaattctgtagattaaagcaaatgacagttattgaactatcacaaaactattaaactgtggtacatttaaaaaaaaaaaaaaaaaaaaaaaaaaactcgag

SEQ ID NO: 248 - DNA, 1478 bp, Homo sapiens
  misc_feature (1385)..(1385): n equals a,t,g, or c
  misc_feature (1390)..(1390): n equals a,t,g, or c
  misc_feature (1468)..(1468): n equals a,t,g, or c
gctggaggtccttctttctgccacagtcagctttcgttgaagctgttttgatgatgagctcccagcttcagagtcaggacccaagcggggctccamgaaaggcctgggcgacccagccactgggcctaagcctgacctgctgcacccctgcctccctccacagttgccgaggtactgtctgaatgccgcctgctcgcctacatatcccaggtgcccacgcagatgtccttcctcttccgcctcatcaacatcatccacgtgcagacgctgacccaggagaacgtcagctgcctcaacaccagcctggtgatcctgatgctggcccgacggaaagagcggctgcccctgtacctgcggctgctgcagcggatggagcacagcaagaagtaccccggcttcctgctcaacaacttccacaacctgctgcgcttctggcagcagcactacctgcacaaggacaaggacagcacctgcctagagaacagctcctgcatcagcttctcatactggaaggagacagtgtccatcctgttgaacccggaccggcagtcaccctctgctctcgttagctacattgaggagccctacatggacatagacagggacttcactgaggagtgaccttgggccaggcctcgggaggctgctgggccagtgtgggtgagcgtgggtacgatgccacacgccctgccctgttcccgttcctccctgctgctctctgcctgccccaggtctttgggtacaggcttggtgggagggaagtcctagaagcccttggtccccctgggtctgagggccctaggtcatggagagcctcagtccccataatgaggacagggtaccatgcccacctttccttcagaaccctggggcccagggccacccagaggtaagaggacatttagcattagctctgtgtgagctcctgccggtttcttggctgtcagtcagtcccagagtggggaggaagatatgggtgacccccaccccccatctgtgagccaagcctcccttgtccctggcctttggacccaggcaaaggcttctgagccctgggcaggggtggtgggtaccagagaatgctgccttcccccaagcctgcccctctgcctcattttcctgtagctcctctggttctgtttgctcattggcygctgtgttcatccaagggggttctcccagaagtgaggggcctttccctccatcccttgrggcacggggcagctgtgcctgccctgcctctgcctgaggcagccgctcctgcctgagcctggacatggggcccttccttgtgttgccaatttattaacagcaaataaaccaattaaatggagactattaaataactttattttaaaaatgaaaaaaaaaaaaaaggcgggcgntctanaggaaccaagttacgtacgcgtgcatgcgacgcatactcttctatagggcacctaaatcaattactggccgccgttanaacgtctgat

SEQ ID NO: 249 - DNA, 2008 bp, Homo sapiens
gcccacgcgtccgcccacgcgtccgcccacgcgtccggcggccgtggagtttgtgacatacgaggtgacacccctcgagtcacttcccttcaactccagctggagcgcctgcttggctttgggttcgttctgcagccttcgccccgctcctagcctcagggccggactccagcgcagagcccagcccagcgcagctgccagcagccacccagccgcccagccgcccagccccgcacgaaacccggccagagcttcctagcagcccgagccatgaacaccgaaatgtatcagacccccatggaggtggcggtctaccagctgcacaatttctccatctccttcttctcttctctgcttggaggggatgtggtttccgttaagctggacaacagtgcctccggagccagcgtggtggccatagacaacaagatcgaacaggccatggatctggtgaagaatcatctgatgtatgctgtgagagaggaggtggagatcctgaaggagcagatccgagagctggtggagaagaactcccagctagagcgtgagaacaccctgttgaagaccctggcaagcccagagcagctggagaagttccagtcctgtctgagccctgaagagccagctcccgaatccccacaagtgcccgaggcccctggtggttctgcggtgtaagtggctctgtcctcagggtgggcagagccactaaacttgttttacctagttctttccagtttgtttttggctccccaagcatcatctcacgaggagaactttacacctagcacagctggtgccaagagatgtcctaaggacatggccacctgggtccactccagcgacagacccctgacaagagcaggtctctggaggctgagttgcatggggcctagtaacaccaagccagtgagcctctaatgctactgcgccctgggggctcccagggcctgggcaacttagctgcaactggcaaaggagaagggtagtttgaggtgtgacaccagtttgctccagaaagtttaaggggtctgtttctcatctccatggacatcttcaacagcttcacctgacaacgactgttcctatgaagaagccacttgtgttttaagcagaggcaacctctctcttctcctctgtttcgtgaaggcaggggacacagatgggagagattgagccaagtcagccttctgttggttaatatggtataatgcatggctttgtgcacagcccagtgtgggattacagctttgggatgaccgcttacaaagttctgtttggttagtattggcatagtttttctatatagccataaatgcgtatatatacccatagggctagatctgtatcttagtgtagcgatgtatacatatacacatccacctacatgttgaagggcctaaccagccttgggagtattgactggtcccttacctcttatggctaagtctttgactgtgttcatttaccaagttgacccagtttgtcttttaggttaagtaagactcgagagtaaaggcaaggaggggggccagcctctgaatgcggccacggatgccttgctgctgcaaccctttccccagctgtccactgaaacgtgaagtcctgttttgaatgccaaacccaccattcactggtgctgactacatagaatggggttgagagaagatcagtttgggcttcacagtgtcatttgaaaacgttttttgttttgttttgtaattattgtggaaaactttcaagtgaacagaaggatggtgtcctactgtggatgagggatgaacaaggggatggctttgatccaatggagcctgggaggtgtgcccagaaagcttgtctgtagcgggttttgtgagagtgaacactttccactttttgacaccttatcctgatgtatggttccaggatttggattttgattttccaaatgtagcttgaaatttcaataaactttgctctgtttttctaaaaataaaaaaaaaaaaaaaaaagttttgccctataggtcgac

SEQ ID NO: 250 - DNA, 947 bp, Homo sapiens
ccacgcgtccgcggacgcgtgggaaaaaaataaaaacagcccaaccgagtttcggaattaagtattcttctagtaagtgattcaaacttgtaatatttgccacaggactgacttatttatttactagctagaagctcttaagttcacttgtttatcagggcatatacagaagggtttgttaaaactcgatgttaactttacaactttctgacctggtgcatgaattctcaagtactgtatttcactgtgttggtgtgtctgatggaaatttcgaggtggtcccacaaaaatattttatgtagtgtgccttcaaagagaaccatttatttctcttcacttatcgtcccacaaagtcacatttggtggtggtcagccaagtcgcatctggtctagttttactcttgtcccaattttaaagagaaatgggaatgagtttgccctggtgagacccataccattgcaatgattatcttgagcacttaaagtccagtgttggctgttagtgtatttgatattctgcctgtctcctcatggttgaaatatgtctgaagaatagcagcataatctcttggctgtttatacttttttaaactttcctgtgttgtaaatattgtatacttttggtgattccagctatgtaacctctatgctctgtaaggtgattatttgtatatagcaacatggcccagtgatattatatagtttcccaatggagaggttattgagtaacctttgcattagtttaaacactaccagaagaatgctgagccaactataaacactcaattttgtatgttttccaaattgtacttattactgcttttgatactgtattacgtgccaatagtttcccaatcacatagcaggcaagagatattttgtactttttgatccactgtaatatttaataaaaaatgttactatctgttaaaaaaaaaaaaaaaaaa

SEQ ID NO: 251 - DNA, 5061 bp, Homo sapiens
  misc_feature (5057)..(5059): n equals a,t,g, or c
ggcacaagcagctcgccgcgcagcggctgtatttgcggcctgtgcgagtaggcgcttgggcactcagtctccctggcgagcgacgggcagaaatctcgaaccagtggagcgcactcgtaacctggatcccagaaggtcgcgaaggcagtaccgtttcctcagcggcggactgctgcagtaagaatgtcttttccacctcatttgaatcgccctcccatgggaatcccagcactcccaccagggatcccacccccgcagtttccaggatttcctccacctgtacctccagggaccccaatgattcctgtaccaatgagcattatggctcctgctccaactgtcttagtacccactgtgtctatggttggaaagcatttgggcgcaagaaaggatcatccaggcttaaaggctaaagaaaatgatgaaaattgtggtcctactaccactgtttttgttggcaacatttccgagaaagcttcagacatgcttataagacaactcttagctaaatgtggtttggttttgagctggaagagagtacaaggtgcttccggaaagcttcaagccttcggattctgtgagtacaaggagccagaatctaccctccgtgcactcagattattacatgacctgcaaattggagagaaaaagctactcgttaaagttgatgcaaagacaaaggcacagctggatgaatggaaagcaaagaagaaagcttctaatgggaatgcaaggccagaaactgtcactaatgacgatgaagaagccttggatgaagaaacaaagaggagagatcagatgattaaaggggctattgaagttttaattcgtgaatactccagtgagctaaatgccccctcacaggaatctgattctcaccccaggaagaagaagaaggaaaagaaggaggacattttccgcagatttccagtggccccactgatcccttatccactcatcactaaggaggatataaatgctatagaaatggaagaagacaaaagagacctgatatctcgagagatcagcaaattcagagacacacataagaaactggaagaagagaaaggcaaaaaggaaaaagaaagacaggaaattgagaaagaacggagagaaagagagagggagcgtgaaagggaacgagaaaggcgagaacgggaacgagaaagggaaagagaacgtgaacgagaaaaggagaaagaacgggagcgggaacgagaacgggatagggaccgtgaccggacaaaagagagagaccgagatcgggatcgagagagagatcgtgaccgggatagagaaaggagctcagatcgtaataaggatcgcagtcgatcaagagaaaaaagcagagatcgtgaaagggaacgagagcgggaaagagagagagagagagaacgagagcgagaacgagaacgggagcgagagagagagcgagagagggaacgggagcgagaaagagaaaaagacaaaaaacgggaccgagaagaagatgaagaagatgcatacgaacgaagaaaacttgaaagaaaactccgagagaaagaagctgcttatcaagagcgccttaagaattgggaaatcagagaacgaaagaaaacccgggaatatgagaaagaagctgaaagagaagaagaaagaagaagagaaatggccaaagaagctaaacgactaaaagaattcttagaagactatgatgatgatagagatgaccccaaatattacagaggaagtgctcttcagaaaaggttgcgtgatagagaaaaggaaatggaagcagatgaacgagataggaagagagagaaggaggagcttgaggaaatcaggcagcgccttctggcagaagggcatccagatccagatgcagagctccagaggatggaacaagaggctgagaggcgcaggcagccacaaataaagcaagagccagaatcagaagaggaggaagaagaaaagcaagaaaaagaagaaaaacgagaagaacccatggaagaggaagaggagccagagcaaaagccttgtctgaaacctactctgaggcccatcagctctgctccatctgtttcctctgccagtggcaatgcaacacctaacactcctggggatgagtctccctgtggtattattattcctcatgaaaactcaccagatcaacagcaacctgaggagcataggccaaaaataggactaagtcttaaactgggtgcttccaatagtcctggtcagcctaattctgtgaagagaaagaaactacctgtagatagtgtctttaacaaatttgaggatgaagacagtgatgacgtaccccgaaaaaggaaactggttcccttggattatggtgaagatgataaaaatgcaaccaaaggcactgtaaacactgaagaaaagcgtaaacacattaagagtctcattgagaaaatccctacagccaaacctgagctcttcgcttatcccctggattggtctattgtggattctatactgatggaacgtcgaattagaccatggattaataagaaaatcatagaatatataggtgaagaagaagctacattagttgattttgtttgttctaaggttatggctcatagttcaccccagagcattttagatgatgttgccatggtacttgatgaagaagcagaagtttttatagtcaaaatgtggagattattgatatatgaaacagaagccaagaaaattggtcttgtgaagtaaaactttttatatttagagttccatttcagatttcttctttgccacccttttaaggactttgaatttttctttgtctttgaagacattgtgagatctgtaattttttttttttgtagaaaatgtgaattttttggtcctctaatttgttgttgccctgtgtactcccttggttgtaaagtcatctgaatccttggttctctttatactcaccaggtacaaattactggtatgttttataagccgcagctactgtacacagcctatctgatataatcttgttctgctgatttgtttcttgtaaatattaaaacgactccccaattattttgcagaattgcacttaatattgaaatgtactgtataggaaccaacatgaacaattttaattgaaaacaccagtcataaactattaccacccccactctcttttgatcagaaatggcaagcccttgtgaaggcatggagtttaaaattggaatgcaaaaattagcagacaatccattcctactgtatttctgtatgaatgtgtttgtgaatgtatgtgtaaaagtctttcttttccctaatttgctttggtggggtccttaaaacatttcccaactaaagaatagaattgtaaaggaaaagtggtactgttccaacctgaaatgtctgttataattaggttattagtttcccagagcatggtgttctcgtgtcgtgagcaatgtggtttgctaactggatggggttttcttattaataagatggctgcttcagcttctcttttaaaggaatgtggatcatagtgatttttccttttaattttattgctcagaaatgaggcatatcctaaaaatcctggagagctgtatttaatgcatttttgcactaattggtccttagtttaattctattgtatctgtttatttaacaaaaaattcatcataccaaaaagtgtaagtgaaaaccccctttaaaacaaaacaaaaaaatgaaataaaattaggcaaattgacagacagtgagagttttacaaacatgataggtattctgctcggcaatttgtaagtttacatgttatttaaggataaaggtaaatcattcaaggcagttaccaaccactaactatttgttttcatttttgtcttgtagaaggtttatatcttgttttaccttggctcattagtgtttaaaaatgtactgatgatgtgcttagagaaattcctggggctttcttcgttgtagatcagaatttcaccagggagtaaaattacctgaaaacgtaagaagttttaaacagcttttcacacaaattagatgcaactgttcccatgtctgagtacttatttaaaagaaaggtaaagattggcctgttagaaaaagcataatgtgagctttggattactggattttttttttttttaaacacacctggagaggacatttgaaaacactgttcttaccctcgaaccctgatgtggttccattatgtaaatatttcaaatattaaaaatgtatatatttgatcctggggactcatattctttcagaatcatgtaaataaatggcatcatgttgtaattgtgtggtgcatactagaaaagttaaaaatatgggctgamctttttatggacttgatttttatgactattggtatctaaaggtcaaggaagccatttacattattttggatgaatctactatacatctatggaaatgtctcttttattttaaattctggtttctcaacggaaaatttcagaaaagatgccccttgccattttcgttaatttttcagtcttttcttagacacacccccagcctaagaccttgttcgaggagtttattgtgtctgtcttttcttaacatactgcactgttcttaagcatcatattgtgttgtttttatttagccactattaacatgaaggtttattcaggtagatttgatttcctttgcttcgtttcttctcctgctctgtcaactgtacttatcttaaagggccactctaaaaacaagggagatgtcgtaatctgaaacctttggggagatgtactctgtactgcataacatctccagtgaggtttgtgacaggacctcaactaaatatatgaatttgtgcaagttcatatattaaagtttctgcagcagagtgaaaattgttacagtaaatgtggtagaaactgttaatcgcttaatgccagtttaaatcatgttttgtaaccaagcttcagtaaaaggctttagattgtcagagttggttgatttttagaattgtatatataaagaattagacattaaacaggcatattctagtgtctgaaaatacacmtaagaaatttctawwaaaaaaaaaaaannnaa

SEQ ID NO: 252 - DNA, 2791 bp, Homo sapiens
gtcacctgacacctcaccggtccggaattcccgggtcgacccacgcgtccgcccacgcgtccgtaatccgtggttttctggagcatttcacagcctaggaacatacaaggggggcatctccctggaatgtaaattgactaagaggaattcaataatggtcaaatgaatgcagaattttagagtcttgcttagtattctcaccacatttcgtttartctactcatactctttttctcttactgctgacactagatggaaaaactcttaattaaaagtatttcacaaaatgtgctcgttttcagtcattccgtttccactccagcctgttgtgttgtttttttgaaataataatttaaagtaattttccttttgcaggatggcatagtcaatccaacaataagaaaagatttgaaaactggaccgaaattctactgctgtccaattgaaggctgccccagaggccctgagagaccgttttctcagttttctctcgtaaaacagcactttatgaaaatgcatgctgagaagaagcacaaatgtagtaagtgcagcaattcgtacggtacagaatgggacctgaaaagacatgcagaggactgtggcaagaccttccggtgcacatgcggctgtccctacgccagtagaacagcactgcagtctcacatctaccgaactgggcacgagatacctgcagaacacagggacccacctagtaagaaaaggaaaatggaaaactgtgcacaaaaccagaagttatccaacaagaccattgaatcattgaacaaccaaccaatccctagaccagacactcaagaactagaagcttcagaaataaagctagaaccatcttttgaagactcttgtggctctaacactgacaagcagactcttacaacaccaccgagatatcctcagaagttgcttttaccaaagcccaaagtggctttggttaaactacccgtgatgcagttttctgtcatgcctgtctttgtgcctacagccgactcctcagcccagcctgtggtgttaggtgttgatcagggctctgccacaggggctgtgcacttaatgcccttgtcagtaggaaccctgatcctcggcctagattcagaggcttgctctcttaaggagagcctacctcttttcaaaattgctaatcctattgctggtgagccaataagtactggtgttcaagtgaactttggtaaaagtccatctaatcctttacaagaactagggaacacgtgtcaaaagawtagcatttcttcaatcaacgtgcagacagatctgtcttatgcctcacaaaactttataccttctgcacagtgggccactgctgattcctctgtgtcgtcttgttctcaaactgatttgtcgtttgattctcaagtgtctcttcccattagtgttcacactcagacatttttgcccagctctaaggtaacttcatctatagctgctcagactgatgcatttatggacacctgtttccagtcaggtggggtctccagagaaactcaaaccagtgggatagaaagtccaacggatgaccatgtacagatggaccaagctggaatgtgcggagacatttttgagagtgttcattcatcatataatgttgctacaggtaacattataagcaacagtttagtagcagagacagtaactcatagtttgttacctcagaatgagcctaagactttaaatcaagatattgagaaatctgcaccaattataaatttcagtgcacagaatagtatgcttccttcacagaacatgacagataatcagacccaaaccatagatttattaagtgatttggaaaacatcttgtcaagtaatctgcctgcccagacattggatcatcgtagtcttttgtctgacacaaatcctggacctgacacccagctcccatctggcccagcccagaaccccggaatcgattttgatatcgaagagttcttttcggcctcaaatatccagactcaaactgaagagagtgaacttagcaccatgaccaccgagccagtcttggagtcactggacatagagactcaaacggacttcttactcgcagatacctctgctcagtcctatgggtgtaggggaaattctaacttcttaggccttgagatgtttgacacacagacacagacagacttaaactttttcttagacagtagccctcatctgcctctgggaagtattctgaaacactccagcttttccgtgagtactgattcatctgacacagagacccaaactgaaggagtctccactgctaaaaatatacctgctctagaaagcaaagttcagttgaacagtacagaaacacagaccatgagttctgggtttgaaaccctggggagcttgttcttcaccagcaacgaaactcagacagcaatggatgactttcttctggctgatctggcctggaacacgatggagtctcagttcagctctgtagaaacccagacttctgcggaaccacacacagtctccaacttctaaaactaacggtggagtccatgtgtgaaatggcatctaccatttcctctggattaaaactacggactggggacaacagtattaattcgattgaatgtggctgatgatgcagttgcttagcttctttgtgtttctttgccttttgtacttgtaaacagaaatttgcgtataaatgtgagtgtattataaagtttgagatgttgatctaaattgtttttgtgttgcctacatttgccttttcacagctagtcttttcatgttaaaaaaaaaaaaaaaaaaaaaa

SEQ ID NO: 253 - DNA, 1251 bp, Homo sapiens
ggcacgagagaagaagtactactccaaaaactttggtaaagtgcttattcttccctagcagtaggctgttgctgagttgtagactggtggttttatgaaaaaaaaacaggttggggaggtgtgaagatggaaatgagggctgtgttatgtatatctggtatctacttctgttccaggtgcttaattcaccctcatactgatgtttaaagttagaggattcttgtccatttgtcttgtcttctgttggcaggtcacatgcaggtaataggctatgggaaggggaagatgcctagattacttctaggctggtctccaagccccaagttcaagcctcctgagtagctgagactacaggcacacaccatcgttctcaacttttcttttttaacataggctagctagctcccaccttagccttctagaccctccattataattcttattcaattgccttggcctcccaaagtgctggaattacaggtgtgagccactgcacccagctattttttctatatttttatgtagttcattgagggtaataattttatcctacaacaaacatgtaagttattgaagaatattggagttttatgataatgctgtcataaatataaaaggtagggtaagagggatccaaatagagctcacttatattgtcactgataggcagtcacgctgtgctgatagaatgtggcctgacacttgatggagtgcagcatatgtatacttgggcaatttgagcagatatatacggtcccgagtttaaagaagagaacaaacaccagtgcacagctatagtattcctaatataggatgcattttaaagaatttcacattctacaaatggagagagatggcaggagaagccttattttaagtcctgcactaaggcaggttaacctcatgggtgtaattacctggacctttttgtaaggacaaaatatttaatcattaaaaggccctctgtagggtttgaaatatctatattttatatatgaatgcttcttttattaatatttatggtaagatattttatactgctgataaacggacattaatgatatatagcctattgtttgaaaaaagcattttggattatagcccaaaactggaaataaccaacagataaataaatggtggtatattcatacaataaaatactactcagataaaaaagatgaacttaatctcataaacattatgggcaacatagtgagaacccatctcttttaaaaaaaaaaaaaaaaaaaa

SEQ ID NO: 254 - DNA, 3977 bp, Homo sapiens
gctcgtgccgctcgtgccgctcgtgccgctccttccagttgtcttgaacagcctgactcctgccagccctatggaagttccttttatgcattggaggaaaaacatgttggcttttctcttgacgtgggagaaattgaaaagaaggggaaggggaagaaaagaaggggaagaagatcaaagaagraaagaagaaggggaagaaaagaaggggaagaagatcaaaacccaccatgccccaggctcaacggcgtgctgatggaagtggaagagcctgaagtcttacaggactcactggatagatgttattcgactccgtcaatgtactttgaactacctgactcattccagcactacagaagtgtgttttactcatttgaggaacagcacatcagcttcgcccttkacgtggacaataggttttttactttgacggtgacaagtctccacctggtsttccagatgggagtcatattcccacaataagcagcccttastaakccgagagatgtcattcctgcaggcaggacctataggcacgtgaagatttgaatgaaastayagttccatttggaagcccagacataggatgggtcagtgggcatggctctattcctattctcaraccatgccagtggcaacctgtgctcagtctgaagacaatggacccacgttaggtgtgacacgttcacataactgtgcagcacatgccgggagtgatcagtcrgacattttaatttgaaccacgtatctctgggtagctacaaaattcctcagggatttcattttgcaggcatgtctctgagcttctatacctgctcaaggtcaktgtcatctttgtgtttagctcatccaaaggtgttaccctggtttcaatgaacctaacctcattctttgtgtcttcagtgttggcttgttttagctgatccatctgtaacacaggagggatccttggctgaggattgtatttcagaaccaccaactgctcttgacaattgttaacccgctaggctcctttggttagagaagccacagtccttcagcctccaattggtgtcagtacttaggaagaccacagctagatggacaaacagcattgggaggccttagccctgctcctctcaattccatcctgtagagaacaggagtcaggagccgctggcaggagacagcatgtcacccaggactctgccggtgcagaatatgaacaatgccatgttcttgcagaaaacgcttagcctgagtttcataggaggtaatcaccagacaactgcagaatgtrgarcactgagcaggacarctgacctgtctccttcacatagtccatatcaccacaaatcacacaacaaaaaggagargagatattttgggttcaaaaaaagtaaaaagataatgtagctgcatttctttagttattttgarccccaaatatttcctcatctttttgttgttgtcatkgatggtggtgacatggacttgtttatagaggacaggtcagctgtctggctcartgatctacattctgaagttgtctgaaaatgtcttcatgattaaattcagcctaaacgttttgccgggaacactgcagagacaatgctgtgagtttccaacctcagcccatctgcgggcagagaaggtctagtttgtccatcaccattatgatatcaggactggttacttggttaaggaggggtctaggagatctgtcccttttagagacaccttacttayaatgaagtacttgggaaagyggttttcaagagtataaatatcctgtattctaatgatcatcctctaaacattttatcatttattaatcctccctgcctgtgtctattattatattcatatctctacrctgcaaatttkgggtctcaatttttactgtgcctttgtttttactagtgtctgctgttgcaaaaagaagaaaacattctctgcctgagttttaatttttgtccaaagttaattttaatctatacaattaaaaccttttgcctatcactctggacttttggattgtttttcacattcagtgttataatatttgattatgctgattggttttggtgggtactgatgcgaattaataaaaacwtttcatttccatgtttattttgtaatctcttccacattgtaggctatgtttaccatacgtagcagaatgtgtttacatttcttggttctagtcatttgtattcttcgtgagtgtgagagtgtgtgtgtgtgtgtgtgtgtctgtgtgtgcctttggcatttaggaagggttgtatagctcatgttaaatattgcactaaaaatgtttttgatggttttcctccctttgaactagacacacttctaatattggtttatagttttaaattataactttcagcatcaaatatttccatacaacagtcaattacatgatgtgttttctttttctacctcctttacctgccacttctcataatagtatttgaacctaaacatataccggtgacattctgtgattatcatcttgcccctaccttggtttttggtttagatccacaatgaaatatattaacgctcatgagctattcaaaagtgaatgtcacagtcatcacttgctgagtggtactcatccttaacagagtcctcatgagggaatcaggtctcgctgagtttagcatgtttaataatcttttctcacggtctcgatacatggatcgcattactagatataaggtgcttgcccaaaatgatttttctggagtttttaggagayattgtcttccttgggggacatacatggtgtatgttctcattgtgggattckattttgttctaccaggacctctaatttctgccagttacttcaytcatttgttctcttcaccatgagtctccagaggatacttccatggtccgtgcctccccatctcccagcaattctgcatttccaagattggcacctctggtcctctgcacggtgaagccccttcctttcaattccccagtagccagtgctctaatccaccaggtctcaggcatgatctatgtttctccacactcgctttctgaggakagttttgcctgggttctatcatgaacaggccctccctgctgtcctggcctctatttgcatagtgtttcctgctccctctgccgtcgtgtggctcccagacctggctaaagaaaatcacctgagggccacagtgttccctagccctggtgtttagggcaggattatgggtgagatttttgagtctctaagttgacccctacrgctctgaagtgtatgttgagaaattcagctgttatcatcctaggtggacttgctccctcctatcctcctacttcaaatgcagaacttcaatcgtttacaaaagaagactgaatcgtataatagaacacacccttattcattggctggcttcaccaatctcatggctgaacttgtaaaaatacaatcttagccacatacctatgaaatgtatatgtgtgtrtatatatatacatgaatttgcttctgagattatggaggctgaaattcccaagatggaaggaaagctggatacccaggaaagcatttgtttcccattaggcctcttaattctctcctggcccttgattgattgcatgaggcccacccctattaaggagggcaatctgcttcacttagtctgcccatcccaatgttaatcgtatctgaaagactctctggaacacaaccagaatcatgtttggccaaatgtcctggcaccctggtgctcggtcacagtgacaagtacaagtaactatcacacatgccctttgtcatattggtgatttccactgtttttctcccaaactgcagcttatatttgttctcttartactgttgagcaaaaacttttaatttttataaagtcgaatttatcaatgttttctttaatggtttgtgtttattgataataaagaacactttrcctaaaaaaaaaaaaaaaaaactgcgaggggggcccggtacccaa

SEQ ID NO: 255 - DNA, 1007 bp, Homo sapiens
  misc_feature (995)..(995): n equals a,t,g, or c
cggcacgaggcatatgttcagctatatgttataaaaccagttttcaagtggttgtaccaatgtacactcccaccaacccagtatgcgagttctagtgctccacatacttgccaacatttggcattttccatcttttttactatagccattagtggtgggcatatagtgatatgtcagttttagttttcggttttattttcttgtcctccaaaccattgtagtatctccccaggatagatgagtgatggctgagacctgagacctaggcctgttcctcacatgactgcaccattttacattctatcaatgtatgaggtttccggtttctccacatccttaccaactcttattattattagtcttttttattatagctatcctagtacatgtgaagttatattgtgatattaatttacactgccctaatgattaataatattgatcatcttttattgagaatctttgatgaartgtctgtttaaatcttttgcccattatcagttgggttatttgggtttttttattgttgagcactgatagtttttaaaaatatattctgggtgtaacttcactatcagtccattatccttgcaaaggttttctcccagtctctggattgtcttttcattctcttaagagtgtcttttgaagaacagaactgcttattttgatgaagtccgttctttccatttgttcatttctgggttgtgctttgagtgctgtatctaagaaatccttgcctaaccaaagattacaatgattttttcctgtgttttcttctaaaggtttaagttttacatctagatctagcatgtattttgagttatatggtgtgaaatatggatccaagttcttttatgtttttgttttgttttgttttgtttttgcttatggatattcaaatgtttccacaccatttgtttaaaaatactaccctttctcaataaaaaaaaaaaaaaaagggcggccgctctagaggatccaagcttacgtangcgtgcatgcga

SEQ ID NO: 256 - DNA, 2443 bp, Homo sapiens
  misc_feature (41)..(41): n equals a,t,g, or c
  misc_feature (77)..(77): n equals a,t,g, or c
  misc_feature (2326)..(2326): n equals a,t,g, or c
  misc_feature (2348)..(2348): n equals a,t,g, or c
  misc_feature (2375)..(2375): n equals a,t,g, or c
  misc_feature (2434)..(2434): n equals a,t,g, or c
ttatagtcctgtcgggtttcgccacctctgacttgagcgtngatttttgtgatgctcgtcaggggggcggagcctanggaaaaacgccagcaacgcggyctttttacggttcctggccttttgctggccttttgctcacatgttctttcctgcgttatcccctgattctgtggataaccgtattaccgcctttgagtgagctgataccgctcgccgcagccgaacgaccgagcgcagcgagtcagtgagcgaggaagcggaagagcgcccaatacgcaaaccgcctctccccgcgcgttggccgattcattaatgcagctggcacgacaggtttcccgactggaaagcgggcagtgagcgcaacgcaattaatgtgagttagctcactcattaggcaccccaggctttacactttatgcttccggctcgtatgttgtgtggaattgtgagcggataacaatttcacacaggaaacagctatgaccatgattacgccaagctcgaaattaaccctcactaaagggaacaaaagctggagctccaccgcggtggcggccgctctagaactagtggatcccccgggctgcaggaattcggcacgagtttgtatttatattgaatgcatcccttccttaccatatgttagcaacctgtgcagaagccctacccagacctaactgggaactggctctgtatatcatcatctcaggaataatgagtgcactgtttcttttggtcattggaacagcctatttggaagctcaaggaatatgggagccatttcgaaggcggctatcctttgaggcctcgaacccgcccttcgatgtgggaaggccatttgatctcaggagaatcgttggtatttcatctgaaggaaacttgaacacactcagctgtgaccccggtcacagtagggggttctgtggagcaggcggttcatcatcccgacccagtgccgggagtcataagcagtgtggcccatcggtccacccacacagcagtcacagcaatagaaactcagctgacgtggaaaacgtcagagccaaaaacagttcaagtacctctagtaggacttctgctcaagcagcttcttcacagtctgctaacaaaacaagcccccttgtcttagattcgaacacagtgactcaaggtcatacagcgggcagaaagtccaaaggggcaaagcagagccagcacggcagccagcaccatgcccacagcccgctggagcagcaccctcagcctcctctgccaccgccagtgcctcagccccaggagcygcagcctgaaaggctgtctcccgcccccctcgcacacccttcccacccagaacgtgccagcagcgcgaggcacagttccgaggactcggacatcaccagtctcatagaagccatggacaaagacttcgaccaccatgactccccagccctagaagtgtttacagagcagcctccatcgccattgccaaaaagcaaagggaaaggaaaacctcttcagcgcaaggtgaaaccacctaagaagcaagaggaaaaggagaagaagggaaagggaaagccacaggaagatgagctgaaggactctttggctgatgatgatagctcctccaccaccacagagacctccaaccctgacacagaaccgctcctcaaggaggatacagaaaagcaaaagggaaaacaagccatgcctgaaaaacatgaaagtgaaatgtctcaagtgaagcaaaaaagcaaaaaactcttaaatattaagaaagaaatcccaacagatgtgaaacccagttcattagaactaccatatactccccctttggaaagtaagcaacgtagaaatctcccaagcaagattcctcttccaactgcaatgacaagtggatccaaatcacgaaatgcccagaaaacaaaaggtacaagtaagttagtggataacagaccacctgccctagcaaaattcctcccgaatagtcaagaattaggcaacaccagtagctcagagggtgaaaaagactctcctccaccggagtgggattccgttccagttcacaaacctggcagctctactgatagtctttataaactttctctgcaaaccctcaacgcagacattttcttaaaacaacgccagacctcaccgacacctgcttccccgtctcccccagctgccccctgcccctttgtggcccggggcagctacagcagcatcgtcaacagcagctccagcagtgaccctaaaataaaacagccaaatggaagcaaacacaagttgacaaaggcagcctcgctyccgggcaagaacggcaaccccayttttgctgcartcacggctnggctacgacaagagcccaggtngggaatggctttgcttaaagtttcttncaaacaaaacaggtttyttcmagcagccttkgggwwtttmacagsttctgkttgacagnggtgggttt

SEQ ID NO: 257 - DNA, 3179 bp, Homo sapiens
  misc_feature (49)..(49): n equals a,t,g, or c
  misc_feature (2993)..(2993): n equals a,t,g, or c
gctctctctctctctctctctctctctgctttcctcgcgagcctgcggntgggcttcttctcagaggaacgagaatgaatatgactcaagcccgggttctggtggctgcagtggtggggttggtggctgtcctgctctacgcctccatccacaagattgaggagggccatctggmtgtgtactwcaggggaggagctttactaactagccccagtggaccaggctatcatatcatgttgcctttcattactacgttcagatctgtgcagacaacactacaaactgatgaagttaaaaatgtgccttgtggaacaagtggtggggtcatgatctatattgaccgaatagaagtggttaatatgttggctccttatgcagtgtttgatatcgtgaggaactatactgcagattatgacaagaccttaatcttcaataaaatccaccatgagctgaaccagttctgcagtgcccacacacttcaggaagtttacattgaattgtttgatcaaatagatgaaaacctgaagcaagctctgcagaaagacttaaacctcatggccccaggtctcactatacaggctgtgcgtgttacaaaacccaaaatcccagaagccataagaagaaattttgagttaatggaggctgagaagacaaaactccttatagctgcacagaaacaaaaggttgtggaaaaagaagctgagacagagaggaaaaaggcagttatagaagcagagaagattgcacaagtggcaaaaattcggtttcagcagaaagtgatggaaaaagaaactgaaaagcgcatttctgaaatcgaagatgctgcattcctggcccgagagaaagcgaaagcagatgctgaatattatgctgcacacaaatatgccacctcaaacaagcacaagttgaccccggaatatctggagctcaaaaagtaccaggccattgcttctaacagtaagatctattttggcagcaacatccctaacatgttcgtggactcctcatgtgctttgaaatattcagatattaggactggaagagaaagctcactcccctctaaggaggctcttgaaccctctggagagaacgtcatccaaaacaaagagagcacaggttgatgcaagaggtggaaatgttctccatatcaagatgtggcccaaggggttaagtgggaacaatcattatacggactcttcagatttacagagaacttacacttcatctgttccacctctcctgcgatagtcctgggtgctccactgattggaggatagagccagctgtctgacacacaaatggtcttttcagccacagtcttatcaagtatcctatatgtattcctttctaaactgctactcatgaatgaggaaagtctgatgctaagatactgcctgcactggaatgttaaacactaaatatataacaagctgtgttttcctaagctgagatctgttgaataatgtttacattcgtcccccggggaaatgtatgctcagccaccattcaagagatgactgagaaggagatggtaagttcaagaagactgattgcacctgggacccaggccctttctttgggatccagtcccagccttcatccatgtgattaagatccaggccgctgaagttccccaggaaatgatcttccacttgagcaaccttttacttgatacgatttgcacctttctgttttcctgcagtcagggtggtggcctgcagggacctgagctttgctacccaaccagattcctcatagagattcctaatcactagtttcttgtattcataaactcagagatacagagggcttggtttgaagttggggtgagatgaaacctttgctctgagccaaagctctggggccttgcattccctgcattgggttgatgactgtcagcatcactgccgcagcatgcttgactaaggtacctggttttagccacagccacctccttgtatgttacctttcagctctggccaagagtgggacagggttttaaccacaaataggagcagcatgcaattcctagtgacttgctgcacagtattgtatcataattacaggaagtttttatttttaaaactggatctggggtatattcatttgccccatcacctctgtctaaaggcccaagtcctagggctgccatggtcacaagcacactgatgctccttaagattgtttatctggagcccacatagtgtggaacaaaaagtcacctagaaagcatccttggtcatcattgtctccttcccacctggcccagagatgcttaaatccaagttgtttctccagctgtcacctcccccaggagatcaggattccactgacgtcctgggcagccagtgaatttaattttccatgagaaacaacagagttaacctgtggcattaggagacctacttcatgtggaccctttttttccttcagtttaacttttctggagcagtgtgctgcgtagttcggcctgagtttgtgcagcttgttaagacaactcttgtgtacgctatgttgaagctcaacaaaaaagtcatgggaccacttctagaaatctttcagctgtcaggcctgtcagtctcatgacagtttgttggttgtgccaaacactttatttgggaaaggaaagcccagatttgaatgggtctttcccctgggccttatcctatagaggcatttgtaatatggagaaaataatttttcatttttgctcatttaattctataaattctctttataaatgaattttgtgttctttagttctccttaaaagaacttttgaattataaaaataaaatctttacctgtcgaattgttgctgcagatgattgttgtggaaaatctggatcattgacctctgtgctttcattcctagagatgttttatagttacatgagcaaaagctgttgccccaaagtgatggccctggaggcggggctgaggaacagggaaatgccgctgtgaagtcttaaagcacttctgcttaaactccnatgtgtgaggagtgtgcctccctgtgccctctcagctctgaggctggccgtctttcggggtgttccttttggcaaatatacactgtaatcttgagtctaaatttatatgttgaaatgctaccttttttaaaataagaaactaaataaaattattttactatcaaaaaaaaaaaaaaaaaactcgag

SEQ ID NO: 258 - DNA, 1411 bp, Homo sapiens
ggcacgagctgtaccaaggcttcagagtgagcagggggacatctggataggttagccagggccacagagagaagagctgcttacacctgaattgtttcacccttttcaagaacagggttgtccttctccccatctggatccttgggctagatctctgccgaggggctccgtcaagtcccgcaaggctagagaagggagccccacatcatttccactttcaaagagggaagatgctcgtcattcaaattacttctgttgatttccatggtatccccctgtccgtcccacaatctcttaccaggcgtcaatgcacatgcaggggatggaaagaggatgagccgatgagcagactttgcattaatcaaggagaaagaaaaagcagatggaaggaggtaggtagatggagaaagcaacagctccttttagcccttgatgacggccctgaaggcctgtctcttttagtgactcctctttgggtcctcttcccctacctctcagtgactaggttcctcatattaattccctgctgtgagtttggctccttgtgctgggcaattcagtcatcctcagaaagagcaaagttggtcttggaattaaggtgcaggtggggaaaaagaggactcagctagacacgaagaaaggctctcttcccagtctaagcccttctaccgtaaggggcattttatcaagacagccacccaactccccatcccatctcccctcctttgtagaaacagcatttgactcaccaagcctttctctccctttccgtgtgtcttgcttagtttctggattgagagaatttctatccttgctccctcgaactctaaaagagcttcttttgaaaactggggagtatcaggcctacctctacatgtgcaacagtgccaggattcaaaggaaaagctcattccagcctctgcctcttgggagatggttcagagtgccacatagggactgaaagagggtgtctgaatccttcaggaatgctttaagtgacattgttgaaaagagataaagaaaaggaaaacaatggaattgggtttctaaggtccctggaaatatcctgggggtctaattgagaaagaaaataagaggaaatttgaagactcacttcttccttcatctgaatccactcagatggcaactgatctctgtcccaaggaccctctaccccacccaattcataatcatctcagattagaaaaggcagaattccttcccattctcaaatcagcatttgggttaggggcccctaagttacgtgagcatgttagaaatgtgaccccaggcctcaagagagaggctctgccacatgagaggagataggaatcatgactgaaaggggattagcacagaacagagaaaactgatttgatagacaaatcaaatagaaaaaaaaaaaaaaaaa

SEQ ID NO: 259 - DNA, 1065 bp, Homo sapiens
ttttttttttttttttttttttttcccaggagtcaacactttattttgttcaggccaaccacactgggagcccagcatccccgcaggataatgcctctgtgggctcatctcgcctcttgagggtggccatgctggctggctctggccaccggggaggcctggccagtctctctgtctccaagttattgtagagtcgggaagtcttcaagggcagcttcaaggaggctgaactggttcctamttctggaggtatttcttcattatgctcgcaacatcgtcgtctttcctccccgtccctggctctctccgctcgggggacgttcgctcgccaccgtcacccgcaagtcgtgggattcctggtcgacttttgatgctgtcagcacttttgaaggacacgatggagccggaggatgaggacgagtcagacaggtgagcgggatcctccttgggctccgggctcttcttcaaaatggtcttgatccccgagagaaaggaacggttagcctcttccgtttcaaagtggatgcttgaacgctgtgaaccgtcttgcccacctttggctgatccagccaaggaggtaggtgtctggggcttccggatagctgggaggaagtcatcgaagtccactttggtcttgcgttcgtagtcgaggcttgggagtttccagctgaatgggtcactgcctagaggttcctccatcaggtgggcaaactggcggttctggaaaacaagcggctcctttccaaggtctggacagcccgcatcgtccacagaggactccagacaccgcctccgaggacgcagtgtgggcgacaacagcatgtccctgggtgtggtcggagagctcagttttctccccatgctcggtctggattctaagagggactcgcaggaactgaatcgggttttcgacttttcggggagtagggttgtgcccccaacaccgtctgaagagatgcatttgaggctggtggacctcaagagaccaccagcggccccttcgatttccaggggtgactttgccccaaccctcagcgagaggtttccctcgtcactgctcgtgcc

SEQ ID NO: 260 - DNA, 1980 bp, Homo sapiens
  misc_feature (35)..(35): n equals a,t,g, or c
cggacgcgtgggcgagcccgggcgccggcgggcgnccgtcgcgtctgacagaccactgcagaccacgggccgaggcccagcgcccgtccgcagcgcggcggcatggcggcgacaaggagccccacgcgggcaagggagcgggacggtctggcgctcccgccgcaggaagtgaccaagttcactcctggatgctagctacaagccaagccttagacactgtctggagaatggcaaaaggctttgtgatgttggcagtttcatttctggtggctgccatctgctacttccggaggctacatttatattcagggcacaagctgaaatggtggattggatatctgcagagaaaattcaaaaggaacctcagtgtggaggcagaggttgatttactcagttattgtgcaagagaatggaaaggagagacaccccgtaacaagctgatgaggaaggcttatgaggagctattttggcggcatcacattaaatgtgttcgacaagtaaggagagataactatgatgctctcagatcagtgttatttcagatattcagccagggcatctcttttccatcatggatgaaagaaaaggacattgttaagcttcctgaaaaactgctgttttcacaaggttgtaattggattcagcagtacagttttggtcctgagaagtatacaggctcgaatgtgtttggaaaactacggaaatatgtggaattattgaaaacacagtggactgaatttaatggcattagagattatcacaagagaggaagtatgtgcaacacccttttttcagatgccattctggaatataaactttatgaagctttaaagttcatcatgctgtatcaagtcactgaagtttatgaacaaatgaagactaaaaaggtcattcccagtctttttagactcctgttttccagggagacatcctctgatcctttgagcttcatgatgaatcacctgaattctgtaggcgacacatgtggactagagcagattgatatgtttatacttggatactcccttgaagtaaagataaaagtgttcagactgttcaagtttaactccagagactttgaagtctgctacccagaggagcctctcagggactggccggagatctccctgctgaccgagaacgaccgccactaccacattccagtcttttaagtccgctgggggccgaacagcagtgctcaccagtgacggtggtcacagttgcaataaagtctctctctgaaaccaaagctagcatttcagcatggaaggaattaggaccttttcttcaggattacaggtacactggatgcagccatgcatggatggtttttctttatttttcagtgatttcctctgaagcagctgcactgatacatttgggagttggtggcttgactttgtccataaggggcgtggccacttcacatgatggcgggcctttaagagcacaaagaagtttaatatggacaacaacaggaaaaagcaagaagaaaacaagtagggaaaaacagctaacctggagagaaagaatttctttaacctttatgttcttcattaaaaatcttatcttggactgatttgagggatttttagaaacatggccttattttatataagcattaccttcccaggaatctttgttgtatattaatttttgataaccatttgattaactttaaaattaagtatatgtgtgtatatatacatatgtatgtttatatacacacatgtatctgtatagttttatatatacatatatacacatagacatacagagaaccactactttgtaatagtgtacagtttgttttatatctctttactttttttgttactattttatctggccagcgtaatagttttatttagattttttaaaattctgtagattaaagcaaatgacagttattgaactatcacaaaactattaaactgtggtacatttaaaaaaaaaaaaaaaaaaaaaaaaaaactcgta

SEQ ID NO: 261 - DNA, 1338 bp, Homo sapiens
ggcacgagggaagaggaaggtgctcagtcaggaaactggkgctgctgggggcccccttcccccagtcctatctcacctctgtgcagggagagctctgtgggtggcccgaggcctggggycactctsctccctgcctgatggctacccaggttcaccaggggccactggggctcccaccagcccctgaccctgtggrcctgtggcyttgcaggagaacgtcagctgcctcaacaccagcctggtgatcctgatgctggcccgacggaaagagcggctgcccctgtacctgcggctgctgcagcggatggagcacagcaagaagtaccccggcttcctgctcaacaacttccacaacctgctgcgcttctggcagcagcactacctgcacaaggacaaggacagcacctgcctagagaacagctcctgcatcagcttctcatactggaaggagacagtgtccatcctgttgaacccggaccggcagtcaccctctgctctcgttagctacattgaggagccctacatggacatagacagggacttcactgaggagtgaccttgggccaggcctcgggaggctgctgggccagtgtgggtgagcgtgggtacgatgccacacgccctgccctgttcccgttcctccctgctgctctctgcctgccccaggtctttgggtacaggcttggtgggagggaagtcctagaagcccttggtccccctgggtctgagggccctaggtcatggagagcctcagtccccataatgaggacagggtaccatgcccacctttccttcagaaccctggggcccagggccacccagaggtaagaggacatttagcattagctctgtgtgagctcctgccggtttcttggctgtcagtcagtcccagagtggggaggaagatatgggtgacccccaccccccatctgtgagccaagcctcccttgtccctggcctttggacccaggcaaaggcttctgagccctgggcaggggtggtgggtaccagagaatgctgccttcccccaagcctgcccctctgcctcattttcctgtagctcctctggttctgtttgctcattggcygctgtgttcatccaagggggttctcccagaagtgaggggcctttccctccatcccttggggcacggggcagctgtgcctgccctgcctytgcctgaggcagccgctcctgcctgagcctggacatggggcccttccttgtgttgccaatttattaacagcaaataaaccaattaaatggagactattaaataactttattttaaaaatgaaaaaaaaaaaaaaaaaaaaaaaaaaaaaaaaaaaaaaaaa

SEQ ID NO: 262 - DNA, 2008 bp, Homo sapiens; identical to SEQ ID NO: 249

SEQ ID NO: 263 - DNA, 2495 bp, Homo sapiens
  misc_feature (913)..(913): n equals a,t,g, or c
tgtaaggtggtttggggtcatgtttttaaccacctggccaatacagtccactttctggtttcttttattgtgggaagtaaatggtcaagctgctcaggcagtgaaaagatgtggagaatgtccgttgtcattcttgccactgtattccatttgctaccgagatataacattaaggtggacacatttyctaactgtattaattaaaagtcaatggatacagagagtggatttyctcccaagtcccatccctgctgaagaccgcttggatgaactccccaacccactgtgcccctcccgcaacactaccagtagactttagaaccatagttaactaagtcttttacctctgagatacttaattctgggaaaattggtgacaattttcaacttctaaataggtaactcgactgcaaaataatcaaaactgataacaatgaaactgcggctcttaaacaaagccatgcatgccgtgcatttgtattgaaatgtctccatgatatgaagccaaatattcaatgtaacatacttaatatccaaaggtggaaacaaaagaatgtagagatccagtgttaagagttccatttgcttcaattaattatttaccttcctgtggaataatatatatatatatatttaatagaaccatagatagactagtagaatttagattataaatgtgtgagtgcagattatcctgctattgcacaagctagaggggggaaaaatctcaattccagctggcaagatgctagccaggacacatataagaaagttgcactagattgaatggtcacagaatcggaggacatggaagaaaaaggaaacttcggtggttctgcagcagacatgggctaggtcatatgtggtttctrtsaagttcgtgtctcaaaaaaaaaaggagggggggcatctntccccggtggagctcacctatttggraatatggggcatttgttttttccactgcaatgatttcagtctggtttcatcatgttggaattcgatcacaccattttcaaacaatgttaacatagtccagcttttgtttttctcatctcttctgagaggagactcactgtttctgtctgaggaagctcataccctcggcaaaacatcaggacaaataaagagaaatgggggtacgcattcccaacagaagcagtgtgttatttgttttaaaactctgaacagagatcttgggaaatctttcaaaaagaccattgaattcttcattggctgagaacgacgttttaaaatgtcttaaataaggctttgtttgcattgtttgagttcaaggggccttattattgaatggaattgcacaagcctttctttgtgcaatcaaaccattgttattggtagttctgtaaaggaaactgtggaatcgaattggcagtggagtcataaatctatttactgagtgtggcttccaagaaatgttgcaattcaaaatgcactaagtctgtgatttattggagatttggagattctaaataatatttttaaaaaacttccatgcaacttctggtttaatgtttggcaactccacatgataaaaaaataaaaacagcccaaccgagtttcggaattaagtattcttctagtaagtgattcaaacttgtaatatttgccacaggactgacttatttatttactagctagaagctcttaagttcacttgtttatcagggcatatacagaagggtttgttaaaactcgatgttaactttacaactttctgacctggtgcatgaattctcaagtactgtatttcactgtgttggtgtgtctgatggaaatttcgaggtggtcccacaaaaatattttatgtagtgtgccttcaaagagaaccatttatttctcttcacttatcgtcccacaaagtcacatttggtggtggtcagccaagtcgcatctggtctagttttactcttgtcccaattttaaagagaaatgggaatgagtttgccctggtgagacccataccattgcaatgattatcttgagcacttaaagtccagtgttggctgttagtgtatttgatattctgcctgtctcctcatggttgaaatatgtctgaagaatagcagcataatctcttggctgtttatacttttttaaactttcctgtgttgtaaatattgtatacttttggtgattccagctatgtaacctctatgctctgtaaggtgattatttgtatatagcaacatggcccagtgatattatatagtttcccaatggagaggttattgagtaacctttgcattagtttaaacactaccagaagaatgctgagccaactataaacactcaattttgtatgttttccaaattgtacttattactgcttttgatactgtattacgtgccaatagtttcccaatcacatagcaggcaagagatattttgtactttttgatccactgtaatatttaataaaaaatgttactatctgttaaaaaaaaaaaaaaaaaagggsggccgcccaaggg

SEQ ID NO: 264 - DNA, 1771 bp, Homo sapiens
  misc_feature (1672)..(1672): n equals a,t,g, or c
  misc_feature (1696)..(1696): n equals a,t,g, or c
  misc_feature (1706)..(1706): n equals a,t,g, or c
  misc_feature (1749)..(1749): n equals a,t,g, or c
gcctgcagtcgacactagtggatccaaagaattcggcctgtgcgagtaggcgcttgggcactcagtctccctggcgagcgacgggcagaaatctcgaaccagtggagcgcactcgtaacctggatcccagaaggtcgcgaaggcagtaccgtttcctcagcggcggactgctgcagtaagaatgtcttttccacctcatttgaatcgccctcccatgggaatcccagcactcccaccagggatcccacccccgcagtttccaggatttcctccacctgtacctccagggaccccaatgattcctgtaccaatgagcattatggctcctgctccaactgtcttagtacccactgtgtctatggttggaaagcatttgggcgcaagaaaggatcatccaggcttaaaggctaaagaaaatgatgaaaattgtggtcctactaccactgtttttgttggcaacatttccgagaaagcttcagacatgcttataagacaactcttagctaaatgtggtttggttttgagctggaagagagtacaaggtgcttccggaaagcttcaagccttcggattctgtgagtacaaggagccagaatctaccctccgtgcactcagattattacatgacctgcaaattggagagaaaaagctactcgttaaagttgatgcaaagacaaaggcacagctggatgaatggaaagcaaagaagaaagcttctaatgggaatgcaaggccagaaactgtcactaatgacgatgaagaagccttggatgaagaaacaaagaggagagatcagatgattaaaggggctattgaagttttaattcgtgaatactccagtgagctaaatgccccctcacaggaatctgattctcaccccaggaagaagaagaaggaaaagaaggaggacattttccgcagatttccagtggccccactgatcccttatccactcatcactaaggaggatataaatgctatagaaatggaagaagacaaaagagacctgatatctcgagagatcagcaaattcagagacacacataagaaactggaagaagagaaaggcaaaaaggaaaaagaaagacaggaaattgagaaagaacggagagaaagagagagggagcgtgaaagggaacgagaaaggcgagaacgggaacgagaaagggaaagagaacgtgaacgagaaaaggagaaagaacgggagcgggaacgagaacgggatagggaccgtgaccggacaaaagagagagaccgagatcgggatcgagagagagatcgtgaccgggatagagaaaggagctcagatcgtaataaggatcgcagtcgatcaagagaaaaaagcagagatcgtgaaagggaacgagagcgggaaagagagagagagagagaacgagagcgagaacgagaacgggagcgagagagagagcgagagagggaacgggagcgagaaaragaaaaagacaaaaaacgggaccgagaagaagatgaagaagatgcatacgaacgaagaaaacttgaaagaaaactccgagagaaagaagctgcttatcaagagcgccttaagaattgggaaatcagagaacgaaagaaaacccgggaatatgagaaagaagctraaararaaggaagaaagaaggaaggagaattggccaaaggaagcttaaacganttaaaaagatttttttaggaagantttttgttgnttgattaggaggttgaccccaattttttaccagagggaattgntttttcaggaaaagttttcctt

SEQ ID NO: 265 - DNA, 1534 bp, Homo sapiens
ggcacaagcagctcgccgcgcagcggctgtatttgcggcctgtgcgagtaggcgcttgggcactcagtctccctggcgagcgacgggcagaaatctcgaaccagtggagcgcactcgtaacctggatcccagaaggtcgcgaaggcagtaccgtttcctcagcggcggactgctgcagtaagaatgtcttttccacctcatttgaatcgccctcccatgggaatcccagcactcccaccagggatcccacccccgcagtttccaggatttcctccacctgtacctccagggaccccaatgattcctgtaccaatgagcattatggctcctgctccaactgtcttagtacccactgtgtctatggttggaaagcatttgggcgcaagaaaggatcatccaggcttaaaggctaaagaaaatgatgaaaattgtggtcctactaccactgtttttgttggcaacatttccgagaaagcttcagacatgcttataagacaactcttagctaaatgtggtttggttttgagctggaagagagtacaaggtgcttccggaaagcttcaagccttcggattctgtgagtacaaggagccagaatctaccctccgtgcactcagattattacatgacctgcaaattggagagaaaaagctactcgttaaagttgatgcaaagacaaaggcacagctggatgaatggaaagcaaagaagaaagcttctaatgggaatgcaaggccagaaactgtcactaatgacgatgaagaagccttggatgaagaaacaaagaggagagatcagatgattaaaggggctattgaagttttaattcgtgaatactccagtgagctaaatgccccctcacaggaatctgattctcaccccaggaagaagaagaaggaaaagaaggaggacattttccgcagatttccagtggccccactgatcccttatccactcatcactaaggaggatataaatgctatagaaatggaagaagacaaaagagacctgatatctcgagagatcagcaaattcagagacacacataagaaactggaagaagagaaaggcaaaaaggaaaaagaaagacaggaaattgagaaagaacggagagaaagagagagggagcgtgaaagggaacgagaaaggcgagaacgggaacgagaaagggaaagagaacgtgaacgagaaaaggagaaagaacgggagcgggaacgagaacgggatagggaccgtgaccggacaaaagagagagaccgagatcgggatcgagagagagatcgtgaccgggatagagaaaggagctcagatcgtaataaggatcgcagtcgatcaagagaaaaaagcagagatcgtgaaagggaacgagagcgggaaagagagagagagagagaacgagagcgagaacgagaacgggagcgagagagagagcgagagagggaacgggagcgagaaaaaaaaaaaaaaaaaaaagggcggccgctctagaggatccaagcttacgtacgcgtgcatgcgacgtcaaagtcttctg

SEQ ID NO: 266 - DNA, 2791 bp, Homo sapiens
gtcacctgacacctcaccggtccggaattcccgggtcgacccacgcgtccgcccacgcgtccgtaatccgtggttttctggagcatttcacagcctaggaacatacaaggggggcatctccctggaatgtaaattgactaagaggaattcaataatggtcaaatgaatgcagaattttagagtcttgcttagtattctcaccacatttcgtttartctactcatactctttttctcttactgctgacactagatggaaaaactcttaattaaaagtatttcacaaaatgtgctcgttttcagtcattccgtttccactccagcctgttgtgttgtttttttgaaataataatttaaagtaattttccttttgcaggatggcatagtcaatccaacaataagaaaagatttgaaaactggaccgaaattctactgctgtccaattgaaggctgccccagaggccctgagagaccgttttctcagttttctctcgtaaaacagcactttatgaaaatgcatgctgagaagaagcacaaatgtagtaagtgcagcaattcgtacggtacagaatgggacctgaaaagacatgcagaggactgtggcaagaccttccggtgcacatgcggctgtccctacgccagtagaacagcactgcagtctcacatctaccgaactgggcacgagatacctgcagaacacagggacccacctagtaagaaaaggaaaatggaaaactgtgcacaaaaccagaagttatccaacaagaccattgaatcattgaacaaccaaccaatccctagaccagacactcaagaactagaagcttcagaaataaagctagaaccatcttttgaagactcttgtggctctaacactgacaagcagactcttacaacaccaccgagatatcctcagaagttgcttttaccaaagcccaaagtggctttggttaaactacccgtgatgcagttttctgtcatgcctgtctttgtgcctacagccgactcctcagcccagcctgtggtgttaggtgttgatcagggctctgccacaggggctgtgcacttaatgcccttgtcagtaggaaccctgatcctcggcctagattcagaggcttgctctcttaaggagagcctacctcttttcaaaattgctaatcctattgctggtgagccaataagtactggtgttcaagtgaactttggtaaaagtccatctaatcctttacaagaactagggaacacgtgtcaaaagawtagcatttcttcaatcaacgtgcagacagatctgtcttatgcctcacaaaactttataccttctgcacagtgggccactgctgattcctctgtgtcgtcttgttctcaaactgatttgtcgtttgattctcaagtgtctcttcccattagtgttcacactcagacatttttgcccagctctaaggtaacttcatctatagctgctcagactgatgcatttatggacacctgtttccagtcaggtggggtctccagagaaactcaaaccagtgggatagaaagtccaacggatgaccatgtacagatggaccaagctggaatgtgcggagacatttttgagagtgttcattcatcatataatgttgctacaggtaacattataagcaacagtttagtagcagagacagtaactcatagtttgttacctcagaatgagcctaagactttaaatcaagatattgagaaatctgcaccaattataaatttcagtgcacagaatagtatgcttccttcacagaacatgacagataatcagacccaaaccatagatttattaagtgatttggaaaacatcttgtcaagtaatctgcctgcccagacattggatcatcgtagtcttttgtctgacacaaatcctggacctgacacccagctcccatctggcccagcccagaaccccggaatcgattttgatatcgaagagttcttttcggcctcaaatatccagactcaaactgaagagagtgaacttagcaccatgaccaccgagccagtcttggagtcactggacatagagactcaaacggacttcttactcgcagatacctctgctcagtcctatgggtgtaggggaaattctaacttcttaggccttgagatgtttgacacacagacacagacagacttaaactttttcttagacagtagccctcatctgcctctgggaagtattctgaaacactccagcttttccgtgagtactgattcatctgacacagagacccaaactgaaggagtctccactgctaaaaatatacctgctctagaaagcaaagttcagttgaacagtacagaaacacagaccatgagttctgggtttgaaaccctggggagcttgttcttcaccagcaacgaaactcagacagcaatggatgactttcttctggctgatctggcctggaacacgatggagtctcagttcagctctgtagaaacccagacttctgcggaaccacacacagtctccaacttctaaaactaacggtggagtccatgtgtgaaatggcatctaccatttcctctggattaaaactacggactggggacaacagtattaattcgattgaatgtggctgatgatgcagttgcttagcttctttgtgtttctttgccttttgtacttgtaaacagaaatttgcgtataaatgtgagtgtattataaagtttgagatgttgatctaaattgtttttgtgttgcctacatttgccttttcacagctagtcttttcawgttaaaaaaaaaaaaaaaaaaaaaa

SEQ ID NO: 267 - DNA, 669 bp, Homo sapiens
  misc_feature (23)..(23): n equals a,t,g, or c
  misc_feature (37)..(37): n equals a,t,g, or c
  misc_feature (75)..(75): n equals a,t,g, or c
  misc_feature (97)..(97): n equals a,t,g, or c
  misc_feature (108)..(108): n equals a,t,g, or c
  misc_feature (202)..(202): n equals a,t,g, or c
tgggaggttcttttataagcagngctcgtttagtganccgtcagatcgcctggagacgccatccacgctgttttnacctccatagaagccaccgggnccgatccagcntccggactctagcctaggccgcgggacggataacaatttcacacaggaaacagctatgaccactaggcttttgcaaaaagctatttaggtgacnctatagaaggtacgcctgcaggtaccggtccggaattcccgggtcgacccacgcgtccgccctggggagcttgttcttcaccagcaacgaaactcagacagcaatggatgactttcttctggctgatctggcctggaacacgatggagtctcagttcagctctgtagaaacccagacttctgcggaaccacacacagtctccaacttctaaaactaacggtggagtccatgtgtgaaatggcatctaccatttcctctggattaaaactacggactggggacaacagtattaattcgattgaatgtggctgatgatgcagttgcttagcttctttgtgtttctttgccttttgtacttgtaaacagaaatttgcgtataaatgtgagtgtattataaagtttgagatgttgatctaaaaaaaaaaaaaaaaaaaaaaaaaaaaaaaaaaaaaaaaaaaaaaaaaaaa

SEQ ID NO: 268 - DNA, 1252 bp, Homo sapiens
  misc_feature (243)..(243): n equals a,t,g, or c
gagaagaagtactactccaaaaactttggtaaagtgcttattcttccctagcagtaggctgttgctgagttgtagactggtggttttatgaaaaaaaaacaggttggggaggtgtgaagatggaaatgagggctgtgttatgtatatctggtatctacttctgttccaggtgcttaattcaccctcatactgatgtttaaagttagaggattcttgtccatttgtcttgtcttctgttggcanggtcacatgcaggtaataggctatgggaaggggaagatgcctagattacttctaggctggtctccaagccccaagttcaagcctcctgagtagctgagactacaggcacacaccatcgttctcaacttttcttttttaacataggctagctagctcccaccttagccttctagacccctccattataattcttattcaattgccttggcctcccaaagtgctggaattacaggtgtgagccactgcacccagctattttttctatatttttatgtagttcattgagggtaataattttatcctacaacaaacatgtaagttattgaagaatattggagttttatgataatgctgtcataaatataaaaggtagggtaagagggatccaaatagagctcacttatattgtcactgataggcagtcacgctgtgctgatagaatgtggcctgacacttgatggagtgcagcatatgtatacttgggcaatttgagcagatatatacggtcccgagtttaaagaagagaacaaacaccagtgcacagctatagtattcctaatataggatgcattttaaagaatttcacattctacaaatggagagagatggcaggagaagccttattttaagtcctgcactaaggcaggttaacctcatgggtgtaattacctggacctttttgtaaggacaaaatatttaatcattaaaaggccctctgtagggtttgaaatatctatattttatatatgaatgcttcttttattaatatttatggtaagatattttatactgctgataaacggacattaatgatatatagcctattgtttgaaaaaagcattttggattatagcccaaaactggaaataaccaacagataaataaatggtggtatattcatacaataaaatactactcagataaaaaagatgaacttaatctcataaacattatgggcaacatagtgagaacccatctcttttaaaaaaaaaaaaaaaaaaaactcgaa

SEQ ID NO: 269 - DNA, 1995 bp, Homo sapiens
gaattcggcacgagtcactctggacttttggattgtttttcacattcagtgttataatatttgattatgctgattggttttggtgggtactgatgcgaattaataaaaacttttcatttccatgtttattttgtaatctcttccacattgtaggctatgtttaccatacgtagcagaatgtgtttacatttcttggttctagtcatttgtattcttcgtgagtgtgagagtgtgtgtgtgtgtgtgtgtgtctgtgtgtgcctttggcatttaggaagggttgtatagctcatgttaaatattgcactaaaaatgtttttgatggttttcctccctttgaactagacacacttctaatatttggtttatagttttaaattataactttcagcatcaaatatttccatacaacagtcaattacatgatgtgttttctttttyctacctcctttacctgccacttctcataatagtatttgaacctaaacatataccggtgacattctgtgattatcatcttgcccctaccttggtttttggtttagatccacaatgaaatatattaacgctcatgagctattcaaaagtgaatgtcacagtcatcacttgctgagtggtactcatccttaacagagtcctcatgagggaatcaggtctcgctgagtttagcatgtttaataatcttttctcacggtctcgatacatggatcgcattactagatataaggtgcttgcccaaaatgatttttctggagtttttaggagayattgtcttccttgggggacatacatggtgtatgttctcattgtgggattckattttgttctaccaggacctctaatttctgccagttacttcaytcatttgttctcttcaccatgagtctccagaggatacttccatggtccgtgcctccccatctcccagcaattctgcatttccaagattggcacctctggtcctctgcacggtgaagccccttcctttcaattccccagtagccagtgctctaatccaccaggtctcaggcatgatctatgtttctccacactcgctttctgaggakagttttgcctgggttctatcatgaacaggccctccctgctgtcctggcctctatttgcatagtgtttcctgctccctctgccgtcgtgtggctcccagacctggctaaagaaaatcacctgagggccacagtgttccctagccctggtgtttagggcaggattatgggtgagatttttgagtctctaagttgacccctacrgctctgaagtgtatgttgagaaattcagctgttatcatcctaggtggacttgctccctcctatcctcctacttcaaatgcagaacttcaatcgtttacaaaagaagactgaatcgtataatagaacacacccttattcattggctggcttcaccaatctcatggctgaacttgtaaaaatacaatcttagccacatacctatgaaatgtatatgtgtgtrtatatatatacatgaatttgcttctgagattatggaggctgaaattcccaagatggaaggaaagctggatacccaggaaagcatttgtttcccattaggcctcttaattctctcctggcccttgattgattgcatgaggcccacccctattaaggagggcaatctgcttcacttagtctgcccatcccaatgttaatcgtatctgaaagactctctggaacacaaccagaatcatgtttggccaaatgtcctggcaccctggtgctcggtcacagtgacaagtacaagtaactatcacacatgccctttgtcatattggtgatttccactgtttttctcccaaactgcagcttatatttgttctcttartactgttgagcaaaaacttttaatttttataaagtcgaatttatcaatgttttctttaatggtttgtgtttattgataataaagaacactttrcctaaaaaaaaaaaaaaaaaactgcgaggggggcccggtacccaa

SEQ ID NO: 270 - DNA, 4102 bp, Homo sapiens
  misc_feature (1992)..(1992): n equals a,t,g, or c
agacagtaccttggcttggctcttgacgtggacagaattaaaaaggaccaggaagaggaagaagaccaaggcccaccatgccccakgctcagcagggagctgctggaggyagtagagcctgaagtcttgcaggactcactggatagatgttattcaactccttccagttgtcttgaacagcctgactcctgccwgccctatggaagttccttttatgcattggaggaaaaacatgttggcttttctcttgacgtgggagaaattgaaaagaaggggaaggggaagaaaagaaggggaagaagatcaaagaagraaagaagaaggggaagaaaagaaggggaagaagatcaaaacccaccatgccccaggctcaacggcgtgctgatggaagtggaagagcctgaagtcttacaggactcactggatagatgttattcgactccgtcaatgtactttgaactacctgactcattccagcactacagaagtgtgttttactcatttgaggaacagcacatcagcttcgcccttkacgtggacaataggttttttactttgacggtgacaagtctccacctggtsttccagatgggagtcatattcccacaataagcagcccttastaakccgagagatgtcattcctgcaggcaggacctataggcamgtgaagatttgaatgaaastayagttccatttggaagcccagacataggatgggtcagtgggcatggctctattcctattctcaraccatgccagtggcaacctgtgctcagtctgaagacaatggacccacgttaggtgtgacacgttcacataactgtgcagcacatgccgggagtgatcagtcrgacattttaatttgaaccacgtatctctgggtagctacaaaattcctcagggatttcattttgcaggcatgtctctgagcttctatacctgctcaaggtcaktgtcatctttgtgtttagctcatccaaaggtgttaccctggtttcaatgaacctaacctcattctttgtgtcttcagtgttggcttgttttagctgatccatctgtaacacaggagggatccttggctgaggattgtatttcagaaccaccaactgctcttgacaattgttaacccgctaggctcctttggttagagaagccacagtccttcagcctccaattggtgtcagtacttaggaagaccacagctagatggacaaacagcattgggaggccttagccctgctcctctcaattccatcctgtagagaacaggagtcaggagccgctggcaggagacagcatgtcacccaggactctgccggtgcagaatatgaacaatgccatgttcttgcagaaaacgcttagcctgagtttcataggaggtaatcaccagacaactgcagaatgtrgarcactgagcaggacarctgacctgtctccttcacatagtccatrtcaccacaaatcacacaacaaaaaggagargagatattttgggttcaaaaaaagtaaaaagataatgtagctgcatttctttagttattttgarccccaaatatttcctcatctttttgttgttgtcatkgatggtggtgacatggacttgtttatagaggacaggtcagctgtctggctcartgatctacattctgaagttgtctgaaaatgtcttcatgattaaattcagcctaaacgttttgccgggaacactgcagagacaatgctgtgagtttccaacctcagcccatctgcgggcagagaaggtctagtttgtccatcaccattatgatatcaggactggttacttggttaaggaggggtctaggagatctgtcccttttagagacaccttacttataatgaagtacttgggaaagyggttttcaagagtataaatatcctgtattctaatgatcatcctctaaacattttatcatttattaatcctccctgcctgtgtctattattatattcatatctctacrctgcaaantttgggtctcaatttttactgtgcctttgtttttactagtgtctgctgttgcaaaaagaagaacattctctgcctgagttttaatttttgtccaaagttaattttaatctatacaattaaaaccttttgcctatcactctggacttttggattgtttttyacattcagtgttataatatttgattatgctgattggttttggtgggtactgatgcgaattaataaaaacwtttcatttccatgtttattttgtaatctcttccacattgtaggctatgtttaccatacgtagcagaatgtgtttacatttcttggttctagtcatttgtattcttcgtgagtgtgagagtgtgtgtgtgtgtgtgtgtgtctgtgtgtgcctttggcatttaggaagggttgtatagctcatgttaaatattgcactaaaaatgtttttgatggttttcctccctttgaactagacacacttctaatattggtttatagttttaaattataactttcagcatcaaatatttccatacaacagtcaattacatgatgtgttttctttttctacctcctttacctgccacttctcataatagtatttgaacctaaacatataccggtgacattctgtgattatcatcttgcccctaccttggtttttggtttagatccacaatgaaatatattaacgctcatgagctattcaaaagtgaatgtcacagtcatcacttgctgagtggtactcatccttaacagagtcctcatgagggaatcaggtctcgctgagtttagcatgtttaataatcttttctcacggtctcgatacatggatcgcattactagatataaggtgcttgcccaaaatgatttttctggagtttttaggagayattgtcttccttgggggacatacatggtgtatgttctcattgtgggattckattttgttctaccaggacctctaatttctgccagttacttcaytcatttgttctcttcaccatgagtctccagaggatacttccatggtccgtgcctccccatctcccagcaattctgcatttccaagattggcacctctggtcctctgcacggtgaagccccttcctttcaattccccagtagccagtgctctaatccaccaggtctcaggcatgatctatgtttctccacactcgctttctgaggakagttttgcctgggttctatcatgaacaggccctccctgctgtcctggcctctatttgcatagtgtttcctgctccctctgccgtcgtgtggctcccagacctggctaaagaaaatcacctgagggccacagtgttccctagccctggtgtttagggcaggattatgggtgagatttttgagtctctaagttgacccctacrgctctgaagtgtatgttgagaaattcagctgttatcatcctaggtggacttgctccctcctatcctcctacttcaaatgcagaacttcaatcgtttacaaaagaagactgaatcgtataatagaacacacccttattcattggctggcttcaccaatctcatggctgaacttgtaaaaatacaatcttagccacatacctatgaaatgtatatgtgtgtrtatatatatacatgaatttgcttctgagattatggaggctgaaattcccaagatggaaggaaagctggatacccaggaaagcatttgtttcccattaggcctcttaattctctcctggcccttgattgattgcatgaggcccacccctattaaggagggcaatctgcttcacttagtctgcccatcccaatgttaatcgtatctgaaagactctctggaacacaaccagaatcatgtttggccaaatgtcctggcaccctggtgctcggtcacagtgacaagtacaagtaactatcacacatgccctttgtcatattggtgatttccactgtttttctcccaaactgcagcttatatttgttctcttartactgttgagcaaaaacttaatttttataaagtcgaatttatcaatgttttctttaatggtttgtgtttattgataataaagaacactttrcctaaaaaaaaaaaaaaaaaactgcgaggggggcccggtacccaa

SEQ ID NO: 271 - DNA, 4907 bp, Homo sapiens
  misc_feature (2797)..(2797): n equals a,t,g, or c
ttcgactccttcaggttatcttgaactgcctgacttaggccagccctacagcagtgctgtttactcattggaggaacagtaccttggcttggctcttgacgtggacagaaytaaaaaggacsaagaagrggaagaagaycaarrcccaccatgccccaggctcagcagggagctgctggaggtagtagagcctgaagtcttgcaggactcactggatagatgttattcaactccttccagttgtcttgaacagcctgactcctgccagccctatggaagttccttttatgcattggaggaaaaacatgttggcttttctcttgacgtgggagaaattgaaaagaaggggaaggggaagaaaagaaggggaagaagatcaaagaaggaaagaagaaggggaagaaaagaaggggaagaagatcaaaacccaccatgccccaggctcagcagggagctgctggatgagaaagggcctgaagtcttgcaggactcactggatagatgttattcaactccttcaggttgtcttgaactgactgactcatgccagccctacagaagtgccttttayrtattggagcaacagcgtgttggcttggctgttgacatggatgaaattgaaaagtaccaagaagtggaagaagaccaagacccatcatgccccaggctcagcagggagctgctggatgagaaagagcctgaagtcttgcaggactcactggatagatgttattcgactccttcaggttatcttgaactgcctgacttaggccagccctacagcagtgctgtttactcattggaggaacagtaccttggcttggctcttgacgtggacagaattaaaaaggaccaagaagaggaagaagaccaaggcccaccatgccccaggctcagcagggagctgctggaggtagtagagcctgaagtcttgcaggactcactggatagatgttattcaactccttccagttgtcttgaacagcctgactcctgccagccctatggaagttccttttatgcattggaggaaaaacatgttggcttttctcttgacgtgggagaaattgaaaagaaggggaaggggaagaaaagaaggggaagaagatcaaagaagraaagaagaaggggaagaaaagaaggggaagaagatcaaaacccaccatgccccaggctcaacggcgtgctgatggaagtggaagagcctgaagtcttacaggactcactggatagatgttattcgactccgtcaatgtactttgaactacctgactcattccagcactacagaagtgtgttttactcatttgaggaacagcacatcagcttcgcccttkacgtggacaataggttttttactttgacggtgacaagtctccacctggtsttccagatgggagtcatattcccacaataagcagcccttastaakccgagagatgtcattcctgcaggcaggacctataggcacgtgaagatttgaatgaaastayagttccatttggaagcccagacataggatgggtcagtgggcatggctctattcctattctcaraccatgccagtggcaacctgtgctcagtctgaagacaatggacccacgttaggtgtgacacgttcacataactgtgcagcacatgccgggagtgatcagtcrgacattttaatttgaaccacgtatctctgggtagctacaaaattcctcagggatttcattttgcaggcatgtctctgagcttctatacctgctcaaggtcaktgtcatctttgtgtttagctcatccaaaggtgttaccctggtttcaatgaacctaacctcattctttgtgtcttcagtgttggcttgttttagctgatccatctgtaacacaggagggatccttggctgaggattgtatttcagaaccaccaactgctcttgacaattgttaacccgctaggctcctttggttagagaagccacagtccttcagcctccaattggtgtcagtacttaggaagaccacagctagatggacaaacagcattgggaggccttagccctgctcctctcaattccatcctgtagagaacaggagtcaggagccgctggcaggagacagcatgtcacccaggactctgccggtgcagaatatgaacaatgccatgttcttgcagaaaacgcttagcctgagtttcataggaggtaatcaccagacaactgcagaatgtrgarcactgagcaggacarctgacctgtctccttcacatagtccatrtcaccacaaatcacacaacaaaaaggagargagatattttgggttcaaaaaaagtaaaaagataatgtagctgcatttctttagttattttgarccccaaatatttcctcatctttttgttgttgtcatkgatggtggtgacatggacttgtttatagaggacaggtcagctgtctggctcartgatctacattctgaagttgtctgaaaatgtcttcatgattaaattcagcctaaacgttttgccgggaacactgcagagacaatgctgtgagtttccaacctcagcccatctgcgggcagagaaggtctagtttgtccatcaccattatgatatcaggactggttacttggttaaggaggggtctaggagatctgtcccttttagagacaccttacttataatgaagtacttgggaaagyggttttcaagagtataaatatcctgtattctaatgatcatcctctaaacattttatcatttattaatcctccctgcctgtgtctattattatattcatatctctacrctgcaaantttgggtctcaatttttactgtgcctttgtttttactagtgtctgctgttgcaaaaagaagaacattctctgcctgagttttaatttttgtccaaagttaattttaatctatacaattaaaaccttttgcctatcactctggacttttggattgtttttyacattcagtgttataatatttgattatgctgattggttttggtgggtactgatgcgaattaataaaaacwtttcatttccatgtttattttgtaatctcttccacattgtaggctatgtttaccatacgtagcagaatgtgtttacatttcttggttctagtcatttgtattcttcgtgagtgtgagagtgtgtgtgtgtgtgtgtgtgtctgtgtgtgcctttggcatttaggaagggttgtatagctcatgttaaatattgcactaaaaatgtttttgatggttttcctccctttgaactagacacacttctaatattggtttatagttttaaattataactttcagcatcaaatatttccatacaacagtcaattacatgatgtgttttctttttctacctcctttacctgccacttctcataatagtatttgaacctaaacatataccggtgacattctgtgattatcatcttgcccctaccttggtttttggtttagatccacaatgaaatatattaacgctcatgagctattcaaaagtgaatgtcacagtcatcacttgctgagtggtactcatccttaacagagtcctcatgagggaatcaggtctcgctgagtttagcatgtttaataatcttttctcacggtctcgatacatggatcgcattactagatataaggtgcttgcccaaaatgatttttctggagtttttaggagayattgtcttccttgggggacatacatggtgtatgttctcattgtgggattckattttgttctaccaggacctctaatttctgccagttacttcaytcatttgttctcttcaccatgagtctccagaggatacttccatggtccgtgcctccccatctcccagcaattctgcatttccaagattggcacctctggtcctctgcacggtgaagccccttcctttcaattccccagtagccagtgctctaatccaccaggtctcaggcatgatctatgtttctccacactcgctttctgaggakagttttgcctgggttctatcatgaacaggccctccctgctgtcctggcctctatttgcatagtgtttcctgctccctctgccgtcgtgtggctcccagacctggctaaagaaaatcacctgagggccacagtgttccctagccctggtgtttagggcaggattatgggtgagatttttgagtctctaagttgacccctacrgctctgaagtgtatgttgagaaattcagctgttatcatcctaggtggacttgctccctcctatcctcctacttcaaatgcagaacttcaatcgtttacaaaagaagactgaatcgtataatagaacacacccttattcattggctggcttcaccaatctcatggctgaacttgtaaaaatacaatcttagccacatacctatgaaatgtatatgtgtgtrtatatatatacatgaatttgcttctgagattatggaggctgaaattcccaagatggaaggaaagctggatacccaggaaagcatttgtttcccattaggcctcttaattctctcctggcccttgattgattgcatgaggcccacccctattaaggagggcaatctgcttcacttagtctgcccatcccaatgttaatcgtatctgaaagactctctggaacacaaccagaatcatgtttggccaaatgtcctggcaccctggtgctcggtcacagtgacaagtacaagtaactatcacacatgccctttgtcatattggtgatttccactgtttttctcccaaactgcagcttatatttgttctcttartactgttgagcaaaaacttaatttttataaagtcgaatttatcaatgttttctttaatggtttgtgtttattgataataaagaacactttrcctaaaaaaaaaaaaaaaaaactgcgaggggggcccggtacccaa

SEQ ID NO: 272 - DNA, 2908 bp, Homo sapiens
  misc_feature (2)..(2): n equals a,t,g, or c
tnttaggtgacactatagaaggtacgcctgcaggtaccggatccggaattcccgggtcgacccacgcgtccgcccasgmgtcmggccgctggcaggagacagcatgtcacccaggactctgccggtgcagaatatgaacaatgccatgttcttgcagaaaacgcttagcctgagtttcataggaggtaatcaccagacaactgcagaatgtrgaacactgagcaggacarctgacctgtctccttcacatagtccatrtcaccacaaatcacacaacaaaaaggagargagatattttgggttcaaaaaaagtaaaaagataatgtagctgcatttctttagttattttgarccccaaatatttcctcatctttttgttgttgtcatkgatggtggtgacatggacttgtttatagaggacaggtcagctgtctggctcartgatctacattctgaagttgtctgaaaatgtcttcatgattaaattcagcctaaacgttttgccgggaacactgcagagacaatgctgtgagtttccaacctcagcccatctgcgggcagagaaggtctagtttgtccatcaccattatgatatcaggactggttacttggttaaggaggggtctaggagatctgtcccttttagagacaccttacttayaatgaagtacttgggaaagyggttttcaagagtataaatatcctgtattctaatgatcatcctctaaacattttatcatttattaatcctccctgcctgtgtctattattatattcatatctctacrctgcaaatttkgggtctcaatttttactgtgcctttgtttttactagtgtctgctgttgcaaaaagaagaaaacattctctgcctgagttttaatttttgtccaaagttaattttaatctatacaattaaaaccttttgcctatcactctggacttttggattgtttttcacattcagtgttataatatttgattatgctgattggttttggtgggtactgatgcgaattaataaaaacwtttcatttccatgtttattttgtaatctcttccacattgtaggctatgtttaccatacgtagcagaatgtgtttacatttcttggttctagtcatttgtattcttcgtgagtgtgagagtgtgtgtgtgtgtgtgtgtgtctgtgtgtgcctttggcatttaggaagggttgtatagctcatgttaaatattgcactaaaaatgtttttgatggttttcctccctttgaactagacacacttctaatattggtttatagttttaaattataactttcagcatcaaatatttccatacaacagtcaattacatgatgtgttttctttttctacctcctttacctgccacttctcataatagtatttgaacctaaacatataccggtgacattctgtgattatcatcttgcccctaccttggtttttggtttagatccacaatgaaatatattaacgctcatgagctattcaaaagtgaatgtcacagtcatcacttgctgagtggtactcatccttaacagagtcctcatgagggaatcaggtctcgctgagtttagcatgtttaataatcttttctcacggtctcgatacatggatcgcattactagatataaggtgcttgcccaaaatgatttttctggagtttttaggagayattgtcttccttgggggacatacatggtgtatgttctcattgtgggattckattttgttctaccaggacctctaatttctgccagttacttcaytcatttgttctcttcaccatgagtctccagaggatacttccatggtccgtgcctccccatctcccagcaattctgcatttccaagattggcacctctggtcctctgcacggtgaagccccttcctttcaattccccagtagccagtgctctaatccaccaggtctcaggcatgatctatgtttctccacactcgctttctgaggakagttttgcctgggttctatcatgaacaggccctccctgctgtcctggcctctatttgcatagtgtttcctgctccctctgccgtcgtgtggctcccagacctggctaaagaaaatcacctgagggccacagtgttccctagccctggtgtttagggcaggattatgggtgagatttttgagtctctaagttgacccctacrgctctgaagtgtatgttgagaaattcagctgttatcatcctaggtggacttgctccctcctatcctcctacttcaaatgcagaacttcaatcgtttacaaaagaagactgaatcgtataatagaacacacccttattcattggctggcttcaccaatctcatggctgaacttgtaaaaatacaatcttagccacatacctatgaaatgtatatgtgtgtrtatatatatacatgaatttgcttctgagattatggaggctgaaattcccaagatggaaggaaagctggatacccaggaaagcatttgtttcccattaggcctcttaattctctcctggcccttgattgattgcatgaggcccacccctattaaggagggcaatctgcttcacttagtctgcccatcccaatgttaatcgtatctgaaagactctctggaacacaaccagaatcatgtttggccaaatgtcctggcaccctggtgctcggtcacagtgacaagtacaagtaactatcacacatgccctttgtcatattggtgatttccactgtttttctcccaaactgcagcttatatttgttctcttartactgttgagcaaaaacttaatttttataaagtcgaatttatcaatgttttctttaatggtttgtgtttattgataataaagaacactttrcctaaaaaaaaaaaaaaaaaactgcgaggggggcccggtacccaa

SEQ ID NO: 273 - DNA, 687 bp, Homo sapiens
  misc_feature (675)..(675): n equals a,t,g, or c
gggtttctccacatccttaccaactcttattattattagtcttttttattatagctatcctagtacatgtgaagttatattgtgatattaatttacactgccctaatgattaataatattgatcatcttttattgagaatctttgatgaagtgtctgtttaaatcttttgcccattatcagttgggttatttgggtttttttattgttgagcactgatagtttttaaaaatatattctgggtgtaacttcactatcagtccattatccttgcaaaggttttctcccagtctctggattgtcttttcattctcttaagagtgtcttttgaagaacagaactgcttattttgatgaagtccgttctttccatttgttcatttctgggttgtgctttgagtgctgtatctaagaaatccttgcctaaccaaagattacaatgattttttcctgtgttttcttctaaaggtttaagttttacatctagatctagcatgtattttgagttatatggtgtgaaatatggatccaagttcttttatgtttttgttttgttttgttttgtttttgcttatggatattcaaatgtttccacaccatttgtttaaaaatactaccctttctcaataaaaaaaaaaaaaaaagggcggccgctctagaggatccaagcttacgtangcgtgcatgcga

SEQ ID NO: 274 - protein, 6 aa, Homo sapiens
MWPAPS

SEQ ID NO: 275 - protein, 47 aa, Homo sapiens
MTPPHVLLKGVLVVSRVCVSLLCCPPGCSVCCPLPPGGSPCFSPIYS

SEQ ID NO: 276 - protein, 25 aa, Homo sapiens
HGLLPVCPWACGLRPPRTTPRKKIS

SEQ ID NO: 277 - protein, 41 aa, Homo sapiens
MCGRRPRLGWTCVWGCTRAPCWGASWARSAGSTTCGRLMSL

SEQ ID NO: 278 - protein, 59 aa, Homo sapiens
LLGTWLCPQLPPGLGAHHAPSSFSSYLCPVSPSIRLSDGTLWERLWPWSGGREQGGRHK

SEQ ID NO: 279 - protein, 30 aa, Homo sapiens
MLMMGTLVLILLHDVIVTFTEFYNAQNLKW

SEQ ID NO: 280 - protein, 23 aa, Homo sapiens
CLQWFVPLVPQQIPELILMTIWK

SEQ ID NO: 281 - protein, 20 aa, Homo sapiens
FLLSFCAFPCVFMFWVSVLH

SEQ ID NO: 282 - protein, 21 aa, Homo sapiens
MIYLSIYLLVNILAVSNSWPS

SEQ ID NO: 283 - protein, 9 aa, Homo sapiens
MFMMSVYIL

SEQ ID NO: 284 - protein, 92 aa, Homo sapiens
  SITE (32): Xaa equals any amino acid
MHFLFGYYVFSLTSASPALWAAASTCSSDLDXPCWVLVHLLIWCFVCHQYLHCSWWDVSHHLLYLLPTRKIKRSYFFPLRSNFSLDSWYPQF

SEQ ID NO: 285 - protein, 54 aa, Homo sapiens
MTENPKVQMMLIIVVPLQLFINPVQHPIQQVRCIHLHLCHGWALDRLALELVCL

SEQ ID NO: 286 - protein, 10 aa, Homo sapiens
MTRCLWRTLQ

SEQ ID NO: 287 - protein, 32 aa, Homo sapiens
MFCGACQIGWNLWGLLWEMPREHRFRRWEQLV

SEQ ID NO: 288 - protein, 38 aa, Homo sapiens
VLLILKLLLLKGARSIQIFMFRCLIAFALITKLQNYMD

SEQ ID NO: 289 - protein, 94 aa, Homo sapiens
MRTIYSAFFFLSLCLSVLLSSTVFDDWHPISISWVQNFGLTPSFDVQVPQTLRCFFRSGCRWHPLNLLQFKLSTFLRIISFYLSFCSEKRLQHE

SEQ ID NO: 290 - protein, 359 aa, Homo sapiens
MMVIFLVGLVSMILMRTLRKDYARYSKEEEMDDMDRDLGDEYGWKQVHGDVFRPSSHPLIFSSLIGSGCQIFAVSLIVIIVAMIEDLYTERGSMLSTAIFVYAATSPVNGYFGGSLYARQGGRRWIKQMFIGAFLIPAMVCGTAFFINFIAIYYHASRAIPFGTMVAVCCICFFVILPLNLVGTILGRNLSGQPNFPCRVNAVPRPIPEKKWFMEPAVIVCLGGILPFGSIFIEMYFIFTSFWAYKIYYVYGFMMLVLVILCIVTVCVTIVCTYFLLNAEDYRWQWTSFLSAASTAIYVYMYSFYYYFFKTKMYGLFQTSFYFGYMAVFSTALGIMCGAIGYMGTSAFVRKIYTNVKID

SEQ ID NO: 291 - protein, 56 aa, Homo sapiens
GWFHLFWQEWEQEPGQNKLLEALVLGTAAGRVGTRQNCLQDESQERTLSPVSGVWL

SEQ ID NO: 292 - protein, 97 aa, Homo sapiens
MEVVVTVTPKTCPLSSLLLFLLYFLVIGSVIHLTAGFRILVLGLVFLFFPYPPYPNCHQVLLHALMISHLSYPSSFQIGPSDFNLGHSHYLLYYGKI

SEQ ID NO: 293 - protein, 37 aa, Homo sapiens
MVGNAFLWLFVHLESVYVQLSSAISWAMGNISVKTNF

SEQ ID NO: 294 - protein, 19 aa, Homo sapiens
MYAFLQGFIFLLLFFFIAE

SEQ ID NO: 295 - protein, 2 aa, Homo sapiens
GA

SEQ ID NO: 296 - protein, 58 aa, Homo sapiens
EFFLFSLSFSLLPSCLSFSPFFSLPFPSPPSLPPSLPSFLPSFLVLFCNPGCSAMAKS

SEQ ID NO: 297 - protein, 203 aa, Homo sapiens
MGIKTALPAAELGLYSLVLSGALAYAGRGLLEASQDGAHRKAFRESVRPGWEYIGRKMDVADFEWVMWFTSFRNVIIFALSGHVLFAKLCTMVAPKLRSWMYAVYGALAVMGTMGPWYLLLLLGHCVGLYVASLLGQPWLCLGLGLASLASFKMDPLISWQSGFVTGTFDLQEVLFHGGSSFTCCVAPALHWRAVPTLTATTP

SEQ ID NO: 298 - protein, 34 aa, Homo sapiens
MISMCQMLRTTVMTHLWIVTWIQRSWQESGDIRV

SEQ ID NO: 299 - protein, 13 aa, Homo sapiens
EFRAGFLLLLHGM

SEQ ID NO: 300 - protein, 733 aa, Homo sapiens
MQKPTDNAQFTCHYGTTYEIMTVPNDPYTFLSCGEDGTVRWFDTRIKTSCTKEDCKDDILINCRRAATSVAICPPIPYYLAVGCSDSSVRIYDRRMLGTRATGNYAGRGTTGMVARFIPSHLNNKSCRVTSLCYSEDGQEILVSYSSDYIYLFDPKDDTARELKTPSAEERREELRQPPVKRLRLRGDWSDTGPRARPESERERDGEQSPNVSLMQRMSDMLSRWFEEASEVAQSNRGRGRSRPRGGTSQSDISTLPTVPSSPDLEVSETAMEVDTPAEQFLQPSTSSTMSAQAHSTSSPTESPHSTPLLSSPDSEQRQSVEASGHHTHHQSDNNNEKLSPKPGTGEPVLSLHYSTEGTTTSTIKLNFTDEWSSIASSSRGIGSHCKSEGQEESFVPQSSVQPPEGDSETKAPEESSEDVTKYQEGVSAENPVENHINITQSDKFTAKPLDSNSGERNDLNHDRSCGVPEESASSEKAKEPETSDQTSTESATNENNTNPEPQFQTEATGPSAHEETSTRDSALQDTDDSDDDPVLIPGARYRAGPGDRRSAVARIQEFFRRRKERKEMEELDTLNIRRPLVKMVYKGHRNSRTMIKEANFWGANFVMSGSDCGHIFIWDRHTAEHLMLLEADNHVVNCLQPHPFDPILASSGIDYDIKIWSPLEESRIFNRKLADEVITRNELMLEETRNTITVPASFMLRMLASLNHIRADRLEGDRSEGSGQENENEDEE

SEQ ID NO: 301 - protein, 8 aa, Homo sapiens
SCFNLLGT

SEQ ID NO: 302 - protein, 36 aa, Homo sapiens
MNAAVLLTLVFFLLLYLFYLGVLGSDPAYLPLLKKS

SEQ ID NO: 303 - protein, 8 aa, Homo sapiens
KSILGSHS

SEQ ID NO: 304 - protein, 31 aa, Homo sapiens
MISMKMILVILVTLALPVAQLHLLLLVLKIQ

SEQ ID NO: 305 - protein, 28 aa, Homo sapiens
MARNVWFFIVSFCYKFLSYFRASSTLKV

SEQ ID NO: 306 - protein, 11 aa, Homo sapiens
MHLHLPTTLVL

SEQ ID NO: 307 - protein, 16 aa, Homo sapiens
MALRLARMWLSSLASV

SEQ ID NO: 308 - protein, 1 aa, Homo sapiens
I

SEQ ID NO: 309 - protein, 71 aa, Homo sapiens [sequence omitted]

SEQ ID NO: 310 - protein, 55 aa, Homo sapiens
MTNYFWASASSCTVFPLAFLCSSCVGPPSFSCAHHILHQESWHLFFSSAWNAFLC

SEQ ID NO: 311 - protein, 55 aa, Homo sapiens
MWALKSLFLLTPSPVIRFYFAALWIRAAGRLLGGGGSPTPPTSLAPGFSEAGGLC

SEQ ID NO: 312 - protein, 13 aa, Homo sapiens
GNSLTLAILLLSF

SEQ ID NO: 313 - protein, 265 aa, Homo sapiens
MGGQVAGVYAAYYPSDVSSLCLVCPAGLQYSTDNQFVQRLKELQGSAAVEKIPLIPSTPEEMSEMLQLCSYVRFKVPQQILQGLVDVRIPHNNFYRKLFLEIVSEKSRYSLHQNMDKIKVPTQIIWGKQDAGAGCVWGRHVGQVNCQLPGGASGKLWALSSDGKTQEDSQAHNRLFSFCAQHRQQQEAGLRPRLQPAFCTQHLLPSPKSDAATTLRDPAPNAVGAPVTLRKPVPYPWYPRFPRALGTTRKPPRYFSQNRNSYGTK

SEQ ID NO: 314 - protein, 25 aa, Homo sapiens
MALCSLAVFCPSTILGCDLVQLGPE

SEQ ID NO: 315 - protein, 147 aa, Homo sapiens
VGAALQTLYILAYLHYCPRKRVVLLQTATLLGVLLLGYGYFWLLVPNPEARLQQLGLFCSVFTISMYLSPLADLAKVIQTKSTQCLSYPLTIATLLTSASWCLYGFRLRDPYIMVSNFPGIVTSFIRFWLFWKYPQEQDRNYWLLQT

SEQ ID NO: 316 - protein, 29 aa, Homo sapiens
GFLGILYLTIFILYQTHLQFLGLLVKTFF

SEQ ID NO: 317 - protein, 80 aa, Homo sapiens
NSLVKFTFPPPLSGAPSCVICGFWTPNVSLAVGLPEVWYVLEQWEAVICCVSSHPALESNGHSQPELPLSTPCLGFCSLG

SEQ ID NO: 318 - protein, 14 aa, Homo sapiens
MPYMYSSPLPIFYT

SEQ ID NO: 319 - protein, 31 aa, Homo sapiens
MLMLPLLLLILSVELFQLFLSLKLLPLLLLL

SEQ ID NO: 320 - protein, 47 aa, Homo sapiens
MRFASSDLLCYWKLALFTAIRSSLASIPLMTSFTSLTPLYYCLAQFS

SEQ ID NO: 321 - protein, 45 aa, Homo sapiens
  SITE (31): Xaa equals any amino acid
MHVLLFSFLIPFLLLSPVGVTCNSHMLERQXSWLKKRSTQASQHV

SEQ ID NO: 322 - protein, 49 aa, Homo sapiens
  SITE (40): Xaa equals any amino acid
  SITE (48): Xaa equals any amino acid
MKGHSSKLFCLVVWGFLCFLFLGCFFFNCLVQKKKEKKNXGGAPEPNXP

SEQ ID NO: 323 - protein, 5 aa, Homo sapiens
WASLT

SEQ ID NO: 324 - protein, 55 aa, Homo sapiens
MGGDQRSMGLACESPLAAWSLGITPALVLQMLLGFIGAGPSRAGPLTLPAWLHSP

SEQ ID NO: 325 - protein, 120 aa, Homo sapiens
MMCVVLTTLPCLTFSIAVTEVQKSINGSADVLPDMLPDLPVSLVLLSLIMVDIIEKLRIYPLRGSQKSKCSFKCEYFLKFDIFFTFLPLCYLTTCLMIPFLRANITDRRLQMKISKHNYF

SEQ ID NO: 326 - protein, 73 aa, Homo sapiens [sequence omitted]

SEQ ID NO: 327 - protein, 60 aa, Homo sapiens
MRSVPAILQMLWILRRSTNWTLYLILHGCPAVVCAWPRQHAPWGMVRLWVPTAAPAALSP

SEQ ID NO: 328 - protein, 23 aa, Homo sapiens
MAFLPSPAWWISLLPSLLSIARS

SEQ ID NO: 329 - protein, 35 aa, Homo sapiens
MLAVLSLCNFCRCSLGRELFFRRLAKSQVLSLDLR

SEQ ID NO: 330 - protein, 133 aa, Homo sapiens
MISDAGAGFGVFLLVPRAGHCWGAGKPSLPVLLWPPSPHGCCHPSWREGGESWCEPSGFPPTHPGAGWARTGRGSTAALLALLLPQLGVDRASLSPLFWREGEGGGLQAGARLGVLGGEMRFRGCLMGWAGLG

SEQ ID NO: 331 - protein, 12 aa, Homo sapiens
MLLLSIVLLLIL

SEQ ID NO: 332 - protein, 38 aa, Homo sapiens
MAHSRYSTIIILYLIANWLAFAQHSAYIGPLRGLSPAS

SEQ ID NO: 333 - protein, 48 aa, Homo sapiens
  SITE (9): Xaa equals any amino acid
  SITE (10): Xaa equals any amino acid
MATQQCIYXXLCWLFIYSLYRRKLNMDHTFSPEFSFSLQVPQNYCVLN

SEQ ID NO: 334 - protein, 60 aa, Homo sapiens
MGFHLLLGLVNLLGLVNCFLLGKPNYLSLIVSIVAPLTFLFSFISNIKKKKKKGGRSRGS

SEQ ID NO: 335 - protein, 13 aa, Homo sapiens
CTHPASGPLSSTS

SEQ ID NO: 336 - protein, 62 aa, Homo sapiens
EAFCFLRSYFCYSCNAPPYMPHLCESTGIRFGHHTCLKLGSVCSVFCVEWRKKRLPCCLPCS

SEQ ID NO: 337 - protein, 226 aa, Homo sapiens
  SITE (10): Xaa equals any amino acid
  SITE (31): Xaa equals any amino acid
  SITE (32): Xaa equals any amino acid
  SITE (37): Xaa equals any amino acid
  SITE (129): Xaa equals any amino acid
  SITE (130): Xaa equals any amino acid
  SITE (150): Xaa equals any amino acid
  SITE (214): Xaa equals any amino acid
MRGLLCWPVXLLLLQPWETQLQLTGPRCHTXXLDLVXVIDSSRSVRPFEFETMRQFLMGLLRGLNVGPNATRVGVIQYSSQVQSVFPLRAFSRREDMERAIRDLVPLAQGTMTGLAIQYAMNVAFSVAXXARPPEERVPRVAVIVTDGRXQDRVAEVAAQARARGIEIYAVGVQRADVGSLRAMASPPLDEHVFLVESFDLIQEFGLQFQSRLXGPGPLQWRGPWL

SEQ ID NO: 338 - protein, 33 aa, Homo sapiens
MRAGIVCILYIFICSVFAQCLVHSRVSMYECVG

SEQ ID NO: 339 - protein, 11 aa, Homo sapiens
MRWNLLLVKLL

SEQ ID NO: 340 - protein, 24 aa, Homo sapiens
MLFFPLVLLPCVFLSYSKRRRAQG

SEQ ID NO: 341 - protein, 78 aa, Homo sapiens
DLGTLRTARRWLRGVQGPFPPGSSCLHPALSCGPSSHSEALQNMSPVGTSSFPVPGPQLVSAAASLGPFPKPRVTAGA

SEQ ID NO: 342 - protein, 9 aa, Homo sapiens
MASGSKISS

SEQ ID NO: 343 - protein, 11 aa, Homo sapiens
MHFHADYMHGC

SEQ ID NO: 344 - protein, 69 aa, Homo sapiens
MVPTPPGWVGFFVFWVFLGGGLFHVTSISVFISYLFHFQVYHGKCTDFFVNNVLGFAKKEKKKTLLSLP

SEQ ID NO: 345 - protein, 118 aa, Homo sapiens
MPFTFSWCFSLWTLLNHRPDKSLQRKGLWAVPEAGWGQDNTAASPGCPLWGPLGAGKGIGQRGSGAGHEGPPSALWLQGWRWFCPPSLPSGGAGGSAAGVGTSPRMAVEGVRTVLGSP

SEQ ID NO: 346 - protein, 41 aa, Homo sapiens
DFLFFFPPCGSHCFLSCLYLSLCLSSSFPQMSQLSLPNFPI

SEQ ID NO: 347 - protein, 29 aa, Homo sapiens
MRQQQTHLAAGVLFCCRLTFSSSVSGKSG

SEQ ID NO: 348 - protein, 42 aa, Homo sapiens
MMNVSLEIYFVVFLSLFCVVLPLHALFLKSFFFLDFACFQIL

SEQ ID NO: 349 - protein, 81 aa, Homo sapiens [sequence omitted]

SEQ ID NO: 350 - protein, 34 aa, Homo sapiens
MQCNFLSSLERWGHIPLGCFLLCVILISLAGKQK

SEQ ID NO: 351 - protein, 42 aa, Homo sapiens
FLPTLLIIISLFQFGLFFSFNESNRIHGSFYFNVFILSGQCI

SEQ ID NO: 352 - protein, 40 aa, Homo sapiens
MRCARHWKWLLLCFWGQLICRRLWRRSGRGKCFLCCLHRE

SEQ ID NO: 353 - protein, 27 aa, Homo sapiens
MNVIIVLVHALCPWCRGCPHWGPLVPP

SEQ ID NO: 354 - protein, 43 aa, Homo sapiens
MEIYVSLGIVGLAILALLAVTSIPSVSDSLTWREFHYIQVNNI

SEQ ID NO: 355 - protein, 42 aa, Homo sapiens
MLLVSCCLAGHICVWDAQTGDCLTRIPRPGRQRRGQWRGQRA

SEQ ID NO: 356 - protein, 14 aa, Homo sapiens
MAHWHVFYVFSCHS

SEQ ID NO: 357 - protein, 44 aa, Homo sapiens
MWVLLSLFCIFVLLLILFAFIAKTHIRLTMSQALFSVLHRYEFI

SEQ ID NO: 358 - protein, 23 aa, Homo sapiens
MGLFLLFLLRVGVGCVICKYFCA

SEQ ID NO: 359 - protein, 39 aa, Homo sapiens
MEAVYHYFLLLLLEIFSEYLILHFLLSFAIEFFIPMITS

SEQ ID NO: 360 - protein, 19 aa, Homo sapiens
MLPPLLEWAVFVPLSQLLL

SEQ ID NO: 361 - protein, 52 aa, Homo sapiens
TFGLFLLFLAIVNSAVMNTDVQFFGVNICFYSFGYIPRCGIAGSYMVILSLT

SEQ ID NO: 362 - protein, 26 aa, Homo sapiens
GQLRWSSLVSQFACLFILFSAKCIPF

SEQ ID NO: 363 - protein, 3 aa, Homo sapiens
GRW

SEQ ID NO: 364 - protein, 64 aa, Homo sapiens
MWLLWQPYLAGFLLQVLEGRVAQSQAEADSGVLGAGGTTPAGGRRGLCQQSEQPRGPIPHILQV

SEQ ID NO: 365 - protein, 756 aa, Homo sapiens
MSALFLLVIGTAYLEAQGIWEPFRRRLSFEASNPPFDVGRPFDLRRIVGISSEGNLNTLSCDPGHSRGFCGAGGSSSRPSAGSHKQCGPSVHPHSSHSNRNSADVENVRAKNSSSTSSRTSAQAASSQSANKTSPLVLDSNTVTQGHTAGRKSKGAKQSQHGSQHHAHSPLEQHPQPPLPPPVPQPQEPQPERLSPAPLAHPSHPERASSARHSSEDSDITSLIEAMDKDFDHHDSPALEVFTEQPPSPLPKSKGKGKPLQRKVKPPKKQEEKEKKGKGKPQEDELKDSLADDDSSSTTTETSNPDTEPLLKEDTEKQKGKQAMPEKHESEMSQVKQKSKKLLNIKKEIPTDVKPSSLELPYTPPLESKQRRNLPSKIPLPTAMTSGSKSRNAQKTKGTSKLVDNRPPALAKFLPNSQELGNTSSSEGEKDSPPPEWDSVPVHKPGSSTDSLYKLSLQTLNADIFLKQRQTSPTPASPSPPAAPCPFVARGSYSSIVNSSSSSDPKIKQPNGSKHKLTKAASLPGKNGNPTFAAVTAGYDKSPGGNGFAKVSSNKTGFSSSLGISHAPVDSDGSDSSGLWSPVSNPSSPDFTPLNSFSAFGNSFNLTGEVFSKLGLSRSCNQASQRSWNEFNSGPSYLWESPATDPSPSWPASSGSPTHTATSVLGNTSGLWSTTPFSSSIWSSNLSSALPFTTPANTLASIGLMGTENSPAPHAPSTSSPADDLGQTYNPWRIWSPTIGRRSSDPWSNSHFPHEN

SEQ ID NO: 366 - protein, 1 aa, Homo sapiens
F

SEQ ID NO: 367 - protein, 47 aa, Homo sapiens
MTLTAWTGACWPSFTWLMPRTSWRMLLLLFWTSSMIWLPRECGSFST

SEQ ID NO: 368 - protein, 24 aa, Homo sapiens
MGELLWLVILCAHIIVATHHCWEN

SEQ ID NO: 369 - protein, 80 aa, Homo sapiens
ISSTDIWWNRSLDTGLRLLLSWPGAAGTTACVCADTVYYYQMVPSWKFRSPPTWISLLGPFSGSFNVDNDSGMWLYLLLY

SEQ ID NO: 370 - protein, 27 aa, Homo sapiens
GVSVIISLLISSSEDCYQSLGLEVQII

SEQ ID NO: 371 - protein, 5 aa, Homo sapiens
FCELA

SEQ ID NO: 372 - protein, 55 aa, Homo sapiens
MSACLPGSLFLLFPPAGRYQRRGHPSRPGMGRKEVTAKAVEWGWHQPLVCFPCGS

SEQ ID NO: 373 - protein, 56 aa, Homo sapiens
MWPFYLRRVVVQSSLGPMKLPCSLWLWTVVASCICCPHGGVFLCGSCSCCVSGLLL

SEQ ID NO: 374 - protein, 36 aa, Homo sapiens
MFCHCIVCLLLVLWSSLPFFIPSFLLLKVILSCGMI

SEQ ID NO: 375 - protein, 5 aa, Homo sapiens
MGHTP

SEQ ID NO: 376 - protein, 9 aa, Homo sapiens
LKILFLIEV

SEQ ID NO: 377 - protein, 117 aa, Homo sapiens
CVETPRPGFCQKAPWYQPGKSATKPTTTREETIPSKFTSPNTNLPKLNRLQPLCPDPTLTAFPFTQIWAFWQKVLRLWGKRRAVMALRWVSYSPEEIGLFYALPYIRNYIQDAILRH

SEQ ID NO: 378 - protein, 281 aa, Homo sapiens
MAEALLLRATFYLLIGNANAAKPDLDKVISLKEANVKLRANALIKRGSMYMQQQQPLLSTQDFNMAADIDPQNADVYHHRGQLKILLDQVEEAVADFDECIRLRPESALAQAQKCFALYRQAYTGNNSSQIQAAMKGFEEVIKKFPRCAEGYALYAQALTDQQQFGKADEMYDKCIDLEPDNATTYVHKGLLQLQWKQDLDRGLELISKAIEIDNKCDFAYETMGTIEVQRGNMEKAIDMFNKAINLAKSEMEMAHLYSLCDAAHAQTEVAKKYGLKPPTL

SEQ ID NO: 379 - protein, 36 aa, Homo sapiens
MELWLPRYLKGLSCLLLFDLFNLIWAIKYHFSGLFF

SEQ ID NO: 380 - protein, 10 aa, Homo sapiens
MCGAFQDSPQ

SEQ ID NO: 381 - protein, 41 aa, Homo sapiens
MYNHLSLNCTLPLFICALFLVYSVIIPHLKNKNHYCYILLI

SEQ ID NO: 382 - protein, 348 aa, Homo sapiens
MNMTQARVLVAAVVGLVAVLLYASIHKIEEGHLAVYYRGGALLTSPSGPGYHIMLPFITTFRSVQTTLQTDEVKNVPCGTSGGVMIYIDRIEVVNMLAPYAVFDIVRNYTADYDKTLIFNKIHHELNQFCSAHTLQEVYIELFDQIDENLKQALQKDLNLMAPGLTIQAVRVTKPKIPEAIRRNFELMEAEKTKLLIAAQKQKVVEKEAETERKKAVIEAEKIAQVAKIRFQQKVMEKETEKRISEIEDAAFLAREKAKADAEYYAAHKYATSNKHKLTPEYLELKKYQAIASNSKIYFGSNIPNMFVDSSCALKYSDIRTGRESSLPSKEALEPSGENVIQNKESTG

SEQ ID NO: 383 - protein, 14 aa, Homo sapiens
MLSQPPHSKRGYRL

SEQ ID NO: 384 - protein, 343 aa, Homo sapiens
  SITE (184): Xaa equals any amino acid
  SITE (198): Xaa equals any amino acid
  SITE (210): Xaa equals any amino acid
  SITE (300): Xaa equals any amino acid
  SITE (307): Xaa equals any amino acid
MYISPEEFKPIAEKLTGSTPAASYEEEELPPDPSEETLTIEARFQPLLPETMTKSKDGFLGVSRLALSGLRNWTAAASPSAVFATRHFQPFLPPPGQELGEPWWIIPSELSMFTGYLSNNRFYPPPPKGKEVIIHRLLSMFHPRPFVKTRFAPQGAVACLTAISDFYYTVMFRIHAEFQLSEPXDFPFWFSPAQFTGXIILSKDATHVRXFRLFVPNHRSLNVDMEWLYGASESSNMEVDIGYIPQMELEATGPSVPSVILDEDGSMIDSHLPSGEPLQFVFEEIKWAAGAELGGGCPAXGGGHVPXQEVSYLPFTEAFDRAKAENKLVHSILLWGALDDQSC

SEQ ID NO: 385 - protein, 34 aa, Homo sapiens
MFLSFLNILIILLQGIWEPYLVFACNVIRYNYTM

SEQ ID NO: 386 - protein, 2 aa, Homo sapiens
PC

SEQ ID NO: 387 - protein, 12 aa, Homo sapiens
MVCLLVHSFLSF

SEQ ID NO: 388 - protein, 97 aa, Homo sapiens
MAQPPQNLKRFSSCRAFARLGYPPYFPCLPSSAARPSVPASAQPSVKGSPASNLHCTASPKTVTSWKAGAQLPLNKRVAKKEKKKKKKKKKKKKKGR

SEQ ID NO: 389 - protein, 23 aa, Homo sapiens
YVCVYVVCCYLHGKIWHHQQKIY

SEQ ID NO: 390 - protein, 12 aa, Homo sapiens
MIVIVFYLINLL

SEQ ID NO: 391 - protein, 42 aa, Homo sapiens
MSKFVSLPVFLACISPWFNSYQIFGRGGTEVSSHSRALGCPY

SEQ ID NO: 392 - protein, 26 aa, Homo sapiens
MVFFSAILFLYILYLFADYSSIFDFP

SEQ ID NO: 393 - protein, 8 aa, Homo sapiens
MAKFTVLW

SEQ ID NO: 394 - protein, 33 aa, Homo sapiens
MLHGVVIVRLWLLLGRNSLKRNSLVWRGSRSPK

SEQ ID NO: 395 - protein, 17 aa, Homo sapiens
LWVWLRSCWKNSTCPAW

SEQ ID NO: 396 - protein, 65 aa, Homo sapiens
GSFPSPKHRQRGGEQFLVLFLFLKWCLYLQPPGGLPWPHFSAPPRHRHPSTLLHVTRKMPFAECT

SEQ ID NO: 397 - protein, 6 aa, Homo sapiens
MFLREQ

SEQ ID NO: 398 - protein, 10 aa, Homo sapiens
MLLYLTVGYW

SEQ ID NO: 399 - protein, 20 aa, Homo sapiens
MTRGTLPPTLLGLSFLSSQL

SEQ ID NO: 400 - protein, 35 aa, Homo sapiens
HKKSFQGRALGDPLFKGIWAGFIVVSSEESGKGRP

SEQ ID NO: 401 - protein, 227 aa, Homo sapiens
MKPSLLCRPLSCFLMLLPWPLATLTSTTLWQCPPGEEPDLDPGQGTLCRPCPPGTFSAAWGSSPCQPHARCSLWRRLEAQVGMATRDTLCGDCWPGWFGPWGVPRVPCQPCSWAPLGTHGCDEWGRRARRGVEWQQGPAAVVRHGSLGTAPGQVAKNSRPVRGHRHRPCLLPHGAVGHPGVQPPQAEGLPLHGAQRVGPGPGVEAVESTLPTGLRMPMRTPLGSWCA

SEQ ID NO: 402 - protein, 40 aa, Homo sapiens
MNIYTILKILPHRMLWPFIYLIIATYLFFISSSTHSKGYS

SEQ ID NO: 403 - protein, 397 aa, Homo sapiens
MDARRVPQKDLRVKKNLKKFRYVKLISMETSSSSDDSCDSFASDNFANTRLQSVREGCRTRSQCRHSGPLRVAMKFPARSTRGATNKKAESRQPSENSVTDSNSDSEDESGMNFLEKRALNIKQNKAMLAKLMSELESFPGSFRGRHPLPGSDSQSRRPRRRTFPGVASRRNPERRARPLTRSRSRILGSLDALPMEEEEEEDKYMLVRKRKTVDGYMNEDDLPRSRRSRSSVTLPHIIRPVEEITEEELENVCSNSREKIYNRSLGSTCHQCRQKTIDTKTNCRNPDCWGVRGQFCGPCLRNRYGEEVRDALLDPNWHCPPCRGICNCSFCRQRDGRCATGVLVYLAKYHGFGNVHAYLKSLNRNLKCKHNIWKICCLPSTSQIFLVKVSNFFTET

SEQ ID NO: 404 - protein, 40 aa, Homo sapiens
MRRNMMNPLTFMLLGCACLRWLHLNILTRSAKMLRRSTVA

SEQ ID NO: 405 - protein, 58 aa, Homo sapiens
  SITE (54): Xaa equals any amino acid
MYMPAPPLSLAPAVGETFPVCRERMWSWQAWLLPDSVSSGNTQPSFKKKKTRSXPSDR

SEQ ID NO: 406 - protein, 629 aa, Homo sapiens
MCFIPLVCWIVCTGLKQQMESGKSLAQTSKTTTAVYVFFLSSLLQPRGGSQEHGLCAHLWGLCSLAADGIWNQKILFEESDLRNHGLQKADVSAFLRMNLFQKEVDCEKFYSFIHMTFQEFFAAMYYLLEEEKEGRTNVPGSRLKLPSRDVTVLLENYGKFEKGYLIFVVRFLFGLVNQERTSYLEKKLSCKISQQIRLELLKWIEVKAKAKKLQIQPSQLELFYCLYEMQEEDFVQRAMDYFPKIEINLSTRMDHMVSSFCIENCHRVESLSLGFLHNMPKEEEEEEKEGRHLDMVQCVLPSSSHAACSHGLVNSHLTSSFCRGLFSVLSTSQSLTELDLSDNSLGDPGMRVLCETLQHPGCNIRRLWLGRCGLSHECCFDISLVLSSNQKLVELDLSDNALGDFGIRLLCVGLKHLLCNLKKLWLVSCCLTSACCQDLASVLSTSHSLTRLYVGENALGDSGVAILCEKAKNPQCNLQKLGLVNSGLTSVCCSALSSVLSTNQNLTHLYLRGNTLGDKGIKLLCEGLLHPDCKLQVLELDNCNLTSHCCWDLSTLLTSSQSLRKLSLGNNDLGDLGVMMFCEVLKQQSCLLQNLGLSEMYFNYETKSALETLQEEKPELTVVFEPSW

SEQ ID NO: 407 - protein, 43 aa, Homo sapiens
ELRCLVCFFAFQRHFLAERYNGALQETLCPQHLFCSLADRSWP

SEQ ID NO: 408 - protein, 32 aa, Homo sapiens
MLRGFFVVLFCLIMNGCWILSHARSASIGMIM

SEQ ID NO: 409 - protein, 243 aa, Homo sapiens
  SITE (146): Xaa equals any amino acid
MLVIQITSVDFHGIPLSVPQSLTRRQCTCRGWKEDEPMSRLCINQGERKSRWKEVGRWRKQQLLLALDDGPEGLSLLVTPLWVLFPYLSVTRFLILIPCCEFGSLCWAIQSSSERAKLVLELRCRWGKRGTQLDTKKGSLPSLSPXTVRGILSRQPPNSPSHLPSFVETAFDSPSLSLPFRVSCLVSGLREFLSLLPRTLKELLLKTGEYQAYLYMCNSARIQRKSSFQPLPLGRWFRVPHRD

SEQ ID NO: 410 - protein, 52 aa, Homo sapiens
GATGMWRCRGYWAPGQNAIWWLALKMVLCCSCLGLGEFMRPSMSSLSGAVPL

SEQ ID NO: 411 - protein, 32 aa, Homo sapiens
MAPAPCSASPRPAGGRDGGGAPELSFLLSVLV

SEQ ID NO: 412 - protein, 12 aa, Homo sapiens
MILALIKMMTFA

SEQ ID NO: 413 - protein, 8 aa, Homo sapiens
HRAVILAL

SEQ ID NO: 414 - protein, 73 aa, Homo sapiens
  SITE (52): Xaa equals any amino acid
MALSNSVAPKPSPPWPLLGCFLHSPSHFLVCCILHTFIMFTVALLCSDGHPXRPGVLPGPLLYLECRILGSSD

SEQ ID NO: 415 - protein, 45 aa, Homo sapiens
MAAAKALISLWLVSACGQWETSFPIYGGDMECQAVVFWWLEEERK

SEQ ID NO: 416 - protein, 43 aa, Homo sapiens
MAPLPTPLTALGASHLPFRCLSCLDACLFLWGYLNSAHPIGAS

SEQ ID NO: 417 - protein, 34 aa, Homo sapiens
MQCPYLLGAQLLVSSICPVVPALPRPVNKCLVPD

SEQ ID NO: 418 - protein, 25 aa, Homo sapiens
MSMLFLFCVHVSLLIFLICSPMLYL

SEQ ID NO: 419 - protein, 39 aa, Homo sapiens
MSEAGWWAWLFVILHPFGMPDTFHNNFKKDKTTAEKCIE

SEQ ID NO: 420 - protein, 10 aa, Homo sapiens
MGVGLLNRII

SEQ ID NO: 421 - protein, 66 aa, Homo sapiens
  SITE (36): Xaa equals any amino acid
  SITE (58): Xaa equals any amino acid
  SITE (63): Xaa equals any amino acid
MQLSSAVIAFSCCPVFMWSLVNSTRILSLLAKVLPXAERESPSKLTSVTPPSLTPHLXRATNXLFD

SEQ ID NO: 422 - protein, 123 aa, Homo sapiens
MVWLPRPSLGWVWGWSGLAHASHLCLHLCCHPAPPSSSSPTSSSLCASVSCRKKWVEPERRLSEEGRGRAWGGSPTPHPKPQGLPPGSGRGRSWLCGVVAPLLLPCFSHLSCPSLVPTAVHHE

SEQ ID NO: 423 - protein, 27 aa, Homo sapiens
SFYVLFSNLQWYVFNIFATYTLGKKKM

SEQ ID NO: 424 - protein, 43 aa, Homo sapiens
MTLWKCGRTTLRASLLMIFTSCSWWLGVCLSVLVRQRCQENDG

SEQ ID NO: 425 - protein, 152 aa, Homo sapiens
MEFLGPCGLRLVESRLLVPYWLLVLLAALNALLQWLLRPLFLYAPLLNPYTLAVASTTFTVSTDKAHATSATYPCSLGRTAGPAPSAGCRPWRAQPGDVELGPGARCVARPSIQVQGPLALGAEGLVLHQLACLAAPRASKPRAASLHPHAS

SEQ ID NO: 426 - protein, 39 aa, Homo sapiens
MAAKSATYWGWHWVDWRWWCTACGVLRFWSGCREGSQLC

SEQ ID NO: 427 - protein, 21 aa, Homo sapiens
MKPKFPAFAGFPIYFFVDFAS

SEQ ID NO: 428 - protein, 39 aa, Homo sapiens
LFWSVSETGIAFGVSRVLGMLEGHLQEAWGRREISCDAL

SEQ ID NO: 429 - protein, 198 aa, Homo sapiens
MFFAPTVLGLARLRHWVYLLCFSAGNYYNQGETRKKELLQSCDVLGIPLSSVMIIDNRDFPDDPGMQWDTEHVARVLLQHIEVNGINLVVTFDAGGVSGHSNHIALYAAVRALHSEGKLPKGCSVLTLQSVNVLRKYISLLDLPLSLLHTQDVLFVLNSKEVAQAKKAMSCHRSQLLWFRRLYIIFSRYMRINSLSFL

SEQ ID NO: 430 - protein, 28 aa, Homo sapiens
MFQDQELSKLPSAFYLSSIQFNSNHSLP

SEQ ID NO: 431 - protein, 83 aa, Homo sapiens
MCVFVYELMLLSLVFLPHWSLPSLPYFSFALHSNTVKPDIYFLCGSNSLIFPVDKRYVFYSFISLIVNRKQLENWNTFSLCGC

SEQ ID NO: 432 - protein, 88 aa, Homo sapiens
SLKIFSVSGVLQGWPLAPEPLPQCSHQPPPHPSVCRASSTGPHAAFFTHSALGRFVIWLSLHWAEVCVHRVGVPSSPFHSEGHTQRCQ

SEQ ID NO: 433 - protein, 30 aa, Homo sapiens
MNSYMCACVFSSEIHLGGGFFCFFNSVPDL

SEQ ID NO: 434 - protein, 93 aa, Homo sapiens
MRLTDSLFLWVGATPHLRNLAVAMCSRYDSIPVSTSLLGDTSDTTSTGLAQRLARKTNKQVFVSYNLQNTDSNFALLVENRIKEEMEAFPEKF

SEQ ID NO: 435 - protein, 36 aa, Homo sapiens
MALTLPSQWVFLVFILDDLYAHLSLSRNFCWKHLLF

SEQ ID NO: 436 - protein, 19 aa, Homo sapiens
MSLLLESCVEPLSFLLLLQ

SEQ ID NO: 437 - protein, 17 aa, Homo sapiens
MCALGKLCLILQSWHPL

SEQ ID NO: 438 - protein, 37 aa, Homo sapiens
LISLAFLLPGILGKTNGFSRHPLSTNAFLKQTGTFLL

SEQ ID NO: 439 - protein, 28 aa, Homo sapiens
MAISYVSSWIILLDYLGSKDGFQLFPES

SEQ ID NO: 440 - protein, 47 aa, Homo sapiens
MNVLCGYGLPIGRWFWGLRIILKLSLTDSPVFYKLTTNLSKDHLGRH

SEQ ID NO: 441 - protein, 134 aa, Homo sapiens
MLKLILLLLFSGATLSSTWFTLNCLNSITHLPLTTVTLYASCILLGVFLNSSVPIFFELFVETVYPVPEGITCGVVTFLSNMFMGVLLFFLTFYHTELSWFNWCLPGSCLLSLLLILCFRESYDRLYLDVVVSV

SEQ ID NO: 442 - protein, 35 aa, Homo sapiens
IAWVQRTSCSCFGIGDWYRESARPPEQYVQLPRTP

SEQ ID NO: 443 - protein, 108 aa, Homo sapiens
ITYQDVGCPGVLPDSSLLVPIPNVLLSFFAFHNIKETTTLLPNSILCLLFHIKWELCLLRSAPPINYMCPRIIQARDTRWENISKKKSPLKASNLSEKVFYHTLTPYI

SEQ ID NO: 444 - protein, 187 aa, Homo sapiens
NGVVHDVVLVLILGACIVVHAVTVTSLGNLFGGAGQTQQSWVEVLDVAGHGFNVVPLGVHSDEDRLHWRQTRLCFQLPHHLHQLLQLVWADVRAVSEAKVHQHPLAPEVSLAASPASVIQQVEVALAHSCLAQGFCSLLLLQPLLLSPQGQPGPTESSPEQACDQQPGSKPRALGLALPTCLCRALP

SEQ ID NO: 445 - protein, 71 aa, Homo sapiens
GRLIWGALWPVPDCGCTAPEGQDQPPSLVCCHGCRPGSHAEVWQGCSRGQDYAGFSVGSGAGAPSLEEPRS

SEQ ID NO: 446 - protein, 80 aa, Homo sapiens
MGRMAILACSLPTTWSSLSEAEGTSCPSPLRHGFLIAGRGGLGVDIQHSSRNRTPSEDEASGLPPAWQTQPVTPNAAMAW

SEQ ID NO: 447 - protein, 33 aa, Homo sapiens
MPVVSVHRPVTVSTCVPSPGHPVKRAHFLQSGI

SEQ ID NO: 448 - protein, 6 aa, Homo sapiens
MNTYLR

SEQ ID NO: 449 - protein, 13 aa, Homo sapiens
MKLFCVLIVVVVT

SEQ ID NO: 450 - protein, 31 aa, Homo sapiens
MCCSCCGRYPWVLGKHMCSLLWLQIPAYLKS

SEQ ID NO: 451 - protein, 46 aa, Homo sapiens
GIIQSVLFCAWFVLVNIASGSFISVQGWRTPAYKPNLVLCLFSYGL

SEQ ID NO: 452 - protein, 72 aa, Homo sapiens
MGYNLSPQFTQLLVSRYCPRSANPAMQLDRFIQVCTQLQVLTEAFREKDTAVQGNIRLSFEDFVTMTASRML

SEQ ID NO: 453 - protein, 42 aa, Homo sapiens
MNCGTRGCENLRWNLSFFLSFFLNFVFSIQQQCVERILCRCR

SEQ ID NO: 454 - protein, 22 aa, Homo sapiens
MNILFILCNLIWLLWGKQHVHK

SEQ ID NO: 455 - protein, 63 aa, Homo sapiens [sequence omitted]

SEQ ID NO: 456 - protein, 37 aa, Homo sapiens
MLCQRSVGYKYLALFLGCLFCSIGLCTCCYTSPMLFW

SEQ ID NO: 457 - protein, 36 aa, Homo sapiens
MISVWFDVLFLSSVSAWVSVCMKWNKLPTAKKKKKK

SEQ ID NO: 458 - protein, 14 aa, Homo sapiens
MRGVEFCLVFWPCW

SEQ ID NO: 459 - protein, 57 aa, Homo sapiens
WVDWQRKWTTKFFMLRSFLLETSQIFRFLWIMKQKSTEDLLLLNLSWQRMLQQLSTT

SEQ ID NO: 460 - protein, 27 aa, Homo sapiens
PAPHLPRLTLPCQVVWGPRCWGGESGS

SEQ ID NO: 461 - protein, 62 aa, Homo sapiens
DILRLFVALQGCMAGRAGQRPESQRTCPPGVESEWRAGSTGSGAVCHCGGGQADKTQEGDCQ

SEQ ID NO: 462 - protein, 28 aa, Homo sapiens
MVKTVFAHCFLLFHLVTNDQDDLIFFPS

SEQ ID NO: 463 - protein, 60 aa, Homo sapiens
ELWWFWLLWTVLILFSCCCAFRHRRAKLRLQQQQRQRRNQLVGLSWGMPWGWSFPYRFTA

SEQ ID NO: 464 - protein, 38 aa, Homo sapiens
MLPNFSWLLLLCHTAHRSCPPPPYTPRPHPPVRQFKSC

SEQ ID NO: 465 - protein, 6 aa, Homo sapiens
MISVHL

SEQ ID NO: 466 - protein, 33 aa, Homo sapiens
MFWTNLVQYVFCLSFFILLLSQQVENLALLGSM

SEQ ID NO: 467 - protein, 137 aa, Homo sapiens
LFLLFLVFELPWRRAWETSRGQATDLRTSPPVLGAGRPRSGVSTHARLKRRRRDPLPDRARPPPPLLPQGAWTAGLTCSLLRVCPRTSPPAPRWWRGHGYLSLLLLAWRRAVPALGFWDSSPPGAFCSPCGLSDPSP

SEQ ID NO: 468 - protein, 31 aa, Homo sapiens
MAPLRRLTVWRVGLRLGPAGAAGGPGEASSV

SEQ ID NO: 469 - protein, 20 aa, Homo sapiens
MGATARPGPTRGRWDSCLRQ

SEQ ID NO: 470 - protein, 22 aa, Homo sapiens
MPFYIHLWHQMLLIIIVMWWIC

SEQ ID NO: 471 - protein, 56 aa, Homo sapiens
MRSIWKPTRCWPLCTLLRSTSSQHWQKPVSTFWRQVWKPRTPASCCPRAGCLRSPS

SEQ ID NO: 472 - protein, 45 aa, Homo sapiens
AAAFVGWLSGLLGFSFMVARWHYSNSSIMFVFKTEGKGDGLYQSL

SEQ ID NO: 473 - protein, 34 aa, Homo sapiens
MAAMRHLLRLFSGCGDLGFLTLYIFFLYSKQNNF

SEQ ID NO: 474 - protein, 23 aa, Homo sapiens
MPFLHTPTVPSIFLRVIIFLFTL

SEQ ID NO: 475 - protein, 38 aa, Homo sapiens
MLRLAGPPFYWPVLLALLPFASSGFQVSLKVGGCLSSL

SEQ ID NO: 476 - protein, 56 aa, Homo sapiens
MNLWLGALIPVTVHLKRMWSHPKFQAQKTFPLSKSPKYHPVFLLVIIMARSSQLKR

SEQ ID NO: 477 - protein, 16 aa, Homo sapiens
MRGKHVCLLLLLLGRF

SEQ ID NO: 478 - protein, 84 aa, Homo sapiens
  SITE (58): Xaa equals any amino acid
MLVSSHFLFLCFVRLLSSLPLFLTSITFLYSPSSPSLFLSLYSFSYPSFSPLSFLPLXLISFPPPMPSSLFPFPCFFPQPLFLF

SEQ ID NO: 479 - protein, 1 aa, Homo sapiens
M

SEQ ID NO: 480 - protein, 129 aa, Homo sapiens
MFHLQPLMFLGLFPLFAVFEGLHLSTSEKIFRFQDTGLLLRVLGSLFLGGILAFGLGFSEFLLVSRTSSLTLSIAGIFKEVCTLLLAAHLLGDQISLLNWLGFASASREYPSTLPSKPCIPEVMVAPRP

SEQ ID NO: 481 - protein, 75 aa, Homo sapiens
WVSLCTLASVLLGAGAVSHARACEGTTGVNESPMMTWGEVENTPLRVEGSETPYVDRTPGPAFKILEPGRRNGWV

SEQ ID NO: 482 - protein, 8 aa, Homo sapiens
MSLLLFLF

SEQ ID NO: 483 - protein, 207 aa, Homo sapiens
MGRKLSSPTTPRDMLLSPTLRPRRRCLESSVDDAGCPDLGKEPLVFQNRQFAHLMEEPLGSDPFSWKLPSLDYERKTKVDFDDFLPAIRKPQTPTSLAGSAKGGQDGSQRSSIHFETEEANRSFLSGIKTILKKSPEPKEDPAHLSDSSSSSGSIVSFKSADSIKSRPGIPRLAGDGGERTSPERREPGTGRKDDDVASIMKKYLQK

SEQ ID NO: 484 - protein, 31 aa, Homo sapiens
WLLLCQGHFWVSATATGALGGEGHRVLLGRW

SEQ ID NO: 485 - protein, 37 aa, Homo sapiens
MGLWVFLELVFVHSLLFVLPSLSPCPTHVLRHSGSTW

SEQ ID NO: 486 - protein, 21 aa, Homo sapiens
MWLSAFFLARLADSVLEESII

SEQ ID NO: 487 - protein, 34 aa, Homo sapiens
MLFFFSIALSSFFFLNLFLCLCNSRVIGIVLTIS

SEQ ID NO: 488 - protein, 32 aa, Homo sapiens
MSVFRVIQILLFPFSLRYSLGDLMYLNLTTIY

SEQ ID NO: 489 - protein, 14 aa, Homo sapiens
MSTFLWDIQTTYCF

SEQ ID NO: 490 - protein, 40 aa, Homo sapiens
EVKCIYIFLWLLMLLVLHLRIHCQIQGHEDLLLCFLLRIL

SEQ ID NO: 491 - protein, 266 aa, Homo sapiens
MQIVKLLGLDVPSLCLAELVKTYCSSFKLFQASPSVPAKYVEDKEKMLSRTMQLVELANETWLVTGRHPLPVITAATFLAWQSLQPADRLSCSLARFCKLANVDLPYPASSRLQELLAVLLRMAEQLAWLRVLRLDKRSVVKHIGDLLQHRQSLVRSAFRDGTAEVETREKEPPEWGQGQGEGEVGNNSLGLPQGKRPASPALLLPPCMLKSPKRICPVPPVSTVTGDENISDSEIEQYLRTPQEVRDFQRAQAARQAATSVPNPP

SEQ ID NO: 492 - protein, 234 aa, Homo sapiens
KLLYTTLRHPKCFLQRLSLENCHLTEANCKDLAAVLVVSRELTHLCLAKNPIGNTGVKFLCEGLRYPECKLQTLVLWNCDITSDGCCDLTKLLQEKSSLLCLDLGLNHIGVKGMKFLCEALRKPLCNLRCLWLWGCSIPPFSCEDLCSALSCNQSLVTLDLGQNPLGSSGVKMLFETLTCSSGTLRTLRLKIDDFNDELNKLLEEIEEKNPQLIIDTEKHHPWEERPSSHDFMI

SEQ ID NO: 493 - protein, 8 aa, Homo sapiens
SLFWGCPW

SEQ ID NO: 494 - protein, 81 aa, Homo sapiens
MYLHSLPFCFAGISCLCCLSKLPVEILSILIINMSLDSYRLYQPALSFCQTELSPLFPYKADLYSCFSRYCLYISLFHSPL

SEQ ID NO: 495 - protein, 66 aa, Homo sapiens
ETVGCGFSLSFFFNFLCWVFEQPHVPFPGSLLIYLLELKWMGSRALCVSMLCFLTRLHSEALMPFG

SEQ ID NO: 496 - protein, 29 aa, Homo sapiens
MATLSLRAGLGFCFLLGLTEYFVGFHLIP

SEQ ID NO: 497 - protein, 29 aa, Homo sapiens
MLIRLYMVCGCFLPTTVELNSCIRDLMAC

SEQ ID NO: 498 - protein, 31 aa, Homo sapiens
MPLVPLLLSCPPTWLARFGVSLPCSGIPVLA

SEQ ID NO: 499 - protein, 16 aa, Homo sapiens
MTCCLLRSGVPVCLSL

SEQ ID NO: 500 - protein, 13 aa, Homo sapiens
MWCPAFGRVFCSR

SEQ ID NO: 501 - protein, 26 aa, Homo sapiens
CGTAYCLFTPSPGMPQASAFHCSSLF

SEQ ID NO: 502 - protein, 33 aa, Homo sapiens
MLLGTYFKVYLIFKCFYIFLYKSRKMHFHLQKS

SEQ ID NO: 503 - protein, 196 aa, Homo sapiens
MWFMYLLSWLSLFIQVAFITLAVAAGLYYLAELIEEYTVATSRIIKYMIWFSTAVLIGLYVFERFPTSMIGVGLFTNLVYFGLLQTFPFIMLTSPNFILSCGLVVVNHYLAFQFFAEEYYPFSEVLAYFTFCLWIIPFAFFVSLSAGENVLPSTMQPGDDVVSNYFTKGKRGKRLGILVVFSFIKEAILPSRQKIY

SEQ ID NO: 504 - protein, 5 aa, Homo sapiens
MPCLF

SEQ ID NO: 505 - protein, 51 aa, Homo sapiens
  SITE (43): Xaa equals any amino acid
MRAFIWTCGTWTLWSLSDRSLGSSRICMGFAGSLKRPGRTKAXTTFWGTWF

SEQ ID NO: 506 - protein, 90 aa, Homo sapiens
MNIKCFVMCGGLYLASILVTWREHGSPHFLDEHTNVLRKCMIGSKLQNHLPSRIIPIICTASPGANGFIQRGSTELWVIRRQYPRVRVFP

SEQ ID NO: 507 - protein, 50 aa, Homo sapiens
MYIFELSLYLEGTSFVVVLLFLLISVSLDSPPTTKGWGLCLTYLGALIVQ

SEQ ID NO: 508 - protein, 39 aa, Homo sapiens
MLLEKVIRLRCSCFVLLCFSLSWVGVSSSNDVQVDLFSH

SEQ ID NO: 509 - protein, 71 aa, Homo sapiens [sequence omitted]

SEQ ID NO: 510 - protein, 327 aa, Homo sapiens
MLATSQALDTVWRMAKGFVMLAVSFLVAAICYFRRLHLYSGHKLKWWIGYLQRKFKRNLSVEAEVDLLSYCAREWKGETPRNKLMRKAYEELFWRHHIKCVRQVRRDNYDALRSVLFQIFSQGISFPSWMKEKDIVKLPEKLLFSQGCNWIQQYSFGPEKYTGSNVFGKLRKYVELLKTQWTEFNGIRDYHKRGSMCNTLFSDAILEYKLYEALKFIMLYQVTEVYEQMKTKKVIPSLFRLLFSRETSSDPLSFMMNHLNSVGDTCGLEQIDMFILGYSLEVKIKVFRLFKFNSRDFEVCYPEEPLRDWPEISLLTENDRHYHIPVF

SEQ ID NO: 511 - protein, 62 aa, Homo sapiens
  SITE (25): Xaa equals any amino acid
  SITE (45): Xaa equals any amino acid
MLPSPKPAPLPHFPVAPLVLFAHWXLCSSKGVLPEVRGLSLHPLXHGAAVPALPLPEAAAPA

SEQ ID NO: 512 - protein, 130 aa, Homo sapiens
MYQTPMEVAVYQLHNFSISFFSSLLGGDVVSVKLDNSASGASVVAIDNKIEQAMDLVKNHLMYAVREEVEILKEQIRELVEKNSQLERENTLLKTLASPEQLEKFQSCLSPEEPAPESPQVPEAPGGSAV

SEQ ID NO: 513 - protein, 57 aa, Homo sapiens
MNSQVLYFTVLVCLMEISRWSHKNILCSVPSKRTIYFSSLIVPQSHIWWWSAKSHLV

SEQ ID NO: 514 - protein, 9 aa, Homo sapiens
ALWLLLQLS

SEQ ID NO: 515 - protein, 19 aa, Homo sapiens
MWLMMQLLSFFVFLCLLYL

SEQ ID NO: 516 - protein, 21 aa, Homo sapiens
MFKVRGFLSICLVFCWQVTCR

SEQ ID NO: 517 - protein, 43 aa, Homo sapiens
MFTIRSRMCLHFLVLVICILRECESVCVCVCVCVCLWHLGRVV

SEQ ID NO: 518 - protein, 29 aa, Homo sapiens
MKSVLSICSFLGCALSAVSKKSLPNQRLQ

SEQ ID NO: 519 - protein, 571 aa, Homo sapiens
  SITE (189): Xaa equals any amino acid
  SITE (531): Xaa equals any amino acid
  SITE (535): Xaa equals any amino acid
  SITE (538): Xaa equals any amino acid
  SITE (545): Xaa equals any amino acid
  SITE (554): Xaa equals any amino acid
  SITE (560): Xaa equals any amino acid
  SITE (561): Xaa equals any amino acid
  SITE (564): Xaa equals any amino acid
  SITE (566): Xaa equals any amino acid
  SITE (567): Xaa equals any amino acid
  SITE (569): Xaa equals any amino acid
  SITE (571): Xaa equals any amino acid
MSALFLLVIGTAYLEAQGIWEPFRRRLSFEASNPPFDVGRPFDLRRIVGISSEGNLNTLSCDPGHSRGFCGAGGSSSRPSAGSHKQCGPSVHPHSSHSNRNSADVENVRAKNSSSTSSRTSAQAASSQSANKTSPLVLDSNTVTQGHTAGRKSKGAKQSQHGSQHHAHSPLEQHPQPPLPPPVPQPQEXQPERLSPAPLAHPSHPERASSARHSSEDSDITSLIEAMDKDFDHHDSPALEVFTEQPPSPLPKSKGKGKPLQRKVKPPKKQEEKEKKGKGKPQEDELKDSLADDDSSSTTTETSNPDTEPLLKEDTEKQKGKQAMPEKHESEMSQVKQKSKKLLNIKKEIPTDVKPSSLELPYTPPLESKQRRNLPSKIPLPTAMTSGSKSRNAQKTKGTSKLVDNRPPALAKFLPNSQELGNTSSSEGEKDSPPPEWDSVPVHKPGSSTDSLYKLSLQTLNADIFLKQRQTSPTPASPSPPAAPCPFVARGSYSSIVNSSSSSDPKIKQPNGSKHKLTKAASLPGKNGNPXFAAXTAXLRQEPRXGMALLKVSXKQNRFXXAAXGXXTXSX

SEQ ID NO: 520 - protein, 348 aa, Homo sapiens
  SITE (34): Xaa equals any amino acid
  SITE (37): Xaa equals any amino acid
MNMTQARVLVAAVVGLVAVLLYASIHKIEEGHLXVYXRGGALLTSPSGPGYHIMLPFITTFRSVQTTLQTDEVKNVPCGTSGGVMIYIDRIEVVNMLAPYAVFDIVRNYTADYDKTLIFNKIHHELNQFCSAHTLQEVYIELFDQIDENLKQALQKDLNLMAPGLTIQAVRVTKPKIPEAIRRNFELMEAEKTKLLIAAQKQKVVEKEAETERKKAVIEAEKIAQVAKIRFQQKVMEKETEKRISEIEDAAFLAREKAKADAEYYAAHKYATSNKHKLTPEYLELKKYQAIASNSKIYFGSNIPNMFVDSSCALKYSDIRTGRESSLPSKEALEPSGENVIQNKESTG

SEQ ID NO: 521 - protein, 132 aa, Homo sapiens
MLVIQITSVDFHGIPLSVPQSLTRRQCTCRGWKEDEPMSRLCINQGERKSRWKEVGRWRKQQLLLALDDGPEGLSLLVTPLWVLFPYLSVTRFLILIPCCEFGSLCWAIQSSSERAKLVLELRCRWGKRGLS

SEQ ID NO: 522 - protein, 9 aa, Homo sapiens
MPLWAHLAS

SEQ ID NO: 523 - protein, 327 aa, Homo sapiens; identical to SEQ ID NO: 510

SEQ ID NO: 524 - protein, 62 aa, Homo sapiens
  SITE (25): Xaa equals any amino acid
MLPSPKPAPLPHFPVAPLVLFAHWXLCSSKGVLPEVRGLSLHPLGHGAAVPALPLPEAAAPA

SEQ ID NO: 525 - protein, 130 aa, Homo sapiens; identical to SEQ ID NO: 512

SEQ ID NO: 526 - protein, 57 aa, Homo sapiens; identical to SEQ ID NO: 513

SEQ ID NO: 527 - protein, 9 aa, Homo sapiens
ALWLLLQLS

SEQ ID NO: 528 - protein, 9 aa, Homo sapiens
ALWLLLQLS

SEQ ID NO: 529 - protein, 19 aa, Homo sapiens
MWLMMQLLSFFVFLCLLYL

SEQ ID NO: 530 - protein, 19 aa, Homo sapiens
MWLMMQLLSFFVFLCLLYL

SEQ ID NO: 531 - protein, 47 aa, Homo sapiens
  SITE (17): Xaa equals any amino acid
MFKVRGFLSICLVFCWXGHMQVIGYGKGKMPRLLLGWSPSPKFKPPE

SEQ ID NO: 532 - protein, 43 aa, Homo sapiens; identical to SEQ ID NO: 517

SEQ ID NO: 533 - protein, 43 aa, Homo sapiens; identical to SEQ ID NO: 517

SEQ ID NO: 534 - protein, 471 aa, Homo sapiens
  SITE (37): Xaa equals any amino acid
  SITE (41): Xaa equals any amino acid
  SITE (43): Xaa equals any amino acid
  SITE (48): Xaa equals any amino acid
  SITE (191): Xaa equals any amino acid
  SITE (373): Xaa equals any amino acid
  SITE (446): Xaa equals any amino acid
STPSGYLELPDLGQPYSSAVYSLEEQYLGLALDVDRXKKDXEXEEDQXPPCPRLSRELLEVVEPEVLQDSLDRCYSTPSSCLEQPDSCQPYGSSFYALEEKHVGFSLDVGEIEKKGKGKKRRGRRSKKERRRGRKEGEEDQNPPCPRLSRELLDEKGPEVLQDSLDRCYSTPSGCLELTDSCQPYRSAFYXLEQQRVGLAVDMDEIEKYQEVEEDQDPSCPRLSRELLDEKEPEVLQDSLDRCYSTPSGYLELPDLGQPYSSAVYSLEEQYLGLALDVDRIKKDQEEEEDQGPPCPRLSRELLEVVEPEVLQDSLDRCYSTPSSCLEQPDSCQPYGSSFYALEEKHVGFSLDVGEIEKKGKGKKRRGRRSKKXRRRGRKEGEEDQNPPCPRLNGVLMEVEEPEVLQDSLDRCYSTPSMYFELPDSFQHYRSVFYSFEEQHISFALXVDNRFFTLTVTSLHLVFQMGVIFPQ

SEQ ID NO: 535 - protein, 43 aa, Homo sapiens; identical to SEQ ID NO: 517

SEQ ID NO: 536 - protein, 29 aa, Homo sapiens
MKSVLSICSFLGCALSAVSKKSLPNQRLQ

SEQ ID NO: 537 - DNA, 1918 bp, Homo sapiens
aggacctccacaaaaagtactcgtacatccgcaagaccaggcctgacggcaactgtttctatcgggctttcggattctcccacttggaggcactgctggatgacagcaaggagttgcagcggtgagaagggtgggcactgggcaccgaggcaggtgggtgtctacctcctccccgggcgagtaggatgtgtctcgagtagggtgtctccctccttcccgggcgatgggctggactctggccttgcaggcggggcagtgctgtctcggccctggcgtctgggctggtcgaggagcccatgctggcccacctttccatcccacccccaggttcaaggctgtgtctgccaagagcaaggaagacctggtgtcccagggcttcactgaattcacaattgaggatttccacaacacggtgagccctggtgcctgtcttgggctgggccatgggggaggggttcacctggtgaggaccacccatctcctccctgtcatcttgccctttctccctccgtggctgcagttcatggacctgattgagcaggtggagaagcagacctctgtcgccgacctgctggcctccttcaatgaccagagcacctccgactaccttgtggtctacctgcggctgctcacctcgggctacctgcagcgcgagagcaagttcttcgagcacttcatcgagggtggacggactgtcaaggagttctgccagcaggtgccgtccccctcccctttactctcggccgggggagtgcagtgggccacagggcctggggcggggtgcggagaccagggcctgaccggcacctgtgccacaggaggtggagcccatgtgcaaggagagcgaccacatccacatcattgcgctggcccaggccctcagcgtgtccatccaggtggagtacatggaccgcggcgagggcggcaccaccaatccgcacatcttccctgagggctccgagcccaaggtctaccttctctaccggcctggacactacgatatcctctacaaatagggctggctccagcccgctgctgccctgctgcccccctctgccaggcgctagacatgtacagaggtttttctgtggttgtaaatggtcctatttcacccccttcttcctgtcacatgaccccccccccatgttttattaaagggggtgctggtggtgagccgtgtgtgcgtgtccctgctctgctgcccgcctggctgctctgtctgctgccccctccccccaggtgggtccccctgcttttcacctatctactcctgagcttccccaacaggagcaggtttgaggggccaggcctcttggaggcccctcctgcttcgttgggttctgcttccttcccttcttagctggctcaggggcttctatgggatcctggaagttccttagggacttgcccagggtcccagggccacccacacttcatctgctccctcataggccccacctccacgtcccggctgggccccagaccccagcttcctgccctccaccgggagtctgcatggttgggagtcctgggtggaggggcctttgtgaggctggacccggctcagggcaggtggaggagctgggcctcccacagggtgcccgggcagtgccatcctggtgggggagggcagccttcaaacgtgtggggtctacagtcctcaggtctaggcagggctgccggttctccacctccccatccgccccaggccccctgcctgtgcctgccttgcaccccctctgcttgggccacggtgtctctgcattgcctgcctttttgccttcacctcttttcttccccgccccctgcacattcggggtctcagcccccaggctgtgagctccttgggggcaggccctcaataaatgtgaactgctgctgccgcctctgccgtccgcctgtgcctctgcccgcctgg

SEQ ID NO: 538 - DNA, 1920 bp, Homo sapiens
aggacctccacaaaaagtactcgtacatccgcaagaccaggcctgacggcaactgtttctatcgggctttcggattctcccacttggaggcactgctggatgacagcaaggagttgcagcggtgagaagggtgggcactgggcaccgaggcaggtgggtgtctacctcctccccgggcgagtaggatgtgtctcgagtagggtgtctccctccttcccgggcgatgggctggactctggccttgccaggcggggcagtgctgtctcggccctggcgtctgggctggtcgaggagcccatgctgggcccgcctttccatcccacccccaggttcaaggctgtgtctgccaagagcaaggaagacctggtgtcccagggcttcactgaattcacaattgaggatttccacaacacggtgagccctggtgcctgtcttgggctgggccatgggggaggggttcacctggtgaggaccacccatctcctccccgtcatcttgccctttctccctccgtggctgcagttcatggacctgattgagcaggtggagaagcagacctctgtcgccgacctgctggcctccttcaatgaccagagcacctccgactaccttgtggtctacctgcggctgctcacctcgggctacctgcagcgcgagagcaagttcttcgagcacttcatcgagggtggacggactgtcaaggagttctgccagcaggtgccgtccccctcccctttactctcggccgggggagtgcagtgggcccacagggcctggggcggggtgcggagaccagggcctgaccggcacctgtgccacaggaggtggagcccatgtgcaaggagagcgaccacatccacatcattgcgctggcccaggccctcagcgtgtccatccaggtggagtacatggaccgcggcgagggcggcaccaccaatccgcacatcttccctgagggctccgagcccaaggtctaccttctctaccggcctggacactacgatatcctctacaaatagggctggctccagcccgctgctgccctgctgcccccctctgccaggcgctagacatgtacagaggtttttctgtggttgtaaatggtcctatttcacccccttcttcctgtcacatgacccccccccatgttttattaaagggggtgctggtggtgagccgtgtgtgcgtgtccctgctctgctgcccgcctggctgctctgtctgctgccccctccccccaggtgggtccccctgcttttcacctatctactcctgagcttccccaacaggagcaggtttgaggggccaggcctcttggaggcccctcctgcttcgttgggttctgcttccttcccttcttagctggctcaggggcttctatgggatcctggaagttccttagggacttgcccagggtcccagggccacccacacttcatctgctccctcataggccccacctccacgtcccggctgggccccagaccccagcttcctgccctccaccgggagtctgcatggttgggagtcctgggtggaggggcctttgtgaggctggacccggctcagggcaggtggaggagctgggcctcccacagggtgcccgggcagtgccatcctggtgggggagggcagccttcaaacgtgtggggtctacagtcctcaggtctaggcagggctgccggttctccacctccccatccgccccaggccccctgcctgtgcctgccttgcaccccctctgcttgggccacggtgtctctgcattgcctgcctttttgccttcacctcttttcttccccgccccctgcacattcggggtctcagcccccaggctgtgagctccttgggggcaggccctcaataaatgtgaactgctgctgccgcctctgccgtccgcctgtgcctctgcccgcctgg

SEQ ID NO: 539 - DNA, 1836 bp, Homo sapiens
gctccatccaacacctgggccgccttccttccccccagtcagagctcagacagtaggagctgccacaacgagatctttattaggctcctcgggggcggggcgcggagggaaagaaggggtggccaggcccaggccaggctgcaggctttggcgacctctcagagctgggagcggggtcccgaaggcgggtctgagggcagagcagagtcagaggtgtctatgggcgtccccgacctcccaggctgccccgtggtttcccgccctgcttgggggtgagcgggggttagtgggcgggttagtctagggccggggccgccgcacggggcgaggccctgcttaccagtcccggtcagggtgggctgcgggagcctcaggctggaaggcagaggacagtgagagcccgcccccagggtggaccggggcaggggcgggccgtggggcggcgcggggcacgtacccacggggaagtagtgggggagccggctccggtagatgtcctcgtccttctcgaggaacacgcagatgatcagccggtccacctgcgccaggggctgctcagcctgggccgagctgccacgcctggccccaggatcctgtgactgcctgccctggtgcaggctttcacctgcctggccctgcgcccttcacggaggctcacggctgtgtgccatcacccccatctcgccaccgccagcgcccttgcgcaggagaaacagggaaggaaggggcgggcctggccctgcgctctgcaccctgactccctgggcgatgatgggggctggtcactctggccaggatgcggaccccaccctcgcccgggcccaggactcaccttgtccttgtgctgctccagccactctcgcagcgtggccagcacgatctcggcggccgcctcacaggggtagcctgaggcgggtggggcgggagtgagtcctaggctctggccccgcccactcccctgtccgccccggcccctcccggcgtctgggtccaccgcccactcctggtccttgcctttcttccagactcaccaaacacgccggtggagatgcaggggaacgcctgggcggggaggggtgagagggggttggaacattgtcactgcgccccgcctcccgccctcccccgcgggccgtccctcaccaccgagcggagccggtgctccagcagcaggtccagactgctcaggtagcagctgcggagctcggcagcctggctggcgctgggctccccgtaggcgatgggccccactgtgtggatgacgtctacggggggcgacggggtcagaccggcgggggtctacgcggtcctcagctccctcgcttccccctgccggcctgggcagaagggggcaggaaacacctttccccccaagcgctgagcctcctccgcgaaggcccccacccctgtgggccccctcgagcccgaatccgcacgcgcacagagccccgcgccccctccccacatctgtatgggcccggctgagacccgagcgcgagtgtgggcgcgaaggcgttgccccccagctccatcctcagcctccacgcacggtctcccccatgtgcttcctggggtgtgcggggtgggggccgggtcttggcccttaaggttaagaagggccccctgaggagttccccagcactcctgtgggggccgcagccctgatgtcccagtgacacacgggcgccctgtctgcgccccacagctgggggcgcgtcggggactcacacttggccgggagccgatagccgccggtgatcttggccttgccagtcttacagctctgcagggtccggcactcgtcggtaagcagggggccggcggcccgatgaatgc

SEQ ID NO: 540 - DNA, 1837 bp, Homo sapiens
gctccatccaacacctgggccgccttccttccccccagtcagagctcagacagtaggagctgccacaacgagatctttattaggctcctcgggggcggggcgcggagggaaagaaggggtggccaggcccaggccaggctgcaggctttggcgacctctcagagctgggagcggggtcccgaaggcgggtctgagggcagagcagagtcagaggtgtctatgggcgtccccgacctcccaggctgccccgtggtttcccgccctgcttgggggtgagcgggggttagtgggcgggttagtctagggccggggccgccgcacggggcgaggccctgcttaccagtcccggtcagggtgggctgcgggagcctcaggctggaaggcagaggacagtgagagcccgcccccagggtggaccggggcaggggcgggccgtggggcggcgcggggcacgtacccacggggaagtagtgggggagccggctccggtagatgtcctcgtccttctcgaggaacacgcagatgatcagccggtccacctgcgccaggggctgctcagcctgggccgagctgccacgcctggccccaggatcctgtgactgcctgccctggtgcaggctttcacctgcctggccctgcgcccttcacggaggctcacggctgtgtgccatcacccccatctcgccaccgccaggcgcccttgcgcaggagaaacagggaaggaaggggcgggcctggccctgcgctctgcaccctgactccctgggcgatgatgggggctggtcactctggccgggatgcggaccccaccctcgcccgggcccaggactcaccttgtccttgtgctgctccagccactctcgcagcgtggccagcacgatctcggcggccgcctcacaggggtagcctgaggcgggtggggcgggagtgagtcctaggctctggccccgcccactcccctgtccgccccggcccctcccggcgtctgggtccaccgcccactcctggtccttgcctttcttccagactcaccaaacacgccggtggagatgcaggggaacgcctgggcggggaggggtgagagggggttggaacattgtcactgcgccccgcctcccgccctcccccgcgggccgtccctcaccaccgagcggagccggtgctccagcagcaggtccagactgctcaggtagcagctgcggagctcggcagcctggctggcgctgggctccccgtaggcgatgggccccactgtgtggatgacgtctacggggggcgacggggtcagaccggcgggggtctacgcggtcctcagctccctcgcttccccctgccggcctgggcagaagggggcaggaaacacctttccccccaagcgctgagcctcctccgcgaaggcccccacccctgtgggccccctcgagcccgaatccgcacgcgcacagagccccgcgccccctccccacatctgtatgggcccggctgagacccgagcgcgagtgtgggcgcgaaggcgttgccccccagctccatcctcagcctccacgcacggtctcccccatgtgcttcctggggtgtgcggggtgggggccgggtcttggcccttaaggttaagaagggccccctgaggagttccccagcactcctgtgggggccgcacccctgatgtcccagtgacacacgggcgccctgtctgcgccccacagctgggggcgcgtcggggactcacacttggccgggagccgatagccgccggtgatcttggccttgccagtcttacagctctgcagggtccggcactcgtcggtaagcagggggccggcggcccgatgaatgc

SEQ ID NO: 541 - DNA, 11138 bp, Homo sapiens
cggaggcagagtaagaagactcagtaccgggaataccttgacttcattaaagaagtgggcttcacctgtgggtttcacgtggacgaagactgcctcaggattccttcaaccaaaagagtatgtctgattctcatgttgttctaggcggtgtgtcggtgttcagatggagagctcagggctctgccacagagccatgaaccatgctgtaacgttcaaaatgttctagaacgtgccggtgctgatttctgtgcctctgtcactgatgaggcccagaggcttgttctgtcccatggtgccctccttaaaggcacccggtgctccctcctccaggcctgcaggagtcctcgccaagccctccttgcctctccagaagctctgagtggccccaggggacctgcccagaggaggcctcagtgtggcctgtggctgacctccctgtggaaagttcctgctccttcaagtcgcagataattggctgcgattgaagtgtgtttcagaagttcacagtgatttcccattttctcattaaaggcctagttcattcagattcacctgaaatgtcatttgggcagaagttggcccgggggctttctgtaagcagtgggactgtgcctctgacctttgtgtggacagggcagacttatgccctcttgccgctccaaaggcttgaccttttgaaagtaccgtggaagtgtttacagcagctcacctatgtctctggtaactttatttgacaagactgtggctggcagacagtgtgcttttaaaaaataaccccgtcgtgtccaggccacagaatttgatggctgccttagcaagaaagggcccagctgatctgagtgaagcctcggctctgctgctgcccgtggtgcactcgggctgatcgcggagctccgctaagcctgtcctcacctgtgagaccaggaggaggctgcccgggtctctgtgggggctggacaggatgatgtcttcagagcccacagcggggagggcatgttgtgggcactcgctggccggctgccgtcatagccgtgcaccaggagcagcgttggcttgtggcacaggcctcagggccgctggcgctgtcactgccctgctaccgtgggaagttaccttaggactcgctgctgaaccgtcccgtcatcctctgtgtcctctgtttttggcaagtcttggtcttctgagttcagaattgatttggggaaactgctaaagtttgggtcctctaggcgggtccgaggagcccgtggctttgatttttgcacttgcttctccattactaattggtagagaccgtggactgtcgcttcatctctctgagcttcagttttcttatcactggcaggtttggggatcgaatgtaagagtggatgtgaacgtgctttgtcatttttaaagcagttcacacacagcacatgtctggtggggactgggtgtgtgacaggcactgagaatttaaaatcccgctggaagagctggggagcagaggtgtggctgtcacgtagtgaggaggtcggcttccttatcacccgcgcctggccttgtagttgatgcctggagaggaagcccagaaatgaggtgcccttgctggggctgggcagggcctggttgtccggaggggactgtctgaagggcaccctccatcggggtgtgcggcaaagggaggcaagcacgcatggagcacctctatggctccaggccctctgcgcagcccccgtatgcactcgctggctctggcaaggtggggacaaagctgcctcccttcccagcccctggggcactctgcaactctgcagcgttaccatcagcatgtgcccccgccgggcggccgaggggtggaatgaggggcggcagcgggaaactaggacggtgcggctgccgggcccaggagtgtggactcttgagtttaggcgcctttgttagatcttgtgaaggtccaagatctaacaatgatgagagggaaccatgggctcttactgtttttttaatttttaagttacttatattggtgtcagtttttattttgtatttatttttattgatttatttattttgagatggagtttttgctcttgtcacccaggctggagtgcattggcacaatcttggctcactggcctctgcctcctgggttcaaatgatcctcctgcctcagcctcctgagtagctgggactacaggtgagggccaccacgcccggctaatttttgtatttgtagtagagacgggattttgccatgttggccaggctggtctgaaactcaagtgatccgcctgccttgggctcccaaaatgctaggatgataggagtgagccaccgtacctggctggtgtcagttttttaaatcaggattttttcatgatagacattgaaaacttgtgatttgtactccaggatgagagaattccatggagaacgttgaaatagactagccagctaaaatacttgctttgctttcttcaaacgcaggtctgtctcgttggaaaatccagaacatacccttcctccagagaagcttccgtggatgaaaagaggactcagtacattaagagcaggcggggctgccctgtaagcccacctggctgggagctttccccttctccacgctgggttgctgctggcagtgctggtcactgtgacggtcagcaagctctggacgccagggtcgggtgtgtaaccagggcctgggccgctgagcatggagcagggccccaggctgaaggaccctggctacctggatttcatcccagagaaaaggctgagcgtgtgaggaactgtgccgccctgccacgagattttattgaccaagtggttttgcaagtagcgaatttactgttaggtggaaagcaattaaacacaagaagttctcgaaatgggagtttgaagacctggaatgggggaggtaagctgtccaccatcttagggaggggctagcacgctcccaggcttgagggcaggaattcacgtcttcagaaccgacatgaaatggtgtggccctgtgactacacactttgaaaaagccattgatggtgggtgcataggctctcttcaagcaaattctttaaaattttccaaatagctcttataaacataaaggactttgttatttccagggagtgacagagtttggacccttaattaacttttaccaaacatgcaggtttaggggctagaactactcattttcaatctagaaattatccaaagagaaaacaggttactgagtgcaagcaaaatgcactgtccccttgagtatgtggtaagatttggagctgttgtgattcgataatttaattctctttgaaatccccaaaacacaacaatcatccatggcaaaaggagaaaattacatcgattgttctcatggggtgagtggtgtgctgaaattatgttctcaggtgagtggtgtgttgaaattaacggcattcagagagccagccagggctgtaaggacctcgcctccttccgggcagggatgctgcttggccgccagagggtggtgtagagctgcagccaacgcctggcttctcttgcagttttgggaactggagaagagcacggagccccatcccctcccggcccctccgtcggtgacttctgcctggctgcgcatttgagggaaacccttcttctccaggctttgctttcctcacctatgaatgttgggacaaaatcatacccgtttccttcttcatcctttgtcctcttgtaccatgtgtacgtgggatgggaccgggccatggagcatagacggcccctccagaaatcattcgaacctgatggtacctggtcagcagagcctctagccatctggcgagagtggccctggctcagtggctgatggggccgactagctgcaaaccaccaggcaccgtggggcctctgggttggccctgctgactaaaggcaccctgctgtggtggggctggagcacagaggaagaaggctgaggctggcagagcatggagcccaccacaggcaactgggacccagagccccagggacatcagtgtggtctgaaagttcccacgtgcagtaaacagtgacagttcttgagtgcagtttgacctttaaattcccaggagatgacgggcacacagatgtcagctgtgcctgggatggacggctttcggtgggtgaggaggaaggaggaacagacctggagatggagagcggggatgggtgagcggtgggctcagtcctgcctgcgccttggaacttgggaatcagggcacctaacaggctctggacccccgtcccctccagatgggtgtccgtgggtctggggcttgttagggactctccacgtggccttggcctctcagcccactgcctccctcccgcccacaggcggccttcagggcctttggtcgcccccacccagcctgtcctcaggcaggcacctctgcgtttctgtgcctgtgggccatgtgtggctctgtctccaggacctcacccatcctagctcggcgtctgtccctgtgggacactgctgagaaatagggtaggaaagggccctgccctcaagaggctccaagtcctgcctggctaggagtcaagaccgcacacgtcaaaggatgagaaaccaagaggccggatatgccaggccaggaggcacccatggctgagtgtgagattccctgttatggagtccatgctgggccagagccggggcaacagggaaggctgactgggacaatatgtgatcttttttaaaacactcccgctcctctcagaatggatttgagacagccgagaggtggactcagaaggttggccaggctgggtgggcaggattctcgcagcagctgcgacagcggctgccagcaccaggctcctgggtcaggagtgtggtgtcctgatccgtaggggtctgacaggctcagctgcatacagacaggcgccgtctcctccgctctcctgcagcttgggagggtgtggataagatgtgaggtgcagcacctggcagataggaagttcctggcaaatacatgcaggaaaaccagctttcattcatatccaatttgatgttttggtaataaatgactttaatgtcaccaggttttctgattagagcattttgaaatacctgcaggctctcaaagcagaaattcgaatgggaaagagaccatcactgtggtgtctgtgctgttcctttttttagtgcctagcatggccttgctggccaccctagagccggtagcgccagggctggctgccccatggttggagcagccactgggaaggctcaggccccaggcttgccagcttggccttccttctttagtctgagaaaccctggctccaaacagccaccccccttcatgggtcaccagtgagaagagcttgaggtgaccacccagagcaggcagcatcacctgacgcctggccctgtgcgggcatggggcatgtgtggggctgcgtcttgtcaggctgtgccaccttagctgggtggggacgccacggccctcacggtttggtgcggtgtggtgtgggttaggtgagatggaatcgtccttcgtgctggagtgcataacgcgtgtgagtgtatggaactgaaatggactgtttctgcctgtgtgacaggttcgtaatattttgctgttgttttggggaaaaaaaaaacccgtttttccacagagagcctatctctggcagaagtagccaacgagctggacacggagaccctgcggaggctgaagcgggagtgtgggggcctgcagacgctgctccggaacagccaccaggtgttccaaggtacggagtccgcctctcccccgccgttctttccttctttttcccccttttttcagttaaataatgttttattttagagtggtttagactcactgaagaatctgacagaagcagcaagttccgcggtgccccacccagctctgacgtgggtggcatttgacctcagggtgggacgtgggtcaccccgttccctccttgctcctctggacctcgtcccatgcgatgtccccaggctggtctctctccccctatgctgtgcttgctgacgcctcagctccacttgctccacgcaggacagagcaagtcgggtagccgctggccggtcccctgttggctgggggtcattgtttggcgtcatctttagctgctgcaaactgaaagcatcctgagccacagagccagggtggggagtgggaagagtgagccctgccccacaggcggaggcctggactcctgtggccctcgccccacgggcctgggcaggcggaggtcctggtacccagttcccctgctccccaacgccctgtgactccaggactgccagggtatggggaggcaggagggccctccacccgcttgtccattcactcagcccgcaaagcaaggcagacacatccctggccttctggagccggtggtgcagtgagggaggggggagatgtagcaggtgctcacccaggtgccagtggtgtacacacttccatcatctgcagcttccaggtgtgcacagagggggcaggaacagggcagggagccatggtttaccagcgccagcggctggggagtttgccataacttgctttgtggcgctttttttttttttttcctctttctgtaagtattttaaagcaaattctagctagcatgctatttcacccctaagtacttccacgtgcatctttaagaatagtaggtgtcttcttgtgtcaccaccatgccctaagcacacatttctgtgagttgtgatgtgcagggagaactggcctggcccgagtgggctcaggagggctttacttaggaaatgacacttgagctgggcctggaaggaaaagaggagtcaggaacagagaacagctttaggcagagcgaacagcatttgcaaagagccagggttgggaggagtaagagtgggagctggtcgggttacagccgccatgaccaggaaaaggactgggcctctgatgggtagggatgacaccgaagtcacagtgggaaggagtggcctggcttacaccctagcttctgggtcccctgcccatgaagtagccgtggggatcaggtgcagtacagtgtctggctctctgggtgtgtgagagagcacaggtgtgtgtgccattcctcatgtgtacacaagagtgcaagcgtgtgggtttgtgcacacacacacactgcctttgtgtgcctgcctgctcctggagagctgaacttggctttcagctgaactggcctctctaggtgagagctgctgttgggtggggggccggtgagcatggttggagcctgtgtttctcggggcaggcgcagaagcgtgtccctgaggctgcccccagagtagacactgggcctgcagtgctggctgggctgggcctgctggctgggctgggcctgctgcctggagtctgctcttccttgcatagagctttaggcagttagaatacttcccacctccacggggcctctttctgtctttcccaacacttgtttttgttggtttcctgaaatactgtctttttcacccatgatgagtctgcttgtatgtcagtgtttttctgtgcaggtcaccctgggggggcaaacttgtttttggaaacgcttctgagtaggaggcctgggaattgggttccaaataaacattctcctccagtcatgcgaaaactatgctctgaagctgggtcttatctctgtatgaggtttaggttttgttttaagctaacgtggctagtctcagaaaatgtttatgagagtgaggaattggaaatgtttccagatggcttcaggtcagccagccctgagcatgacccatgagggccacaagggccagccctgcctctgtccctgccccttcctgaggccgccaaggggcggcacgctgcatccatgctggctggtatggagcctggcaccgtgctgccgggtacacgcggggcctcatctcatcctgcactcatggcagagcaggcctttcctccttgaacatgtagacaagtctcagagaggtcagtgcgccggcccgatgtctcccagtgagtggagaggccacgccacagtccgggccaggtctgacccagcactggcacccctgagcctatggcatcatccgaggactgtaatcctcaacccgttcctcagagcaacttggtgaaagggagtgtctgtctgctgtcagaagcagtggtggagatggcggctcctgtgctgaggtagagtcccaggggatgcgcacggtaaggagggaggaggcggcaggaacttgggtggagcagactgtggctctgtggttccatttcaaaatgaggagcacatttccagaggaggagagtctttctagctgttggttgtctttctagctggctagagcaagtgcctctggaaggccgccccttctggcacctggccagatgggggctcaggtgttaagaggggcggccgggagctacctgccatgtccagggttgtagacacggggagtgggtcagtgaggctgggccagcctggagcctgcctgcgccgttcgggagcctcatctctatcatcagcgcccgctcctcagtccttagacaccctgcaggtcctgcttccaaaacatggttgggtgtgctcttaactccggagccgcgtgggagggcctgccgccagctggcctgtcacgttgtggtggggaagggggtgccgaggctggctctgaggggaatctgtactcagcctttggcctcagtgatcccccaccccccattctcttgacaggtcagggcatcaggccagaggcccctcactgtttgggatcatggggagttggggggaagctctggcccctggggctcctcctgagcaccctttagagggttccaggtccctcagtggccaggatgtgcccttctgtgctgcgccaggaggtgctgctgtggggacatgggcagagtgtcgcgggactgccttaacaggagacttcaggttaagaaacctcagctccaatgttgggaggcgagacagagaggcagccgtgggagggcaaacagggtcaggcctggccttggcggtgcttccagccaggctgtgagggtgagcccccaactgtggcgccgttctctgggctcatttctctagtttcaggggaaactgtaaaacatcagtctgtcaaaagcacacaggctcgttattgccacacacaaggtgatttgaaggcagaattcgagctttaattcctacactttcaagttctctttggaagtcggtgagccagacttcctcactgaggctcctttattcccccgagccttctgtcgtgagcggtttcctagcttccagcgagaaccaggaaggaggtggttgctttggccatgtttcacggggagttgttggattcccacaaggaaacggccaaatgggagcgtaggggggtatctcggcccaatttgggcggcggggtcaggaggcagcctagaggaggcctgcgaggcctgggacccaggtgacgagcgggcccacagcagccctctcctggccccaccccactctgatgtccctccagctccccagtttggagatcagccctggccattgggtcccagtggcactttcagagggggtatctaaactactgcacataggcaggtcccccttcgtgttcctgttccagagctcattggcctctgttactccacacttgcacctggaggggctccggttgggaggcgcatgtaaacccagtgcaccgggacggcaccaaggagcagaggctgccctgcaccagccccgtccttagactgcgtggagggacctgcgccttgcccctctttctgcccgtaatgctgacacagtcctcagaggtcggggctgcagcacagatgttttctcgtgtttcggctctcacaccgtggtccctccttcctccactcaagtgatccttctaaaatggtggctctgcaggacctgcctctcagccagagggaaggtcggtggcctcaatgatgaggccacaagggacccagctctgtcctctgccctcccctctggctgtccctcgaatgtggccagtcctggtgcagtctgtcctgggacactcgggtttgctgctgctttgcctaaaatgctcttcctgggtctgcgcagggctgccgctcacttcccgcagggctcaccttccccggccttgcctgaagacacatcccatacctcagtcactcccactggaggcagactcactgtgaccagcaggaactctaggctgtgttccggttgtatccctgaccctggattggcacctcccgtggcgtgggagctaaagagaggctggtgaattaaggaactttcaggtttacttctcagtgtgtcttctctgttccaaaccacagttgtgaatgggagagttcacatccgcgactggcgagaggagacactgtggaagacaaagcaaccggaagcgaaacagagactgctctctgaagcctgcaaaacccgcctctgctggttcttcatgcatcaccctgatggctgcgctctgtccacggactgctgcccgtttgcccatgggcctgcggagctgcggccaccccggaccaccccgaggaagaagatttcatgagctgcatccttgccagccgaggcctggttggggaggccaaaccaaggagagcttccccagcagtcgtcagtgctgtggtctctgctctggctgtgtttcagcccacctcctcccagctttctccacatcctcacagtgatgaaccgtatttcataaacatcacacgccagagaagccacagttactcggaagcccccagctgactgcctggcttgtttcagatgcagccgcttgaaacgtgcgcagcatcttcatatcataaagattgtgcacggatccttacaatgtctcctgggggagagcggctgaggctgccttgcacaggcccttcccagggcgctgtccgacgcctgccccaccatgtccacatctgtgaagaggatggggctcctcgagaagtaagaccgtatctgccagcgtttctcaccacactggagagcagctgctctggagcagggatccaccagattggtatttttaaaaaaggtgtcaggcttgctatgttgaggttgtttttagagttacagagaataaaaacactcataatttcctgacatgggccactctaagtggcatgaaa

SEQ ID NO: 542 - DNA, 8571 bp, Homo sapiens
ccctgtaagcccacctggctgggagctttccccttctccacgctgggttgctgctggcagtgctggtcactgtgacggtcagcaagctctggacgccagggtcgggtgtgtaacagggcctgggccgctgagcatggagcagggccccaggctgaaggaccctggctacctggatttcatcccagagaaaaggctgagcgtgtgaggaactgtgccgccctgccacgagattttattgaccaagtggttttgcaagtagcgaatttactgttaggtggaaagcaattaaacacaagaagttctcgaaatgggagtttgaagacctggaatgggggaggtaagctgtccaccatcttagggaggggctagcacgctcccaggcttgagggcaggaattcacgtcttcagaaccgacatgaaatggtgtggccctgtgactacacactttgaaaaagccattgatggtgggtgcataggctctcttcaagcaaattctttaaaattttccaaatagctcttataaacataaaggactttgttatttccagggagtgacagagtttggacccttaattaacttttaccaaacatgcaggtttaggggctagaactactcattttcaatctagaaattatccaaagagaaaacaggttactgagtgcaagcaaaatgcactgtccccttgagtatgtggtaagatttggagctgttgtgattcgataatttaattctctttgaaatccccaaaacacaacaatcatccatggcaaaaggagaaaattacatcgattgttctcatggggtgagtggtgtgctgaaattatgttctcaggtgagtggtgtgttgaaattaacggcattcagagagccagccagggctgtaaggacctcgcctccttccgggcagggatgctgcttggccgccagagggtggtgtagagctgcagccaacgcctggcttctcttgcagttttgggaactggagaagagcacggagccccatcccctcccggcccctccgtcggtgacttctgcctggctgcgcatttgagggaaacccttcttctccaggctttgctttcctcacctatgaatgttgggacaaaatcatacccgtttccttcttcatcctttgtcctcttgtaccatgtgtacgtgggatgggaccgggccatggagcatagacggcccctccagaaatcattcgaacctgatggtacctggtcagcagagcctctagccatctggcgagagtggccctggctcagtggctgatggggccgactagctgcaaaccaccaggcaccgtggggcctctgggttggccctgctgactaaaggcaccctgctgtggtggggctggagcacagaggaagaaggctgaggctggcagagcatggagcccaccacaggcaactgggacccagagccccagggacatcagtgtggtctgaaagttcccacgtgcagtaaacagtgacagttcttgagtgcagtttgacctttaaattcccaggagatgacgggcacacagatgtcagctgtgcctgggatggacggctttcggtgggtgaggaggaaggaggaacagacctggagatggagagcggggatgggtgagcggtgggctcagtcctgcctgcgccttggaacttgggaatcagggcacctaacaggctctggacccccgtcccctccagatgggtgtccgtgggtctggggcttgttagggactctccacgtggccttggcctctcagcccactgcctccctcccgcccacaggcgccttcagggcctttggtcgcccccacccagcctgtcctcaggcaggcacctctgcgtttctgtgcctgtgggccatgtgtggctctgtctccaggacctcacccatcctagctcggcgtctgtccctgtgggacactgctgagaaatagggtaggaaagggccctgccctcaagaggctccaagtcctgcctggctaggagtcaagaccgcacacgtcaaaggatgagaaaccaagaggccggatatgccaggccaggaggcacccatggctgagtgtgagattccctgttatggagtccatgctgggccagagccggggcaacagggaaggctgactgggacaatatgtgatcttttttaaaacactcccgctcctctcagaatggatttgagacagccgagaggtggactcagaaggttggccaggctgggtgggcaggattctcgcagcagctgcgacagcggctgccagcaccaggctcctgggtcaggagtgtggtgtcctgatccgtaggggtctgacaggctcagctgcatacagacaggcgccgtctcctccgctctcctgcagcttgggagggtgtggataagatgtgaggtgcagcacctggcagataggaagttcctggcaaatacatgcaggaaaaccagctttcattcatatccaatttgatgttttggtaataaatgactttaatgtcaccaggttttctgattagagcattttgaaatacctgcaggctctcaaagcagaaattcgaatgggaaagagaccatcactgtggtgtctgtgctgttcctttttttagtgcctagcatggccttgctggccaccctagagccggtagcgccaggctggctgccccatggttggagcagccactgggaaggctcaggccccaggcttgccagcttggccttccttctttagtctgagaaaccctggctccaaacagccaccccccttcatgggtcaccagtgagaagagcttgaggtgaccacccagagcaggcagcatcacctgacgcctggccctgtgcgggcatggggcatgtgtggggctgcgtcttgtcaggctgtgccaccttagctgggtggggacgccacggccctcacggtttggtgcggtgtggtgtgggttaggtgagatggaatcgtccttcgtgctggagtgcataacgcgtgtgagtgtatggaactgaaatggactgtttctgcctgtgtgacaggttcgtaatattttgctgttgttttggggaaaaaaaaaacccgtttttccacagagagcctatctctggcagaagtagccaacgagctggacacggagaccctgcggaggctgaagcgggagtgtgggggcctgcagacgctgctccggaacagccaccaggtgttccaaggtacggagtccgcctctcccccgccgttctttccttctttttcccccttttttcagttaaataatgttttattttagagtggtttagactcactgaagaatctgacagaagcagcaagttccgcggtgccccacccagctctgacgtgggtggcatttgacctcagggtgggacgtgggtcaccccgttccctccttgctcctctggacctcgtcccatgcgatgtccccaggctggtctctctccccctatgctgtgcttgctgacgcctcagctccacttgctccacgcaggacagagcaagtcgggtagccgctggccggtcccctgttggctgggggtcattgtttggcgtcatctttagctgctgcaaactgaaagcatcctgagccacagagccagggtggggagtgggaagagtgagccctgccccacaggcggaggcctggactcctgtggccctcgccccacgggcctgggcaggcggaggtcctggtacccagttcccctgctccccaacgccctgtgactccaggactgccagggtatggggaggcaggagggccctccacccgcttgtccattcactcagcccgcaaagcaaggcagacacatccctggccttctggagccggtggtgcagtgagggaggggggagatgtagcaggtgctcacccaggtgccagtggtgtacacacttccatcatctgcagcttccaggtgtgcacagagggggcaggaacagggcagggagccatggtttaccagcgccagcggctggggagtttgccataacttgctttgtggcgctttttttttttttttcctctttctgtaagtattttaaagcaaattctagctagcatgctatttcacccctaagtacttccacgtgcatctttaagaatagtaggtgtcttcttgtgtcaccaccatgccctaagcacacatttctgtgagttgtgatgtgcagggagaactggcctggcccgagtgggctcaggagggctttacttaggaaatgacacttgagctgggcctggaaggaaaagaggagtcaggaacagagaacagctttaggcagagcgaacagcatttgcaaagagccagggttgggaggagtaagagtgggagctggtcgggttacagccgccatgaccaggaaaaggactgggcctctgatgggtagggatgacaccgaagtcacagtgggaaggagtggcctggcttacaccctagcttctgggtcccctgcccatgaagtagccgtggggatcaggtgcagtacagtgtctggctctctgggtgtgtgagagagcacaggtgtgtgtgccattcctcatgtgtacacaagagtgcaagcgtgtgggtttgtgcacacacacacactgcctttgtgtgcctgcctgctcctggagagctgaacttggctttcagctgaactggcctctctaggtgagagctgctgttgggtggggggccggtgagcatggttggagcctgtgtttctcggggcaggcgcagaagcgtgtccctgaggctgcccccagagtagacactgggcctgcagtgctggctgggctgggcctgctggctgggctgggcctgctgcctggagtctgctcttccttgcatagagctttaggcagttagaatacttcccacctccacggggcctctttctgtctttcccaacacttgtttttgttggtttcctgaaatactgtctttttcacccatgatgagtctgcttgtatgtcagtgtttttctgtgcaggtcaccctgggggggcaaacttgtttttggaaacgcttctgagtaggaggcctgggaattgggttccaaataaacattctcctccagtcatgcgaaaactatgctctgaagctgggtcttatctctgtatgaggtttaggttttgttttaagctaacgtggctagtctcagaaaatgtttatgagagtgaggaattggaaatgtttccagatggcttcaggtcagccagccctgagcatgacccatgagggccacaagggccagccctgcctctgtccctgccccttcctgaggccgccaaggggcggcacgctgcatccatgctggctggtatggagcctggcaccgtgctgccgggtacacgcggggcctcatctcatcctgcactcatggcagagcaggcctttcctccttgaacatgtagacaagtctcagagaggtcagtgcgccggcccgatgtctcccagtgagtggagaggccacgccacagtccgggccaggtctgacccagcactggcacccctgagcctatggcatcatccgaggactgtaatcctcaacccgttcctcagagcaacttggtgaaagggagtgtctgtctgctgtcagaagcagtggtggagatggcggctcctgtgctgaggtagagtcccaggggatgcgcacggtaaggagggaggaggcggcaggaacttgggtggagcagactgtggctctgtggttccatttcaaaatgaggagcacatttccagaggaggagagtctttctagctgttggttgtctttctagctggctagagcaagtgcctctggaaggccgccccttctggcacctggccagatgggggctcaggtgttaagaggggcggccgggagctacctgccatgtccagggttgtagacacggggagtgggtcagtgaggctgggccagcctggagcctgcctgcgccgttcgggagcctcatctctatcatcagcgcccgctcctcagtccttagacaccctgcaggtcctgcttccaaaacatggttgggtgtgctcttaactccggagccgcgtgggagggcctgccgccagctggcctgtcacgttgtggtggggaagggggtgccgaggctggctctgaggggaatctgtactcagcctttggcctcagtgatcccccaccccccattctcttgacaggtcagggcatcaggccagaggcccctcactgtttgggatcatggggagttggggggaagctctggcccctggggctcctcctgagcaccctttagagggttccaggtccctcagtggccaggatgtgcccttctgtgctgcgccaggaggtgctgctgtggggacatgggcagagtgtcgcgggactgccttaacaggagacttcaggttaagaaacctcagctccaatgttgggaggcgagacagagaggcagccgtgggagggcaaacagggtcaggcctggccttggcggtgcttccagccaggctgtgagggtgagcccccaactgtggcgccgttctctgggctcatttctctagtttcaggggaaactgtaaaacatcagtctgtcaaaagcacacaggctcgttattgccacacacaaggtgatttgaaggcagaattcgagctttaattcctacactttcaagttctctttggaagtcggtgagccagacttcctcactgaggctcctttattcccccgagccttctgtcgtgagcggtttcctagcttccagcgagaaccaggaaggaggtggttgctttggccatgtttcacggggagttgttggattcccacaaggaaacggccaaatgggagcgtaggggggtatctcggcccaatttgggcggcggggtcaggaggcagcctagaggaggcctgcgaggcctgggacccaggtgacgagcgggcccacagcagccctctcctggccccaccccactctgatgtccctccagctccccagtttggagatcagccctggccattgggtcccagtggcactttcagagggggtatctaaactactgcacataggcaggtcccccttcgtgttcctgttccagagctcattggcctctgttactccacacttgcacctggaggggctccggttgggaggcgcatgtaaacccagtgcaccgggacggcaccaaggagcagaggctgccctgcaccagccccgtccttagactgcgtggagggacctgcgccttgcccctctttctgcccgtaatgctgacacagtcctcagaggtcggggctgcagcacagatgttttctcgtgtttcggctctcacaccgtggtccctccttcctccactcaagtgatccttctaaaatggtggctctgcaggacctgcctctcagccagagggaaggtcggtggcctcaatgatgaggccacaagggacccagctctgtcctctgccctcccctctggctgtccctcgaatgtggccagtcctggtgcagtctgtcctgggacactcgggtttgctgctgctttgcctaaaatgctcttcctgggtctgcgcagggctgccgctcacttcccgcagggctcaccttccccggccttgcctgaagacacatcccatacctcagtcactcccactggaggcagactcactgtgaccagcaggaactctaggctgtgttccggttgtatccctgaccctggattggcacctcccgtggcgtgggagctaaagagaggctggtgaattaaggaactttcaggtttacttctcagtgtgtcttctctgttccaaaccacagttgtgaatgggagagttcacatccgcgactggcgagaggagacactgtggaagacaaagcaaccggaagcgaaacagagactgctctctgaagcctgcaaaacccgcctctgctggttcttcatgcatcaccctgatggctgcgctctgtccacggactgctgcccgtttgcccatgggcctgcggagctgcggccaccccggaccaccccgaggaagaagatttcatgagctgcatccttgccagccgaggcctggttggggaggccaaaccaaggagagcttccccagcagtcgtcagtgctgtggtctctgctctggctgtgtttcagcccacctcctcccagctttctccacatcctcacagtgatgaaccgtatttcataaacatcacacgccagagaagccacagttactcggaagcccccagctgactgcctggcttgtttcagatgcagccgcttgaaacgtgcgcagcatcttcatatcataaagattgtgcacggatccttacaatgtctcctgggggagagcggctgaggctgccttgcacaggcccttcccagggcgctgtccgacgcctgccccaccatgtccacatctgtgaagaggatggggctcctcgagaagtaagaccgtatctgccagcgtttctcaccacactggagagcagctgctctggagcagggatccaccagattggtatttttaaaaaaggtgtcaggcttgctatgttgaggttgtttttagagttacagagaataaaaacactcataatttcctgacatgggccactctaagtggcatgaaa

SEQ ID NO: 543 - DNA, 453 bp, Homo sapiens
agccatccttctgcctcagcctgtcaagtgactgggactgtagatgcacgccaccatgcctggccaacttttaaaattttagaggcggggtctcgctatgttgcccaggctggccttgaactcttgggttcatgcagtcctcccacctcagcctcccaaagtgctggcatgacagctgcgagccatggcgtctgacccccgatgtttctatttaaagttatttctatggttttatacaaaaggtcacatgcagtccacactgttctgccgttgactttctgcagtgtaccctggtgcctctccattgggtatatctgcctgattattggcagcagccgtgtggcattccgtggcagcgccgcactcatcacacctgagcagtgagaataaatgggcatcttctctgaaggcacctcagctctgcagcaccacggggcggcgctgccacgggcc

SEQ ID NO: 544 - DNA, 453 bp, Homo sapiens; identical to SEQ ID NO: 543

SEQ ID NO: 545 - DNA, 27968 bp, Homo sapiens
caggagaacctcatgctttccatcctgcccaagcacgtggctgacgagatgctgaaagacatgaagaaagacgagagccagaaggaccagcagcagttcaacaccatgtacatgtaccgtcacgagaacgtcaggtacgccggcccggggcgcgggctctgatggcagagcaggctgtggagggctgcatctttgtgggacccgctaggtgctgtgggcttcaagaggttttccagggactagaagcaaggcctcccacagcattcatcagcctggcggaggaagctgccagcagatgttgaagctacagtgtgctctaggctgcttggtccaaccccatcatagaacagatatcacctggagcggggaagggactcctgtgaggtcacccagctgttgagggccagcactggggctagagccctgacctgtgattctaggaagaaggatgagttcagcctgggcaggagtgggcagtgtggggtggtccccaggcaccacagggagggaggcctgcaggggaagtctgctaggacaagtgcaaggtcagagccctgactttacctggaagggtcagggtctcactgtctgggggtcgtgagggaggaccttctcctgccctgatcctggctgccctgtgggttggagagggagctggcagtggggtcgggtacacctggctgcctggagcgtcacccccacggttccttcctcatgcagcatcctctttgccgacatcgtgggctttacccagctgtcttctgcctgcagtgcccaggagcttgtgaagctgctcaacgagctctttgcccgctttgacaagctggcagctgtaagtccctggccccgcctggctctccagcggggcctgccctcatggcctctgcctggcccccatccccggccccatgattttctcccactgtccttcctctgctttcttggccactcctccctcactgaggaggggctggagcacaggccaggccctcccctttcagaaataccaccagctgcggattaagatcctgggcgactgctactactgcatctgcggcttgcccgactaccgggaggaccacgccgtctgctccatcctcatggggctggccatggtggaggccatctcgtaagtgggatgcctctgggagggaggctcccagagcaagggccccggccctggacccagggagaagcaggtcttccgcgctggccatggcccctgggtgggggatctgctggaagcagagactgggacacagcactggttgatgggtggcgcaggctcccgctctagaagctgggatgtggcttaccttcctcacagcccaggggacctgcgaggctcccccagcctgtggggcacacttttccagccttagtccacgtattctctttttgccagaagttgcagttgtgaattttctcacgcctcctcacacttgctgggacccccacaggggctccccatctctcctcagtgttttctcaccgtgacccccgaaggcactgccctctccatctcgtgatgcagtgactgtaagaccctggcagaggggctcagggatgaggctggatcccaccccggcctctgtgctccagccttaggctgtgagggaggcaaactctcctgccctcactgtcccctactcttgcccctgctccaagtgggcttgcagctctcggatgggcagtccctctggttgacttccagcctctgcgggacccggggtgacatcaggcaccaacacggaaagggaagctcctgccgaggcccctcccccatgggatggagtccaggaagttgcctgctctttacccccttctccgagggggcggctttgcatttttaccatcttccaggttaaagcccgtctagtattgccctggaaagaaagcagtgtggcctttaccccaggggtggtagtccaggaactctaacattctctccctgccctgtcagacacgttcaggcagggggctgttcacggctattttcttcacctctgtgtctgcagcaccttgaacgtgcctggcacatacttgatgctcagtgaaatattaactgcacgaatgaataaaagagtaattggcagagagaaactgaggcccctcgggaagtggggatagggaggaaagtcgcttggtgccctcgtcctgctggcctgtgatgcctgactctgggctggccctggcctgccttaccccccacccaacaccaagctgtggggaccttgccaggccccctcttgtggaggggaagaggcccacaatgaatttctcctgcaggagcaggggcagctggctgcctcgtgaaggccacaccctgaccctcctttctgtgtgtacctggcaggtatgtgcgggagaagaccaagactggggtggacatgcgtgtgggggtgcacacgggcaccgtgctggggggcgtcctgggccagaagcgctggcagtacgacgtgtggtcgactgatgtcactgtagccaacaagatggaggccggcggcatccctgggtgagtgccattccaagggggcaggtttgaggactggggaggggaccgtcccctccatcccccagggctgtgaccctgatgagggacagggggcctcagagaaggcctccctacaaccccggaacagcattcctcctgtctcgccctggtcctggccctggctaaggccgttctgacctgccttggggtgaggcctctttgggcctgatattggatgtggcttttccttcctggaccctgcagtagcctgtcctcctgtcccctttaccgacttagggggctgcctcccctttacccactaagggggctgccccagctctccttatgtcagagcccaggtctccccaaagggagagtaatgagcagtcatcagctagcgggctcgcaggcagcgttttgcaggtcgcagtgcgattacacgccttacttgagctcccttacaggataatggaggccctgcctttagcagggcgaggctgagggaggatcagcccagccttccccatctgggccagggagcttccttcagtggcatttaggattcttggcctcagtggtgactcctcagaaacaggttttattatctcttggcagcaggggttgcaactgagaaacgtgcaaggtgggggataattggatcttgtggctcacgcctgtaatcccagcactttgggaggccgaggtgggtagatcacctgaggtcaagagtttgagaccagcctgaccaacatgacgaaaccccatctctactaaaaatacagaattagtcgggtgtggtggtgtgcacctgtaattccagctactctggaggctgaggcaggagaattgcttgaacccgggaggcagaggttgcactgagccaagatcaagccactgcactccatcctgggcgacagaacaagactctgtctcaaaaaaaaaaaaaaaaaaattccttatcgcatttgatctgctttacagcggatcaaagattgaagaaagattgtactcctgtgtcgtggctccaacactgaggctgagatgggagtaagtgccatacggcccacacagctagttagcggcccacacagctagttagcggcccacacagctagttagtggcagaactgcctccacttggcctctgccccacatgcccgagagacacggggccgagcagcagccggtgcagccgtggtccgtggactgtcccctgggggtgtgagggccacctctggccgacgctcagggcctctctctctgcaatccaggcgcgtgcacatctcccagagcaccatggactgcctgaaaggggagtttgatgtggagccaggcgatgggggcagccgctgtgattacctagaagagaagggtattgaaacctacctcatcattgcctccaagccagaggtgaagaaaacagccacccagaatggcctcaatggctcggtgagttccccaccccaccccacccaccccacccaccccacccctggattagggggttggaaaggaggagattaaggaaagattgcagaagaggtggcaggacccagcagtggctggctgtgagaggtgagtggcaggctggcacccttcccaagggagagctggtttctgggggagatggtgagtgtaattcatggcaggttgcaatggaggtgactgaagcatatcccaagaccacatccaggagggggccgctggagatgtgtcggtggcgcccaggagagcagctgggttggggctcagggtctcctgcatggaggaagtgagtgaagccacaggagtgacgtggatgctcagggagaggctcagagaggagggtgggggtggggtgactggtcatgggggaggaggaccaaggccaggaaggtttcctgagtgggaaatgagggaggaatgagatagaagtaatagagcaggggtgtctaatctttcggcttccctgggccacattggaagaagaagaattgtctcgggccaaacaaaaaatactgtgggttgaacaagcttgcaatcgtgcatcctgtgggcctgccctctggtctttttgtgggatcccccgaatatctacagacctgaagcactcagcagcttccccaggtctgtccaccaacccccaaacacctcctgtcagtctgattagaaaccaccagcagctgttgcagaaatggatccctttaccatcccctgctgaatctggaggttgtcttattttttgtaatctcatgtcaaaaccctttcctccagttatgagagtccatctaacaagacttggaattaaggagcttggtgactgtcagggaagtcgtgtcatttgagactgctctatggctgaggctttgcctaattatggctaaagcaaagcccactctggtgaggctgccggagtgaaggctgatactccccgctgattctaacctcgatgtcagtctcatccagtgtcattttaaaggctgtctctgacaactcccaaatttgtatctccacccccagtgtcttccctgcactcaacatacagccacttgtacgtctccatttgtacatataataggtatcttaaatgccacctgcccaaagctcctgccctccttcccactccataacctgctctccctcggtcttcccatctcagttaatggcagttccatccttttattaacaactgctcagaccaaaaagtttgaaatcatccttgacgcctcactttgcaatccacaagcaagttctgtggcctcagattgctctctaatcccaccgcctcccacgcccttgtcacttccagacctgtccacgccactctcatcccatgcccagatcatggctgagctctcctttcctctaggccctgcccaatggagcaccagcttcctcaaagtccagctcccctgccctcattgagaccaaggagcccaacgggagtgcccacagcagtgggtccacgtcggagaagcccgaggagcaggatgcccaggtatgtgcagggctcagggcagggggtcactgagggccagatgcgggcaggcaccaggaagcaatacgttcctgcagcaggagtcctgtgctggggagacctggccaccacccaggacctgctcctgcttagcactgtaaccatggacaggtcacccctccagccccgcaaaaccccactgtctcctcatcagttacatgccggggtgagtaaggtcaaaagaggtgcttagctcggaggcctttgtagctctgatggcccggaatcctgtagatttgagatcagtgaggacatccatggaaaattatataggatctgagaccattttggaagtgagatatcagacctggactcacccctctggctaggttcaagccccacaagttccatgcaagatgggatatttccttagcccccaaaggcgaggaattagcatgctgtcccagagtgcagggtgcctcttggggagcacccagaactggtccctgaccgcagggcgtctggagcacgttcactgatggaggtcagtgctgcagagatgggatgtctgccctgctcgggctcaccgcgtgagggggacaggagagctggccctggtgccattagagcagatgccgtagaacaagagggtagatggggctcagggtaaattaggtttttcttgagtcccccaacattcagtaacttttccttgttgcagttttcttgatagaaagtgggggtccagactcagggcactcactagcaaggaggacacagatgcagctttagcagcctgatttttcgggccctgaccctcagccagggccacgctgctcccggatctgcttcaggaacaggttcccgctgctgccacagaccatccacgtgattttacagaaggggaagatgtggctggggaaacattatctggggtcaaactgtcaaccagtggcacacctgtgcctgtgcttaagaccagggagtcttttttttttttttttgagatggagtcacgctgtcacccaggctggagtgcagtggcgcgatcttggctcactgcaacctctgcctcccgggtgcaagagattctcctgcctcagcctcccaagtagctgtgattacaggcgtgtaccaccatgcctggctaatttttgtatttttagtaaagatggagtttcactatgttggccagtctggtctcaaactcctgacctcaagtgatccacccacctcagcctcccagagtgctgggatgacaggcgtgagtcaccgtgcccggccccagggagtcgtgactgtggctcccagatgcactgttgaacccgttcagacagctctcagcccgtctcagtgactattcagactgatggctgtgtcatcacagccaggattcctgtttttggagttgatgctttttctttggaactgggaataaaagggtagtgggtgccccagctccacctacccgccccttgtcagccctctagtgatgaggacattcttctctctcccatcactttccccctcagatcttcctttccaaatgagccagatgtgagttcctttaacagttccctgaagccctagagttgggagccattcatgtccccaggctgccaatgtatatggcccccacatcaatacagcaggaagtgccaggactgcctcagcccagcagctgtctccgattacaggtctcctgctcaggagccaggggctgctccctacaatgctgtcattagcggaccctccctgcagagctctgggtggggggcccggggagccaggaaagactggagctttgggtgtagatccaggccacatggagccacgtgggagcatggggaagacttcccggaaagggattttagagctggagggattggtcctccgagtatgccctcttttgttcctttcctcctccacctctgtctttcccagctcttccccaccactctgtcccatctgccccactcacgctgcctccctggctcacaggccgacaacccctcattccccaacccacgccggaggctgcgcctgcaggacctggctgaccgagtggtggatgcctctgaagatgagcacgagctcaaccagctgctcaacgaggccctgcttgagcgagagtccgcccaagtgtaagcgccacccggaagcgtccaggcccaccactcctcccgggccctgacaagggattcaggaaactgagcatcccaaatacggcccccctgctaggccaaggcagatgtggcatttgggattcatggggcttgttcccactgcagagtaaagaagagaaacaccttcctcttgtccatgcggttcatggaccccgagatggaaacccgctactcggtggagaaggagaagcagagtggggctgccttcagctgctcctgcgtcgtcctgctctgcacggccctggtcgagatactcatcgacccctggtgagggaggggccggggagggccacgagtttcctcggctgcggtggtgccgggcggggggcgggggcaggtgtctcagcgggagcctgacattggggagcaagccagtctctgctccctgacccccactgggacggcccccacaggccccaggagtgctagacggcaccctgggcatccttccttttccctgccccgcgttttggagcagtcctagcgtcagaatggggatctggccaggatcaagagagctgagggacagaggcctccagaaggctggagaccttggctagatgggcccacactgattcttgggacaaagatggggacactgcgtcagtctcagtcaccaaggctgacctggcccctctcttggctcatcttggtaaagatagattttaggctgtgggcacagactgacgccctctctaacgcagcagtaggtcctccagggcaaggtgtggcctcctggagtccccagctggtgaagccctgtctgagggtgacgaccactctcttgttctccctttctcccctcggccaatcggggattccccgtcacagaggaggggtctggaaccctgctgggattacagtttgtcaggagccttgggctgggtcacactatctaaggttgcgggtgtgtgaccacgtgcaggccactgcaggctccggcagcatctgtttcctcatctgtgaaatgaggagaacaacccctgccctagcggacactcacgactgtggtgaggctcaaattcactcattccataagtattgattggttgtctgcttcatgcgtggggatcaagggctggggctatggcagcgatgcggcacacagaaacccctgctctcgtgaaacttgggttctggtaggggaagctacaggcaaaagcaattaaacaattaaaatatgcatccatgcgagagtaagtactgcagacacagggaaggcaaggaagggaggcgggtatgctgctggggagctttgttttgttttgtttgcattttgatgtgggatggtcagagcaggacttgctggcaggataatatttcagtaacgcctggaagcgggtgaggggcgagccttctcctatctgggggacacctgcttcggatagaggtgctgaggctggagtggcctggcccctggaggcacagtgaggaggcatcgcattgggaacgggccacaggaagagtagcaggagtccagcacagacgtggggcctcctacacgccactgcagggtgccagcttccactcttaacacaggaggccgccagaacaagggagcagaggagtcccctgttgtgacatatgcctggagaggctcactcctgctgagaacagcgcttagtgagcacagcgggagcagtgagaccaaatagcggcccagacaagccactgtggtggccaggccaggccgaggatagaggaggatcagtggttggattccgtcgatagatgctgaatgtattttggagacagagctgacaggatttgctggcagattggttgtggggcgtgagtgtggagttgaggatgtctcctgggcttctgatctgagcaactggcaggacgggggtgccgttaaccaagatggggacaaggtggaaagatgagagtggagaggcaaagatcaggagtttgctttgggacacgtgaagtttgcagtgcccacaagccaaggaggccagcatccatgatctggagtttggagggcgggtggggttggagacgtgaacctggcatcaccagcatgcaggctgtgctgcaacacgagacttgctgagctcaaggcagcgtgtccagatgcagagacagaaaaggactcaagaaaccaagcgagaaaagtgtctcaaggaggggtgagaggtgactgaaaatgggacatggatttagctaccaggaggcttctggggctcttggcaaggacaccttccagggaggggttaaacgggaatgggtgtgagcagagggtatagagaacaggtttccgggagttgtcaggttaaggtggatgtgttgagtgtgtccactgtgaagctgggggtggctgtcacaggcagactcttagcccccggcagcgagggagtgatgctgctccgtgctctgtcctttcagcacagcgacatggcaggggtgcattcctaagatccctgcccaagtttatcctgggctgtgcccaggccacctgtgagttgttccctctctgggaaatgtcccaggcagcagctgcagctggagagtggcccgctcccaggccggcactcagctggcggcccgtctcatcagggcctttgtcctgttctgcacggcaggcagcagcaattccctggcaccgcgtggagctgtacaggctcgtgctgtgctgagaggcctccccgtcccctgcccccggctcctgtcccctgccccctgcccccttcccccggtccttgtctgctggcccctgcccccggtccctgtctgctggcccctgcccccgcccctgcccccagtccctgtccgctgccccctgcccctgcccctgtctgctgtcccctggccactgtccgctgtcccctggcccctgtccgctgtcccctgccccctggcccctgtccactgtcccctgccccctgtccgctgtcccctggcccctgcccccatccccgtcccttcctctcctagcccctcaccccatctcactgtcccctctggcctctcccaattgtcttctctctgtcacaggctaatgacaaactatgtgaccttcatggtgggggagattctgctcctcatcctgaccatctgctccctggctgccatctttccccgggtaagaggcacttttctactgagctcagaagcctctggaagtgagtggcactccctgtaaaactgggcagtgatggagttattctttctgtcaaatctgacaggcagacactcctctgttaggacggtccaggcacttgcccatccattcattcaccatcagcagagcactccctctggctgggccaccaggctgtggcaggctgtggtgggccacggctgggccgtggtgggccttgttgggccgtggcgctgcagcacgtatgagtacggcagagtctgggtaaacaagaacctgggtagagaggaagtggagggccggctggaaggtgggttggccccgatggtgaaggcccttagaagccagactaaagggattaaaactttctcctgtaaggcactgaggtaccaagcagagttttttttttttttaatcagaatgacaaaggtaaagcagtgtttaggaacataaatctgacaggtggctcgccaggtcacttggagccaggataggcaggagtagctggccagagacgagcagccctgaaaactgttcctgccctggcctcacctcgtcaccacgtctgctgtggaaagggctgcgacctggaggctgtgctgttgaacaggcacatcgaggaggtccaacacagcgtcagaactcccacgccctcttctcagctctgccccttggtcagctgtcaggtgactcccaggcagagtccgttttgaggctcctgggactggaatacgggaccagcctgagttgctgtcagtcacgtcgcaggagaaaggactggcaaaggctcatggcccttgaaattctgttccttctaggcctttcctaagaagcttgtggccttctcaacttggattgaccggacccgctgggccaggaacacctgggccatgctcgccatcttcatcctggtgatggcaaatgtcgtggacatggtgagctcctgctgtccttgttgaagggacgcccctgttctcagtggagaagggcttctgtttgggtcacacaagcagtttctcagtccatccctccaccgtcatgtagctttggagtggctcttaggttcccaaacacatcatccccacctagtggaaggagtcttgtccctgtcatccagggagcctctgggatggacttgtttccttgaagctcctctcccagagtccgagagcacagttccatgtgcccaggcctgtgctaggtaccttatgtatgttgattcatttaatctgtgaaaaagtcctgagcagttgtaccagtatctgcagtttcatagggagaaactaactctcaaaaagggtaattggttgggcgcggtacgtcacgcctgtaatcccagcactttgggaggccaaggtgggcggatcacgaggtcaggagttcgaaaccagcctggccaacatggtgaaaccccatctgtactaaaaatacaaaaattagccaggcatggtggtgcacacctgtaatcccagctacttgggaggctgaagcaggagaatcgcttgaacccaggaggcggaggttgcagtgagccgagattgagccgctgcactccagcctaggcgacagcaagactccgtctcaaaaaaaaaaaaaaaaggtaattcacttgctctaggtcacacagccaggaagtgacagagtccagaatggaggcagttctaagtcccagtcctgtgtattcttcctccctgagggggcagccaaatgctttcttggggaaaagggacaggagttgggagcccagatctattggtttagaaccactgggcacgtattgagcactacatgcctggagctgtcatcagtgttctcttgtcagttgtcacggcctcctctaattgtggtagtaccatatacactatcttccttttttttcaaatataatgttattgttgtactttaacaattggagcacacggtgccgggcgcagtggctcacgcctgtaatcccagcactttgggaggccaaggcgggcggatcacgaggtcaggagatcgaaatcatcctggctaacacagttgaaaccccgtctctactaaaaatacaaaaaaattagccgggcgtggtggcaggcgcctgtagtcccagctactcaggaggctgaggcaggagaatggcgtgaacccgggaggtggagcttgcagtgagccgagattgtgcactgcactccagcctggcaacagagtgagactttgtctcaaaaaaaaaaaaaaaaaaaaaaaaaaaattggagcacacaaatacaaccaacatggagacttattctgccagtggtataagtgaaaaagctccagggctgcagctaatcagaagtccagtggggggccgggcgcggtggctcacacttgtaattccagcactttgggaggctgaggcaggcagatcacttgaggtcaggagtttgagaccagcctggccaagatggtgaaaccccgtctctactaaaaatacaaaaattagccagccacaatggcacgagcctgtaattccagctacttgggcagctgaggcaggagaatcgcttgaacctgggaggtggaggttgcagtgagccaagaatgcaccactgcacgccagtctgggcgacagagcgagactccatctcaaaaaaaaaaaagaaaaaaaagaataagtctactgggaatgaggagttaggggctccagagcctaccttggccaggggttgctggtgcccactacccagggaagagaagccccaggccccctgcatgtcacaacatgcctggaacctggcacccaggtgtggaggtcaccactgcatggggtcctggacactgtacaggacacctggagatgctgtcactcatggaggggtaaaaagctagggaggtgtaacaactgctcatgctagaatgacatggcgggaatcgcgcaagcaagacaaggttgccctgtgggtgaaagttacaaaaagggggggttgattccggttctggatgcgctttctcccggccgcatctgcccagtagcagaaccagtaaagaatccagaaggcagtgaacatccccccaatggaaggatttgggcagagactagctgtcatcacggggaggctgtgagtggggctcatggtcccgtggcccctcctgaagcaacagtgtgatatggggaagaacatgttggatttgaagcctaaagacttggctcctacttttggcttttctgcttgctaattgtgtttgggcaaatctggcccgagttttctgtacaatagggacagtactaaaaatactcgagagagtttttgtgaatgtcaaatgaggcaacggcgaggctcttagctgcagttactaactttcatatgattagtccctggtaaatttccccatctttcccggtatttctgggggagccgcgggaggtggcagctgagcgtgcactaccatgcacagccctctgtgaccagcacctgctgttctcttgaacgtgtgtccctgcccgccgtcctggcctccagctcagctgtctccagtactacacgggacccagcaatgcaacggcagggatggaaacggagggcagctgcctggagaaccccaagtattacaactatgtggccgtgctgtccctcatcgccaccatcatgctggtgcaggtcagccacatggtgaagctcacgctcatgctgctcgtcgcaggcgccgtggccaccatcaacctctatgcctggcgtcccgtctttgatgaatacgaccacaagcgttttcgggagcacgagtaagatgaagcgtgactggggatctgtattgtctccttcctcccgcccgcaaagtcctcagttcaagctcatgggcctgtgctgaggtggctttctgccactaggggtcctcaaaggcttgttcaagaaccagttcctggctgctcacagacgtatcactgtttggctaggacctgagaatagattcttcccattctccccgagtggaggacttgggataccccggtgcctggctgggcatcaggctcttgttcccagatggggcctgactgtgctgttatctgtccaacagcttacctatggtggccttagagcagatgcaaggattcaaccctgggctcaatggcactgacaggtaagggccacggcttcccctcctggcctgcactcacagcccttcttctagagacaggaatataacaggcccaagccccgggatctcaccctcccgggaggcacgtgacctgatacgtgcaggttagagaagctggcatgggttcctccaggagggctgcagcagtgcagtgaggagggaaggaaataccaggtggatggcagctgcatgtaactggctggcaggacagacaggcagcaggaaaatgaggagggaggaagacgctttggatttggacctggcttctgagcctgcagcaggcagtaattctctgtgggtcacaggcaggtccgtttccatgagttgcaatttcatctcttgaggaggatactgaaccagaagttctctaaggtccctgccagtgccaaggttttaaaattttatgattccatgacttgaacagaccttcaaggaagtttagaaataaaaagatgacctaatagaagaggggtaaaacctgcatagcccttagcaaaagaagaactctaaatggccactaataaatggcactcaagtaatcaaggaaatgccagttacaccctagtgagataccatcacacacgtaccggtccagataactctgacaatatcaagtacaatagtaactcttacactcctggtgggagtatgagttagtacaaccgtgttagaaaatattttgatctatttagtaaggttgaaaataaacctgtgtcccagcaattccactcctacatacacacccacgcagacgtgtgtatatgtgtatatatatatatacacacatcttagagaaattcatgcacatactcatgtcccaggatatatgtatgagaatgtccaaagtggcactgttcgtaatagacataccccctcccccaaaacaaatgaaaacaacccaaatgacatcaacaggaaatggatacataactggtatattcatgcagtgaaataccatacggtaatggaaactaaccacagctccacataaaaatatgtatgaacaaggtaaaaagccatggtgagattgtaccccagtcccatggctatgaaatcccatcactgatgtctcttgcttctccaaattcctgcatggttgtagctacctctgtgatcagtcaggcaatgcagtgtttcttaaatacctggggagcagccctgatgtgaataccaggtgcagccaggaggggccaggggttgcctggctgttggagaggagcccagtgagttaagaaaattttactgcccgggggagcccgacttgatgtgaaagggcctaaggagccggggtgagctctagggctggggtggcaggaagcagcaccatctagttggagggaatcaggccccctccaggaggcagatgacagccctttcagttgcacacgctctgcccagcaggctgcccctggtgccttccaagtactctatgacggtgatggtgttcctcatgatgctcagcttctactacttctcccgccacgtgagtgccgcctgcacgatccccgctctgtgcccacagcccacagcgctcctgagaagcagccctgggacctaagagcccaagctcctaaggaatggggcttcccttcacccagccccacacgtgagcctggtcaggccaccgccttctctattcaggctccttcctcagtcacacaggaagacagttcctcacctcttccgtccgaccccctccaggatggtgaaggaagcatgggagtgaaggtgggaggggatagagtgaaggcacaaacatcttgaatcaaatcaatatcccctaggccaggggctcatggcccccgcactccccgtggcgctgagggacattaacacaactgaccacagagccagaagagaaagagaagggagctgatggactttctgttgggttaaaaggaaaagagaaggccggtgcagtggctcattttgggaggctgagggtggaggatcacttgagtccaggagtctgagaccagcctgggcaatatggtgaaaccctgtctctactaaaaaatacaaaaattagccaggcatggtggcccgcacctgtaatcccagctacttgagaggctgaggcaggaggattgcttgaatctaggaggttgaggctgtagtaagctgagatcacaccactgcactccagcctgggtgacaaagtgagacaccccccccgcaccccccccccccccgccacaaccaccgcactcaaccggacaaaaaaggaaaagagaaggaagagagggaagagaaagatcctctgtacttagggcccaatgttagttcaagtgccccctactggctttccagggaagtacagccttcccaagccacttcttacccaaatggcgcctgctagaaagggggactccaccctgagttgggagatccccactgctgccacctccacgagacagacctgcagctgaaattaggtcccaagaggccccctacacacggaaggcctcctggatctctgctgtaattacggaggctgggaaccgcaccactattgggtggccttttgatgaggtgcaatctttgcagggtcttacttcccttgccatttagccatcttccttccagcctttccaaggggagttcctccattcacgttcctgtttttcttctttttttgagactgagtctcactcttttgcccaggctggagtgcagtggtgcgatctcggctcactgcaacctctgcctcctgggttcaagttgattctcctgcctcagcctcccgagtagctgggattacaggtgcccgccaccatgcccggctaatttttgtatttttagtagagacagggtttcaccatgttggtcaggctggtctcgaactcctgacctcaggtgatccgcctgcctcggcctcccaaagtgctgggattacaggcatgaaccgccacgcctggccattcctgtttttcatccttctatccagtggccagcttagagcacatgcctcgccttgtctgtgtctgtaggtagaaaaactggcacggacacttttcttgtggaagattgaggtccacgaccagaaggaacgtgtctatgagatgcgacgctggaacgaggccttggtcaccaacatgttgcctgagcacgtggcacgccatttcctggggtccaagaagagagatgaggtgaggggtgtggtctcagcccggaaccatgaggccatttgtctccatctgttctttctttcaggcagcccccgctgggcccaggccttctcagggacaggggactggggcctaggtagggctgaacctaaacagcaaacacaaataagcaaaagaggaatttctccggcctcttataaagtgcactgctgtaggcatcgtgatgtgggccgtacagctctgaggccatgtgtcagaagacaagactttggctagagcccacctttctgttgcctgtgaacttctccaaacagagtggttcccagctctacggtaccctcgtcttcacagctggggctgttagaggaactagagaagctgttttaaaatttattcaaagtagtggccgggcacagtggctcatgcctgtaatcccggcactttgggaggccgaggcgggtggatcatctgaggtcaggagtttgagaccagcctgggcaacaaatagtgaaaccctgtctctactaaaaaatacaaaaattaactggacgcggtggtgcacacctgtcgtcccagctactcgggaaactgagacaggagactcacttgaacccgggaggtggaggttgcagtgagctgagattgtgccactcaactccagcctgggtgacacagcaagactccatctctcaaaaaaaaaaaaaaaaagtagcgatgagctatttttaaattattcagagttggaataatctacagccgggcatggtgacatgtgtctgtggtcccagatacctggtgttcaaggccgcagtgtgcttcgatcatacctaattgtgcttgtttactgccactgcactccagcctgggaaacacagcaagacccactcttaaaaaaaaaaaaaaaaatgctggaataatctgactgatgtgtgagtccaaaaagctgagtgcacatgtcatgcatggaagatagatgcatttctccaacacatcatccagtcagtcggacatgctttgagcacgttgtccgcacctctttttaggagctgtatagccagacgtatgatgagattggagtcatgtttgcctccctgcccaactttgctgacttctacacagaggagagcatcaacaatggtggtattgagtgtctgcgtttcctcaatgaaatcatctcagattttgactctgtgagtgcccatcccaccctgcactctggccatgaagccggcccattccacatcacatcctacaataggctgcagaggccagagaaactggcttcattttcccagataagccccttccgcaatacatggacttctgcagccacctggaactgctgggctggggaaggggaggtgaggtgggagcccgggaaatcacccacagggtcacaggataaggataaggactggccaagcaacatctcgagacctctctgtcctgggactgtctcctcaaattcagagccggtcagcattgactgggtgacctgtataccagggagaatgcttttacacacgcgcggagcccccctaggagactgccgattttatgtcagtgttgaggttgtggaaacaggcccagaaagttaggaagttctcccaggatcatgtggcagataagcggtagactaagtaacaactttgataggaaagtgtctcttgggtttagtggggtccttgtaaacaggtacatctgtcactgggttgggtcattcctctcccttgactgctgacaattctttcctgaatcctggcctcagctcctggacaatcccaagttccgggtgatcaccaagatcaaaaccattggcagcacgtatatggcggcttcaggagtcacccccgatgtcaacaccaatggctttgccagctccaacaaggtagctaaccccagtagccagagagatgaggctctgcccccaaggcaagagattggcagcccagacctagcatgggggaaataagaactgctgtgcaaagtggtcccagacacacaccaccagcaccacgtaaatataaataagaaatagggtttattgagaaagttcggcaagcagagaaacagaacagacacacaaccccctgctgttcacagctcaggcctaagatggttgtgttctgtggccaggccccctaaggctctgtgctttcataggaactggagagcaattgtcaacaagggaaactgaaagcatggccttcagaactctggctgacggcagcctgttcttttgttaagctaatttagacctttgttcagctaccaggagagaaaattaggtgtaggagccctggtcccaagctctggtcttaaaacaccatcatcctgctttacctctacaaccatcccacggccctattatatggatgaggttaaagaaacacgtccaaggcgggtcatccccctccagtgcttatcacctagttgagggatccaaacaaggacaacctgacaaaacctaaggaccaggaccaggcccagccaaggtgaaggggtccgcctcgtggtcagactcacaggtccgtctcctctgctcaattgcccagtctttgcctagacctgctacgtgaactttgtcacagtggcaagtcagagctagcgtggctgcgactcctttgtgggaggaaaagtaaggccttgaacatctaggtgtagggaatccacccccagaacactgccagggaaggcagcagagcaggctgctgcagtgagcggcccctgacactttctccacggtcccctggcacaggaagacaagtccgagagagagcgctggcagcacctggctgacctggccgacttcgcgctggccatgaaggatacgctcaccaacatcaacaaccagtccttcaataacttcatgctgcgcataggtgagcacccccagctggcctgccccgcagcaggctcccttcccatgcaggggcctggcccaccaccaggagagacatgaggctcaggacaactgaggcaattcgggtggggaggttcacgcactcacagggcaaggagacctgaaagacctttagtccagacgactctagatgactaaaccaaaaacccagctgatgtgatgatccgactatactgtgcctactgttacaatagaagcttggcctgcctggctgagaagtgagtttgtgatccatttccagaggggttgctgtgcctgctgaggacatggcttcccagacaggcctgctctttgaaaggagttaagatcacctgctgcttctactgagggggtatcattcctgagtgaggtcccaggagacttgaaataccagctgtgttagaagctggccactaccatgccgagtaaatctgcatatggggggggggtggcggctgacacctaacaagcacacggataaacaggagatgtgatttccaccctccaatagcatacagccaagttgaatgaggacaatgatgtgttacattaggagctttgtggtacaggtctggagaggagatggcttctgaggcccataacaaggtgtggcctgtggctgtgctgaactttatgcctctaccctaggcatgaacaaaggcggggttctggctggggtcatcggagcccggaaaccacactacgacatctggggcaatacagtcaatgtagccagcaggatggagtccacgggggtcatgggcaacattcaggtatgtccagtggcacagctggcacgtgctcagactcggcatgagaacaaaaccggaacagtgctttcccacgtgcccctgcctcccaccctggccctgaacagtaagtccagaggcagagacgtggggcaagtggaaaagaatctctgcaatagctagcctcagcacaggaagaaacacttccacccatccacaaaatctgggctgaagttctagatgcatatggcctacctttgggtatgaaccttctaataccttgtgatctgtctcagtggcgtctggcagaaaagctccacgaaaggggcaaagggacagaagagcaggcagtggcagtttccaggtaacagtgctgccacccaggtgaccatggccatcctaggagagaagtctctggatgagaggaggcccccagccagtcactccagggttctccttcccacccgctgctcgccacgggtggaagggcttggccctgggaggtttggggagtgtcccgtactgcttgggacccatggatcagtgctcggctccaaccacccaaagcccccacccgccctcagtctaggctccccccgtaacgccacgttcttgctccccctccctctccaggtggtagaagaaacccaagtcatcctccgagagtacggcttccgctttgtgaggcgaggccccatctttgtgaaggggaagggggagctgctgaccttcttcttgaaggggcgggataagctagccaccttccccaatggcccctctgtcacactgccccaccaggtggtggacaactcctgaatggcctcgagcctgcaacagtccaaaccggaagggagaatttattttttgaaactgaaggaagtcccgaccttcctggattgaagtgcacactcatggactttaggtttagaaacctcctcagccttcatttgttcgtggatgtgtgagctctgagggtggccctgctattcctgtgtgtgcctgtagtgtccccagcataggggtcttaggcatagggctgaacagtccttccagagccctcgttccaatccctgccgtccttgcccctgaggggccctgaccactgtgagcaggagggtggcagagctgggacaaagctgcctttgccgctgggctttccgggactgtggagggagcacaggcggggaagctccacttcagacagggcttggtggggcaggacatggctcccattttgaagggaggtctccatgtggtccgagtgaggtgagacggccctcgtcctggtgttcctgatcatcttgaaaggttcttctggaactcctgtccccttagtcatgagaacagaaagtgcaatatttcctttcacctggcaggggaggggggatttatttctgaaagaaaaatatataaacagatcttctacatttatatttttaatcttctgttaaatacactttccgatattgccttgccttttgagctcttgctacagtcgcctttgctactgctttaagagaatttacaggtattgataaagaacaagactgttttattaaaagctttattcaacttgaaagtgattgtggaaattctgttaatatcacttatctgaggagtgctggtactttgctgactcatgccactggtccccaccacaggcctggaaggcaagagcttgaaggtctcatcatagctcactgtaccccggaacgcctgctgcctggccctgtctcttttattcttaaactttcttctaaagggtactccaagctggctttaatcccctgcactgttcctggagctctcccacacggaggttacttcgtggccattgcagggttaagtctgaacgtggccttgggccagtcatgactcctatctgtgcctgggcaagggagggctacaggagaacctggtcagccagacacaggttttcatatctgtgagtgacccacacgccaaggaaccagaggtgccagcaggtcagaggcccgtggttacggcaaatcaggacactaaccggagagcctgcaggagagggaagacccggggggcgcctgagtccccctgagttaatgggcagatttctaactaactaactgtgctttttcagaggggacttcctagtacattcacagctctactaaacttttaggaaacaaaatatgagacacactgaactctgattattttatcctactgctttctcacaccatatttataaagcagtggcctagaatacactgcgcctaaccaaacaaacactgaagaacttccttttcaaaagtttcaaacaggaaaatgaggaaaaattacttaaagctttcataaaagctaaaaatactttccttttaaaaaaaaaaaaatattgggtcttccttattatcttcattagtgaatgtgggttatttttccatttatttagatcagtgtttctcaacagaatcaagctattgcagtttgagtggagtgctacatttctgtgagagccctttctgaaaattttaggatttttggcatctctattcctggcattaaattagtagcagttactgtgacaacttaattgcctggtctttcccagagttaatgccctcaataatttgatatttttccataagtacttcttgagtgatacacctttttcaaaaaatggcttttattgccccacaaatgattttcaactaaaatgtatgatcaactaatacctttaaaaaacatcttgagcattttaagaagggaccaggtgatcatgggaattgttcaaaaatgccagtgtctatactcaaacctgctcttccatccagatgaacaggtaggtgtctgttttcatcagaagggtgatgtacccttcatcagacagtactacccacctggtactgtcttcagtactggttacttacctctgatgtgctcccagtgcagtgaaaacaatctattaggagaccagactcatatccaacttttctccttttcttgtaaatgaggcaaacacttgatgcaagggcttcgtacagaacagagtttcatgagatgctcgttgctcctcccatgaagtggataatacttccactcctaaaaagaaagattccatcaatctcattcagtgcagctgggggaatcggagcctggatcactgatattcaatctcattcagtgcagctgggggaatcggagcctggatcactgacattcaatctcactcagtgcagctgggggaatcggaacctggatcactgatattctggacccactggacccatacagcttttttttttggtctggactaaggctgccccttactggaccaatgcaatctagagactggggactggaatctaactgcgcagagaaatcaaagaccgatggtgtgaaatctggggcagcttcaaaatttctgcctcctaaaaacatttcacccaatttttcattattgcccatgtcacatttaactgaaacaggttcaccaaaaaatctctctctcagccagtctggaaggatttccatttagagactgctccgtagggaggagtaagtgtgtgctgacgtgtcatgtccatttgtcttcacagtgaaatgagtcttctggctccatccaccataactgacccatgactcagccttatcattaggtgtctttcctgaagcagggcccccagtgaaaacaaatcataggctgcgagaacactgctgaggtgggtgggcaaaggagaagggaaaatggggacaatcatgtttaccatttacaaagaggaaggaaaagactggtagaaacaagaatgttctatcttaccggtctgagtaatgtacagtatataaacagagaaagtgtctcaagaggtctacttcatggattctacctattttccctgtttcactcaaataaactgggatatgagaatttctgcactgaggcacccttcttaccttgacatgtcacggtgacgtcagtgggaagagttgctgtgaggtccttatacagcaatctagcacagaacgggaaggactgaccccctggatccagtttgtaagtaaatgacagcaagttacacagtgggtttctctgcaagggcccagtcaggagggctgcaaagtcactctaagaggggtgaggaacaaaacgaagtagaggatgactgcagttccaaaggtggtgtttactgacccttcaattacgtcaaccaaaaagaggcccatcgattacatttcagagaaataaatgagggacagaaaaaggtctgaaaaaaggactaatgaaaaagatgcctaagataactaagagtcactggcagcctggaaaggcctataggcctaaatggccaggggtacagcttcgcaagagactgtttctgcagaaacttcactgacgttacacggctaagatgcttcatgactgcatccacatttcaatttaagttaaatctacagctgagagcttcagagttactccaaatccatagagggggaaatgctaagcttgtaggaggcacttacagcctatttgcattaatttcctatctacttttttcacccaaccttagctcaactgcaacccaaaaaggtaggctagagtttaggggaagatggacagcattgttccatggcactgcagaaacctttcttctctaatgagatctatacccaaggttcagcaaggcactcggtatggtacatagtaggcacgccataaatccctgatggatcaaaagtatagcaactgcactctgtacaatcttacgataaaagcttgaagaccaccattcaggggtgcataatcctttaaccagtacccaggcttcaacgccatccagagtttcaaaagaaaagagggtgggatagtgcttttatataaataagaaacaagcatcggaaaggtaacggtcaaacttctaactcacagttaggaaacactgaaaatacaaaaaacatcccccttttaagttgatcttgggcccacggatgaggcatataacatcccagagagatacctgaagccggtctgcctggtacttcctcccagagtaagcattcaggtactcgcagagactgaacaggaagtgctggatgttggtctgtaaatattttgcagctatctcttccaggggaatgaagactgggactgaatggtgatgtatccggagtggtttctgtatgacaaggtccacaaaataggaatccaataggttcccctcaaaagcagtactgatgcagacacaaactcctcggctggtcagtttaccactgaggcctgaggcaaacaagaagacacctcaatagacagcaggccaaggtgatgtcttactcatctgtgcctccagtagcttccacagtgcctagaatatgtacactttgtacacaaatgtttgttcaatgagtatcataggctcattcttccccttggctccggctcactttgagactgagttgttaaaaccatggaagaatggtaaaaatgaaaaaacaacctaaatgtcaaactattgagaaatttttttttttttttttttgagatagggtttcactctgtcacccaggctggagtgcggtggcacgatctcagctcactgcaacctcaacttcctgggcttaaatgatcctcccatctcagcctcccaaacagctgggaccacaagcgcatgccacctcacctggctcatttttaaatttttagtagagatgaggtcttgctatgttgcccaggctggtctcgaactcctggactcaagtaatcctgcctcagcctcccaaagtgatgggattacaggcataagcaaggccaaaaatttaatttatagctattctttatttctgagtgtgaagtaatttgtcagagtccccagttcttcccacaactatcttgtggcatagatgggagaataaatccctatttacggtgaaacggagacttggaaagttcaaactatttcactagtggcagaaaacaagccagcagtaaagacagttctagtacaaggtctggcacatgacgaactgttaagatgagtggaataagccagccaccaactgagctgctgtacaaaggggccagtcaatcttgtaggtgaagataggcctacaaatagcacgtcagctgtgtgtgtgtctgtgtgtgtgtgtgtgtgtgagtgatgagggcagagggtgtaaaatactataaattatgaaataattccaggactgataacacatctagcaaactaactcactagaggcagacccagactaaattaggttaaaaaaacaaacaaaacctgtaaaatgatatgcctgcagaatggctttcacattttccaatttctcttccaatgcttcttgctcattgatctcc

SEQ ID NO: 546 - DNA, 545 bp, Homo sapiens
gggctccaaggcttacgctgctagctatggcccagcagaaggtaccaggctgacccgccctctgagaacaactatgcaagctggataaaataccaaaaagaaacaagcaagcaaagagagcaaatggtttgaaggcattccagaaggatccaaatagccaggattggagagtactgacaaatgctctgagctggcttccctgcagcctctggcctcagagcatttccttattcatatgcaaggcacactgggccacatagaaaggcataaactagactccgcagcagtctcatccggaacaaacactggacattaatggtatcaaagcagactttctacgggccaagattccatagaaacaggaactcaacgttctgcttgcaatcttccctcccggcatttgctaattcctaagctgcacaggtgtgactggggactgagaaaccaaacggaaagaagctgctaaaggggaaaaagccaagcagagattttgctagaacaaaatgtggatttcagggcctgccagggaacaggagccttaatag

SEQ ID NO: 547 - DNA, 3350 bp, Homo sapiens
tattaatatgacatttgtcattgtcactgatttttttaaaaaagcaatgcacatgttggttgtggctgttttccgcatgctatcttcatatctaaatgcttcattaattatccgagcctccggagaattaactctattacgtttgtatagtaagtttgtaaactgcttggcaaactgattaagaaataatttgcaataccgtgctactaaagtggcaggtttctggtagaaattgtgcgagtccaatttggagttttaagttccttgattgatgaaactaaaaaggcaattttggaaaaagagagggggaaaagtagatcacttatcttagcaaacggttgaaaatatgtctgtcctctgtggccccaaatccagtgaaagaaattctcccagtaaaagttgcttcctaactctgtttttctcagaatacctcttacctttctcaaagaaagcttcaaccaccatcatcagaaagaaggtggcctaaaaactgacacatggccagtgcccggaggggtctggaggcataagtctagatgcccagagagcatccaggcactgaactgctcagagcttgagatgaaatgacatacaagcttcagggtaaaactgtctactagcaagattacctccctcaattctaccattgcagatttcttctgaccccaaatgcaaccttacagagaatgctgaatgaggaaggccaattccttacaatgatggcagaacccccaagcgaatgccctattgaggagaaggacatcactgtatttggaattctgcctgctagtgatagctcacacatcacatcccagaatcccactcccaatgcattatttcctgaggcaagaacttaaggtcctcacctaattcctccatcacaaccattaactcttattggacaagctcctcctgtgagtagggcctgtactcacttcctcttagatcataattccatcttcaagagactgatttccagaatagtaatctttttccagcgttctctcttctccaatgccctggttgttatttttcccacctctcctaatattgatcttcttgtcttttggttagaactgcaacttcggagttgagttcatttcctattgctgctcaattcagtagcaacatagctggcttgttcccagacccaggaagtataagtcattgacagtttcctgagtggctctgccaatccataccacccttggtactgtgaaaaggcttcttggcagccaggtggcattgaggatggtattcagggcgctttccttctgtcatatagttgtgggatctctaccaagtgtgaaggtgaatgaggtaagggagatcagaaccatgcttcctggtttttcatacatccaaggaagaagtcctggtgtgggttgtttgacaccttctttccactttcaccttttattttttattccttcctttctacccccaaccagtcgagcaaatgagcaattttgtgtttctaatacaggatctggaagtagtgctttctaatcctcatttcctgtaggatgttcctgcactataacaagattatgttttcttccttctgcagcagctttctgcttcttgggtactactagctattgttcaattcaggtgaggcctgtgatgacatatatgtagcatgtgctctgcgctccctgcaagctgagcagatacaaccaatgcatcactgtatactcttgctgagaatgtggatgcagcctcacagatctttgcaacactccaaccagccaggaccagttgatcagaactgatcttattggtctgataaccaatcttatttgtgaactgattcatatctgtctttccactcttggttctcttgccgtagaacaaaaacagtttaggaagcataattacgaacatttaggaaccaatatgtataagtaattcggagactccaattcacctgcccctcccccatcccaggttgtggaggctcgaggaagctgacttcttaggctaaaggacaaaaaaatctctttacctccttggccattttcatgttctctgccaattactataggcagtcttcattttgcagaggtgaggtaagacttcatcttattcttcatgtaatcccaccttctaacaaaaaataaataaatatttaaattccaaggagaagtgttctttgtgtatttctagcagaaaacagatgcttaagcctaagaaggaagatccgtccatgacaaaggaaagtggaaaactgaaccagttatctgaatacttcatgccaggacagttgctattagcaactgttttgcaccttcagggctttaaaatgggctctgcagacagcatttgcatatgcaagactcagtagccaagcctccactgccaattgttgaaggcagtttcagatcgccaccttttgaggtacatttctttaagcacaagagaagtagaaatggcctttgccttgtctccagtggtttgtccctctggtgcctcagcagataccagagcttattcttatgaccatttggaagtagtcctcaaagtaaagatcaagaaaaaattggattctttttccattttctcataatagtagcctagtcaacacaagactcccataaaatatgactcactattgggagccatactattttataagcttacttcctgctgacaaaactagctttcctcaaggaaatataaaggaggggaaagtcacatagtgttaggaaaacattcctgtgttttgaatacgatgaatccataggatagagaaaaatctgcttgttctattctgagagttctctgagatatcccttcactctgcttggcatttggccattgatattcaacaggtcactgaccaagcttttctaaatttttcagagagagttacttaccagtaaggtctgttcttaaacctacctagttgattttcatatctttccataaagtgtcatgattctgtcatagaccctgacttaacattgtaaggactatgagtcctccattttttaattaatttttttttagcaaattaggacttcggcaggttttcctctcctaaactcattctttcctccacaggattgctttgtccatctcctgctttcatttcaagtgcataaacaaaacctcaaagggcctgggaaggtgaggcaggccagagtctgtgttctgtgttgagtgtcaagctatttgttaagaaggtctgcaacaggcctttggtgtgggctctgccagagactgttctgaacactttgcttgagatccgtgccctgtaaaatggatatgatgttttactgatgtctgtaatacatttgtaaacttccaataaaatttgaataaaagaaatgttgccattcttctca

SEQ ID NO: 548 - DNA, 3349 bp, Homo sapiens
tattaatatgacatttgtcattgtcactgatttttttaaaaaagcaatgcacatgttggttgtggctgttttccgcatgctatcttcatatctaaatgcttcattaattatccgagcctccggagaattaactctattacgtttgtatagtaagtttgtaaactgcttggcaaactgattaagaaataatttgcaataccgtgctactaaagtggcaggtttctggtagaaattgtgcgagtccaatttggagttttaagttccttgattgatgaaactaaaaaggcaattttggaaaaagagagggggaaaagtagatcacttatcttagcaaacggttgaaaatatgtctgtcctctgtggccccaaatccagtgaaagaaattctcccagtaaaagttgcttcctaactctgtttttctcagaatacctcttacctttctcaaagaaagcttcaaccaccatcatcagaaagaaggtggcctaaaaactgacacatggccagtgcccggaggggtctggaggcataagtctagatgcccagagagcatccaggcactgaactgctcagagcttgagatgaaatgacatacaagcttcagggtaaaactgtctactagcaagattacctccctcaattctaccattgcagatttcttctgaccccaaatgcaaccttacagagaatgctgaatgaggaaggccaattccttacaatgatggcagaacccccaagcgaatgccctattgaggagaaggacatcactgtatttggaattctgcctgctagtgatagctcacacatcacatcccagaatcccactcccaatgcattatttcctgaggcaagaacttaaggtcctcacctaattcctccatcacaaccattaactcttattggacaagctcctcctgtgagtggggcctgtactcacttcctcttagatcataattccatcttcaagagactgatttccagaatagtaatctttttccagcgttctctcttctccaatgccctggttgttatttttcccacctctcctaatattgatcttcttgtcttttggttagaactgcaacttcggagttgagttcatttcctattgctgctcaattcagtagcaacatagctggcttgttcccagacccaggaagtataagtcattgacagtttcctgagtggctctgccaatccataccacccttggtactgtgaaaaggcttcttggcagccaggtggcattgaggatggtattcagggcgctttccttctgtcatatagttgtgggatctctaccaagtgtgaaggtgaatgaggtaagggagatcagaaccatgcttcctggtttttcatacatccaaggaagaagtcctggtgtgggttgtttgacaccttctttccactttcaccttttattttttattccttcctttctacccccaaccagtcgagcaaatgagcaattttgtgtttctaatacaggatctggaagtagtgctttctaatcctcatttcctgtaggatgttcctgcactataacaagattatgttttcttccttctgcagcagctttctgcttcttgggtactactagctattgttcaattcaggtgaggcctgtgatgacatatatgtggcatgtgctctgcgctccctgcaagctgagcagatacaaccaatgcatcactgtatactcttgctgagaatgtggatgcagcctcacagatctttgcaacactccaaccagccaggaccagttgatcagaactgatcttattggtctgataaccaatcttatttgtgaactgattcatatctgtctttccactcttggttctcttgccgtagaacaaaaacagtttaggaagcataattacgaacatttaggaaccaatatgtataagtaattcggagactccaattcacctgcccctcccccatcccaggttgtggaggctcgaggaagctgacttcttaggctaaaggacaaaaaaatatctttacctccttggccattttcatgttctctgccaattactataggcagtcttcattttgcagaggtgaggtaagacttcatcttattcttcatgtaatcccaccttctaacaaaaaataaataaatatttaaattccaaggagaagtgttctttgtgtatttctagcagaaaacagatgcttaagcctaagaaggaagatccgtccatgacaaaggaaagtggaaaactgaaccagttatctgaatacttcatgccaggacagttgctattagcaactgttttgcaccttcagggctttaaaatgggctctgcagacagcattagcatatgcaagactcagtagccaagcctccactgccaattgttgaaggcagtttcagatcgccacctttgaggtacatttctttaagcacaagagaagtagaaatggcctttgccttgtctccagtggtttgtccctctggtgcctcagcagataccagagcttattcttatgaccatttggaagtagtcctcaaagtaaagatcaagaaaaaattggattctttttccattttctcataatagtagcctagtcaacacaagactcccataaaatatgactcactattgggagccatactattttataagcttacttcctgctgacaaaactagctttcctcaaggaaatataaaggaggggaaagtcacatagtgttaggaaaacattcctgtgttttgaatacgatgaatccataggatagagaaaaatctgcttgttctattctgagagttctctgagatatcccttcactctgcttggcatttggccattgatattcaacaggtcactgaccaagcttttctaaatttttcagagagagttacttaccaataaggtctgttcttaaacctacctagttgattttcatatctttccataaagtgtcatgattctatcatagaccctgacttaacattgtaaggactatgagtcctccattttttaattaatttttttttagcaaattaggacttcggcaggttttcctctcctaaactcattctttcctccacaggattgctttgtccatctcctgctttcatttcaagtgcataaacaaaacctcaaagggcctgggaaggtgaggcaggccagagtctgtgttctgtgttgagtgtcaagctatttgttaagaaggtctgcaacaggcctttggtgtgggctctgccagagactgttctgaacactttgcttgagatccgtgccctgtaaaatggatatgatgttttactgatgtctgtaatacatttgtaaacttccaataaaatttgaataaaagaaatgttgccattcttctca

SEQ ID NO: 549 - DNA, 6438 bp, Homo sapiens
tattaatatgacatttgtcattgtcactgatttttttaaaaaagcaatgcacatgttggttgtggctgttttccgcatgctatcttcatatctaaatgcttcattaattatccgagcctccggagaattaactctattacgtttgtatagtaagtttgtaaactgcttggcaaactgattaagaaataatttgcaataccgtgctactaaagtggcaggtttctggtagaaattgtgcgagtccaatttggagttttaagttccttgattgatgaaactaaaaaggcaattttggaaaaagagagggggaaaagtagatcacttatcttagcaaacggttgaaaatatgtctgtcctctgtggccccaaatccagtgaaagaaattctcccagtaaaagttgcttcctaactctgtttttctcagaatacctcttacctttctcaaagaaagcttcaaccaccatcatcagaaagaaggtggcctaaaactgacacatggccagtgcccggaggggtctggaggcataagtctagatgcccagagagcatccaggcactgaactgctcagagcttgagatgaaatgacatacaagcttcagggtaaaactgtctactagcaagattacctccctcaattctaccattgcagatttcttctgaccccaaatgcaaccttacagagaatgctgaatgaggaaggccaattccttacaatgatggcagaacccccaagcgaatgccctattgaggagaaggacatcactgtatttggaattctgcctgctagtgatagctcacacatcacatcccagaatcccactcccaatgcattatttcctgaggcaagaacttaaggtcctcacctaattcctccatcacaaccattaactcttattggacaagctcctcctgtgagtagggcctgtactcacttcctcttagatcataattccatcttcaagagactgatttccagaatagtaatctttttccagcgttctctcttctccaatgccctggttgttatttttcccacctctcctaatattgatcttcttgtcttttggttagaactgcaacttcggagttgagttcatttcctattgctgctcaattcagtagcaacatagctggcttgttcccagacccaggaagtataagtcattgacagtttcctgagtggctctgccaatccataccacccttggtactgtgaaaaggcttcttggcagccaggtggcattgaggatggtattcagggcgctttccttctgtcatatagttgtgggatctctaccaagtgtgaaggtgaatgaggtaagggagatcagaaccatgcttcctggtttttcatacatccaaggaagaagtcctggtgtgggttgtttgacaccttcttttcccactttcaccttttattttttattccttcctttctacccccaaccagtcgagcaaatgagcaattttgtgtttctaatacaggatctggaagtagtgctttctaatcctcatttcctgtaggatgttcctgcactataacaagattatgttttcttccttctgcagcagctttctgcttcttgggtactactagctattgttcaattcaggtgaggcctgtgatgacatatatgtagcatgtgctctgcgctccctgcaagctgagcagatacattcaatgcatcactgtatactcttgctgagaatgtggatgcagcctcacagatctttgcaacactccaaccagccaggaccagttgatcagaactgatcttattggtctgataaccaatcttatttgtgaactgattcatatctgtctttccactcttggttctcttgccgtagaacaaaaacagtttaggaagcataattacgaacatttaggaaccaatatgtataagtaattcggagactccaattcacctgcccctcccccatcccaggttgtggaggctcgaggaagctgacttcttaggctaaaggacaaaaaaatctctttacctccttggccattttcatgttctctgccaattactataggcagtcttcattttgcagaggtgaggtaagacttcatcttattcttcatgtaatcccaccttctaacaaaaaataaataaatatttaaattccaaggagaagtgttctttgtgtatttctagcagaaaacagatgcttaagcctaagaaggaagatccgtccatgacaaaggaaagtggaaaactgaaccagttatctgaatacttcatgccaggacagttgctattagcaactgttttgcaccttcagggctttaaaatgggctctgcagacagcatttgcatatgcaagactcagtagccaagcctccactgccaattgttgaaggcagtttcagatcgccaccttttgaggtacatttctttaagcacaagagaagtagaaatggcctttgccttgtctccagtggtttgtccctctggtgcctcagcagataccagagcttattcttatgaccatttggaagtagtcctcaaagtaaagatcaagaaaaaattggattctttttccattttctcataatagtagcctagtcaacacaagactcccataaaatatgactcactattgggagccatactattttataagcttacttcctgctgacaaaactagctttcctcaaggaaatataaaggaggggaaagtcacatagtgttaggaaaacattcctgtgttttgaatacgatgaatccataggatagagaaaaatctgcttgttctattctgagagttctctgagatatcccttcactctgcttggcatttggccattgatattcaacaggtcactgaccaagcttttctaaatttttcagagagagttacttaccagtaaggtctgttcttaaacctacctagttgattttcatatctttccataaagtgtcatgattctgtcatagaccctgacttaacattgtaaggactatgagtcctccattttttaattaatttttttttagcaaattaggacttcggcaggttttcctctcctaaactcattctttcctccacaggattgctttgtccatctcctgctttcatttcaagtgcataaacaaaacctcaaagggcctgggaaggtgaggcaggccagagtctgtgttctgtgttgagtgtcaagctatttgttaagaaggtctgcaacaggcctttggtgtgggctctgccagagactgttctgaacactttgcttgagatccgtgccctgtaaaatggatatgatgttttactgatgtctgtaatacatttgtaaacttccaataaaatttgaataaaagaaatgttgccattcttctcagccctccctcactttccagattttaggggtggtctctgcctttgagcatttcaacaaagaaaagaaaggacacaggtatggagggatgagttttactatgaaatattaacctgattgtttaaatcagggtttctaagcctcagcaatattgacgtcttgtgctagttaattctcggttgcagagggctgtcctgtgcattgtaggatgtttagcaacatcgctgacttctactcactagatgccagtagcagcccccagaaactgtgacaactaaaaatgtctcccatcacaaccattaggatggcagttattaaaaataacaacaaatgtgggtgaggatgtggagcaattggaacacttgtacactgttggtgggaatgtaaaatgatgtagtgctgtggaaaacagtatggcagttcctcaaaaaaaattaaaaatagaattactaccatatgctacttctgggctatacccaaaagaattgacagcagggtctccaaagagatacttgtacacccatattcataaaagcagcattcacaatatccaaaaagtgggagcaacccaaatgtccactgatggatgaatgtgtaaacaaggtgtggtgtatacatacaatggaatattattcagccttaaaacggaaggaaattctgacacatgctacaacatggatgaaccttgaggacattttgctaagtgagataagccagtcacaaaaagacaagtgtatgattccatttatctgaggcacctagagtcaaattcatagagacagaatgtagaagagtggttggttgtcagggactgaagggaggagggaatggggagttactatttaatgggtatagagtttcattatggcaagatgaaaagagttctggagacgggttgcagaacaatgcagatgaacttaatactactgaactgtacacttaaaagtggttaagatggtaaattttatattatgtttatttaaccacaattaaaaatgtctccacacattgtcaatgtctccctgttgagaaccactggtttcaatgcattgccttcttagtgtctttgttccttgagaattcttgaaactgattcctacccaggccacacagttaattttcagttattagcaagaattgaaagcagcagatgacccaaaaatatttgtgtttgcttttaagcaaataataagtggtctgtctggagaattacatccatgtctgtgttctggttagggcagcattaacactgactgggagccaggaccaaggcagcatgtaaattcaatttccccgtgtctgatccacaacattagggacttgctggatgctataatatcatctattcattcattcaacaaatatttatcaaaaggctttctctagccaggaaccgttctaggtgcttggaatacaataatgtgcaaaacaaacaaaaatccctaccttaaaggagtttacaaactttactttcaactaggcaagacattcggaatagtaagtagtcttacccaccctagctaatcacaaggacttgggagtggcagacaacaagagttgtttcattgtaagacattctaagagcttttgaataaaaacttgaactggaaatggcaattgtgcctgttctgcttacagacatgccatagagcatggcctgcaggcaaccatggtttttaatatacagcctccctgtttcccctcttcagccaaaatgattgtagtcaggtatagcaccctaccagcaatcttataagcatgataagctggacttatcagattcgctctctcaagaatacaggctgggcacagtggttcatgtctataatcccagcactttgggaggctgaggtgggaggatcacttgaggccaggagttcaagaccagcctgagcaacatagcaagacccgcccccgcccccatcgcctccgtctctatggaaaaagaacaaaaacaaaaaccagtagctggcataatggtgcaaacctgtagtcccaggtactgaggaggctgaagcaggaagataacttgaggccgcaatgacttatgactgtgccactgcactccagtttgggtgacacagtaagagactttgtctctaataagattaaataagattataaaccaagaaattctgagagaatgaggcagctggcagtgggagtggaagctaagagaatgtatggggaggaaccaggaggtggagtccagcacaggagcaacaaggtaagaggaaggatgaggaagcagatgcaacaaataagcaaaagtctaggctgagagcagatctaagagcaaagacaagagatcagaatggacccagaggagctggtcctcaggacttcctcacctccaaacagatcctagttcctgccctggaggtacccctctagggttaccatttgattttggtccttcacatacccctccccactgtgcctatgtattgtgacaatacatacctatgtaacctctttgggctcaagagttccttgcaatcccaattaaaacatatgaaggatcccatatgcactaaatgccagttgtgcaccttttattttggccccatgttcctttaacattttaaatgtcatctcagccacttgctacttgttgatcttgggaaatgtccatatcctctttgagcctcagttcttaatctattaaatgagataataacagaagagtcattattgggttattgtgtggatgtactggaataatacgtgtaaagctcttagtgctacctgtcattataaaagctcaggccgggcgcggtggctcacgcctgtaatcccagcactttgggaggccgaggcgggcggatcacgaggtcaggagatcgagaccatcctggctaacacggtgaaaccccgtctctaataaaaatacaaaaaattagccgggcgtggtggcgggcgcctgtagtcccagctactcgggaggctgaggcaggagaatggcgtgaacccgggaggcggagcttgcagtgagccgagatggtgccactgcactccagcctgggcagcagaacgagactccgtctcaagaagaaaaaaaaaaaaaaaaaaaaaaaaaaaaaaaaaaag

SEQ ID NO: 550 - DNA, 941 bp, Homo sapiens
ttttttctatacaaatttgttacatgtcagtgagacctttttcaaaggaacatattcaatttggctttttgtggctgaaaaaacataactgttagacccaaagcattttatgctccgttccatcttaaggagccatccttaagtctgctcccaccctcagtagaatttattttctacaaagtggtagtaatttttttttaaattgcaaatgtaatttttgccaattagagaaaccaaccggtgtcagtaaaattctgtgagaaatgccatccctgctgggaatgttgaagttacttaatgttgatctatcccttggggaaagtaaaagtgactgtgagtggtgccattgtgtgatgtcagcatgacgttgttttgaatgtggcattatgttctggtgctcatgtttcctggattgtattatctgctttcctttaccaaggcagacagaactgctgccttagcctgacaaccggttgtcctcaaagcaaatgaacttaagcatttgggattgagggacagaaggattctgagggggctctgcgagggacggtgtgtgacatgtcatgcctggagaaggaacaaggctatttgaaaacagaaggcaggtcaagggtagaagttaaaggagaatctgaaggcaggtcagggaaaagaagaactggaaatgaaacagaggacaggtgacaaccacctcgaagagctcccagagattgtagaaagagtccagtgtaaccagcttagtaaccagagtatctggattacccaggaaggttgagctgctgagatttcagtggtgcaatgtctttaaaaaaacaggctttgttgggagggtatttccattttgaactttgaggactgttggtcagaaaatgggctcaaaagtgagtttgcttaatgaagacatttaacggttgtgctgtttatagtaaaataaaactccc

SEQ ID NO: 551 - DNA, 432 bp, Homo sapiens
agcaaataataagtggtctgtctggagaattacatccatgtctgtgttctggttagggcagcattaacactgactgggagccaggaccaaggcagcatgtaaattcaatttccccgtgtctgatccacaacattagggacttgctggatgctataatatcatctattcattcattcaacaaatatttatcaaaagggctttctctagccaggaaccgttctaggtgcttggaatacaataatgtgcaaaacaaacaaaaatccctaccttaaaggagtttacaaactttactttcaactaggcaagacattcggaatagtaagtagtcttacccaccctaactaatcacaaggacttgggagtggcagacaacaagagttgtttcattgtaagacattctaagagcttttgaataaaaacttgaactggaaa

SEQ ID NO: 552 - DNA, 941 bp, Homo sapiens
ttttttctatacaaatttgttacatgtcagtgagacctttttcaaaggaacatattcaatttggctttttgtggctgaaaaaacataactgttagacccaaagcattttatgctccgttccctcttaaggagccatccttaagtctgctcccaccctcagtagaatttattttctacaaagtggtagtaatttttttttaaattgcaaatgtaatttttgccaattagagaaaccaaccggtgtcagtaaaattctgtgagaaatgccatccctgctgggaatgttgaagttacttaatgttgatctatcccttggggaaagtaaaagtgactgtgagtggtgccattgtgtgatgtcagcatgacgttgttttgaatgtggcattatgttctggtgctcatgtttcctggattgtattatctgctttcctttaccaaggcagacagaactgctgccttagcctgacaaccggttgtcctcaaagcaaatgaacttaagcatttgggattgagggacagaaggattctgagggggctctgcgagggacggtgtgtgacatgtcatgcctggagaaggaacaaggctatttgaaaacagaaggcaggtcaagggtagaagttaaaggagaatctgaaggcaggtcagggaaaagaagaactggaaatgaaacagaggacaggtgacaaccacctcgaagagctcccagagattgtagaaagagtccagtgtaaccagcttagtaaccagagtatctggattacccaggaaggttgagctgctgagatttcagtggtgcaatgtctttaaaaaaacaggctttgttgggagggtatttccattttgaactttgaggactgttggtcagaaaatgggctcaaaagtgagtttgcttaatgaagacatttaacggttgtgctgtttatagtaaaataaaactccc

SEQ ID NO: 553 - DNA, 780 bp, Homo sapiens
ctttcaagacaatggatgtggatatggccgaggaacatgccagggcccagatgagggctagatgaatatcggggatgaagcgctgattggacggtggagctgggatgacatacaagtcgagctcctgacctgggatgaggacggagattttggcgatgcctgggccaggatcccctttgctttctgggccagataccatcagtacattctgaatagcaaccgtgccaacaggagggccacgtggagagctggcgtcacgagtggcaccaatggaggggccagcaccagcgtcctagatggccccagcaccagctccaccatccggaccagaaatgctgccagagctggcgccacgttcttctcctggatccagtaagagtttcggtagagaaatgagactctgcaggagggctgcggaggggggtgagatgtcagagggagggccggggtgggggcgctgggggcaacggcaacagcatggacggacacttattttgttacgtacacccctccctggttcgcgtgtgtccacggatgttgtcactttggtttcttgtgcttttataggcaccgttgacgaactgcagcgatcttactggccaagccagagcgcctcctctcagattccttctcgacacagcaccctaggcggcttcttcctgtcagtcggaggtggcatgcaagatgaagctctctttgctcttcctgctttcattttgtgcttttccttgtgttttcatgttttgggtatcagtgttacattaaagttgcaaaattaat

SEQ ID NO: 554 - DNA, 1262 bp, Homo sapiens
  misc_feature (395)..(395): n equals a,t,g, or c
gtacctggaatacaagaagatccccaacagcaacccacctgagtatgaattcctctggggcctgcgagccgccatgagaccagcaagatgagggtcctgagattcatcgcccaggtaagggagcgcctctgttgggtgcccggcacgggggtggtgctctccacaccttgcttgtttcttggtcgaggcctccttcccattaccccgtattccagtgagggtacaaacactcacagaggcacctgagcaccctacacaaggtcacagatggggcaaaatcccaggtctggcacaggagagtaggagccccaatccctgtggtcctgatttttgccatcattgcacaaagcacacgggagggggtgaggcgggcgcgggtgctcagccagtgtggngtagctctgtgtctatgcctgccctttttctcctcagaatcagaaccgagacccccgggaatggaaggctcatttcttggaggctgtggatgatgctttcaagacaatggatgtggatatggccgaggaacatgccagggcccagatgagggccagatgaatatcggggatgaagcgctgattggacggtggagctgggatgacatacaagtcgagctcctgacctgggatgaggacggagattttggcgatgcctgggccaggatcccctttgctttctgggccagataccatcagtacattctgaatagcaaccgtgccaacaggagggccacgtggagagctggcgtcagcagtggcaccaatggaggggccagcaccagcgtcctagatggccccagcaccagctccaccatccggaccagaaatgctgccagagctggcgccagcttcttctcctggatccagtaagagtttcggtagagaaatgagactctgcaggagggctgcggaggggggtgagatgtcagagggagggccggggtgggggcgctgggggcaacggcaacagcatggacggacacttattttgttacgtacacccctccctggttcgcgtgtgtccacggatgttgtcactttggtttcttgtgcttttataggcaccgttgacgaactgcagcgatcttactgggcaagccagagcgcctcctctcagattccttctcgacacagcaccctaggcggcttcttcctgtcagtcggaggtggcatgcaagatgaagctctctttgctcttcctgctttcattttgtgcttttccttgtgttttcatgttttgggtatcagtgttacattaaagttgca

SEQ ID NO: 555 - DNA, 1465 bp, Homo sapiens
cacgagggagatcagtgtgaagggcattgccaaagtggaatcagtaaggcttggcagttgaccttgtttgttggagagaagggataagattttaaagctacatgtctgaaagaatgatgctgctgattgaaataaaggaagaaaggatgcatttcgggctccaacctgtcctaggaaggcctagacctcaaacaccatcacctccatgcatttcctctttggctactatgtcttttccctgacttctgcctctccagctctctgggctgctgcttccacctgttcatctgacttagaccctccctgctgggtccttgttcacctactcatttggtgcttcgtctgccatcagtacctccattgcagctggtgggatgtcagtcaccatctcttatatttgcttcccactagaaagatcaagagaagttatttctttcccttgcgctccaatttttctctagacagttggtatccacaattttaaaaaatgttccatgttgtataaacaagcattcgctgagaggggctgttaatacacatcgtgccccttttataaaaattcatgcatggaatcctacattattatgcatcaaaatctccagaaatgtcttaggatttttgcagggagaatattaaatgcattgttttgctttgttttgaagagactagatgtgcagaggaagagaggtggcatggtgggagggtacatttgagttgtcaacagtctctgcagtgtcaggtcaattacatcagcacttggactggaccagggaaaggaatgattctgcttcctgggaatgtcagaaggacctgatgattatatttggcaaagccaggaggagtggctttgaatgtcattgctaagaattacactttgagtagcatttctggatgtctgagcttttcaaatgatacttcttttctgctgtggctttcctttctgttggactggttcccagagggtcctcttgtttgtccttgccctcgcttttatatcagttcatgttttctcttctgtcatcttccttcccagcgctgtttctccaccccctcctgctgcactcacaacagcttcccctctcctgtttagaggtggaagcatgtaagaatgcgtttgagggggatgcttgccaaaggacagcatattcaacatctggtatcaacaaggtaatgtttaaccttagactagccaaactagtgatgacctgcttccatgctgcatctgctgctttttgtgttgatgggactcagaaatcatgagaaaggtcttcagtgatccatgactgcaacaaattcttttcctaattgtgccgtatattatgcccctcaatacaacttactaatctctgcctcagtttctccatctgtgaaagtggtgtaatacttatctacctcccttgaatgttgtgaagattagtatatgttggtaaagcacttttaaaataaagaatgatataaagcattg

SEQ ID NO: 556 - DNA, 1465 bp, Homo sapiens
cacgagggagatcagtgtgaagggcattgccaaagtggaatcagtaaggcttggcagttgaccttgtttgttggagagaagggataagattttaaagctacatgtctgaaagaatgatgctgctgattgaaataaaggaagaaaggatgcatttcgggctccaacctgtcctaggaaggcctagacctcaaacaccatcacctccatgcattttctctttggctactatgtcttttccctgacttctgcctctccagctctctgggctgctgcttccacctgttcatctgacttagaccctccctgctgggtccttgttcacctactcatttggtgcttcgtctgccatcagtacctccattgcagctggtgggatgtcagtcaccatctcttatatttgcttcccactagaaagatcaagagaagttatttctttcccttgcgctccaatttttctctagacagttggtatccacaattttaaaaaatgttccatgttgtataaacaagcattcgctgagaggggctgttaatacacatcgtgccccttttataaaaattcatgcatggaatcctacattattatgcatcaaaatctccagaaatgtcttaggatttttgcagggagaatattaaatgcattgttttgctttgttttgaagagactagatgtgcagaggaagagaggtggcatggtgggagggtacatttgagttgtcaacagtctctgcagtgtcaggtcaattacatcagcacttggactggaccagggaaaggaatgattctgcttcctgggaatgtcagaaggacctgatgattatatttggcaaagccaggaggagtggctttgaatgtcattgctaagaattacactttgagtagcatttctggatgtctgagcttttcaaatgatacttcttttctgctgtggctttcctttctgttggactggttcccagagggtcctcttgtttgtccttgccctcgcttttatatcagttcatgttttctcttctgtcatcttccttcccagcgctgtttctccaccccctcctgctgcactcacaacagcttcccctctcctgtttagaggtggaagcatgtaagaatgcgtttgagggggatgcttgccaaaggacagcatattcaacatctggtatcaacaaggtaatgtttaaccttagactagccaaactagtgatgacctgcttccatgctgcatctgctgctttttgtgttgatgggactcagaaatcatgagaaaggtcttcagtgatccatgactgcaacaaattcttttcctaattgtgccgtatattatgcccctcaatacaacttactaatctctgcctcagtttctccatctgtgaaagtggtgtaatacttatctacctcccttgaatgttgtgaagattagtatatgttggtaaagcacttttaaaataaagaatgatataaagcattg

SEQ ID NO: 557 - DNA, 1464 bp, Homo sapiens
cacgagggagatcagtgtgaagggcattgccaaagtggaatcagtaaggcttggcagttgaccttgtttgttggagagaagggataagattttaaagctacatgtctgaaagaatgatgctgctgattgaaataaaggaagaaaggatgcatttcgggctccaacctgtctaggaaggcttagacctcaaacaccatcacctccatgcatttcctctttggctactatgtcttttccctgacttctgcctctccagctctctgggctgctgcttccacctgttcatctgacttagaccctccctgctgggtccttgttcacctactcatttggtgcttcgtctgccatcagtacctccattgcagctggtgggatgtcagtcaccatctcttatatttgcttcccactagaaagatcaagagaagttatttctttcccttgcgctccaatttttctctagacagttggtatccacaattttaaaaaatgttccatgttgtataaacaagcattcgctgagaggggctgttaatacacatcgtgccccttttataaaaattcatgcatggaatcctacattattatgcatcaaaatctccagaaatgtcttaggatttttgcagggagaatattaaatgcattgttttgctttgttttgaagagactagatgtgcagaggaagagaggtggcatggtgggagggtacatttgagttgtcaacagtctctgcagtgtcaggtcaattacatcagcacttggactggaccagggtaaggaatgattctgcttcctgggaatgtcagaaggacctgatgattatatttggcaaagccaggaggagtggctttgaatgtcattgctaagaattacactttgagtagcatttctggatgtctgagcttttcaaatgatacttcttttctgctgtggctttcctttctgttggactggttcccagagggtcctcttgtttgtccttgccctcgcttttatatcagttcatgttttctcttctgtcatcttccttcccagcgctgtttctccaccccctcctgctgcactcacaacagcttcccctctcctgtttagaggtggaagcatgtaagaatgcgtttgagggggatgcttgccaaaggacagcatattcaacatctggtatcaacaaggtaatgtttaaccttagactagccaaactagtgatgacctgcttccatgctgcatctgctgctttttgtgttgatgggactcagaaatcatgagaaaggtcttcagtgatccatgactgcaacaaattcttttcctaattgtgccgtatattatgcccctcaatacaacttactaatctctgcctcagtttctccatctgtgaaagtggtgtaatacttatctacctcccttgaatgttgtgaagattagtatatgttggtaaagcacttttaaaataaagaatgatataaagcattg

SEQ ID NO: 558 - DNA, 565 bp, Homo sapiens
agcctgtgaagactagtcttctttgaaagaaaagatccttttgtaaggatttatgttcttaatttagtttttaccaaatggacccttttagagaaagaagcatcaggataaagtcccaatcttcagtggtttgtggaagagagaatctgatgattcatgccctcctaccctgttagaattaggacagggaatggcagaccctaaacatacatgtgaactgagcaaagattgcctttgcttcacctattgacacatttaagaacctcgttttatagagagtacggagtggggtctgagattctacatttcttacaagttcctggtttatgccagttctgtttgtctggtcaccacacttctgaatagcaaggtttcagaggactctatgaagtttttatttctcaaaaatttggcttaggtacatctttacatacagtggtgctagatattattctttcagaacttaaccatgcaacaatgcagaagaatacaaaaaatgcttgcacacagtagtgtattttaatggaactataaaagcattgaactgattcctaactttacatat

SEQ ID NO: 559 - DNA, 565 bp, Homo sapiens; identical to SEQ ID NO: 558

SEQ ID NO: 560 - DNA, 24079 bp, Homo sapiens
ggagatttaacatgagaatgctcgtccctggaaggcctgtaaaagatgctaccccaccaccggtgcctgcagaaagaccatcttacaaagaaaaatttattcctcccgaacttagtatgtgggattattttgttgcaaaggtaaggagtgtgaggaatgcaagctttaagagaagtctatcatctattttattaactcttgcatgtgtctcacataggaatgatggggtagcttttggattgaatcaccatagtttagacgtttaatttattaagtccagaaactgaatagtcatagtaaattcgaggatgatcagttacctgatgatgtaggagacaaattaaaatcacatgggagttatgtataaattagaagtcagcttattacataatcagcaccatctttttcgagtgactggaatacttgtatctaccacctagacacccctcttctaattatcagtggctcccttggtaagcatggaattagaatagaaggagatggatggacatttggcggttttatcaggccatgatgaggccccatgatacatctctgttttcccagcgcaaaggaaacttctcaggggatcagaatactcatggtgactagatctggtatagccccatttcataccatgctgggtgcatgctaatgtttgcttttctgcactttgctcttttgagctcatgattctccttctgttggtatgtttccctctttacatgtgttaactctgttgttaccttgctgtgcatacacatgagggaatacatctccagagtcatgcctcttcccatttttagatttttattagatctcagagttattgaggcgctgatcccgctccgtttttttgtatgctaagctgatccttaaaaagtctttcaacatgagtttggaagctttgttttgttatctaaagactctgaggccaggtgcagtggctcatacctgtaacctcagcactttgggaggttgaggtggaaggattgcttacatccaggagtttgagaccagcctggacaacatagaccatgtctctgccaaaaaaattttaaaacgtaggtgcagtgctgtttgcctgtagttctagctgcttgaaaggctgaggtgagaggattgcttgagtccaggaggtcagcgtggcagtgagccatgattgtgccactgcacaccagcctgggtgtcggactgagacagtgtctcaaaaaaaaagactttggttacgtcagtggttctcaaagtgtggtctcagaaccggcagcatcggcattccttgggaacttgtttgaaatgcagattcttgggtcttccctcagacccctcaatcagaaactctgggagtgagaaccaacaatctatgtcttaacaagctctccagatggttctaatgtgtgctgaagtttgagaactatgagcttaggcacattgtgagtgcagatttccaggtttacactctatcagggtccgagttatacttccagagtcattctggcctatcccttaaggctgccaattgagttgcacttagttgtatttagctaataaaccagggaaataataaagtactcttaaaaatgtataggcagttcccactcctacctttttaaaatttttatttgccacgaatgaaagctcattgcatcattaatgtgagtgataacaacattaagatttgtaaatggtaatgtgctaaatttttgtttttcaaaaatgtttcctcctgatatatgttctgaaaatttggaaaatgcaaaatattataaagaagggaaatagcactcatctgtgcaacaaagataactgttaccattgtggccaatttactattaatcttttttcctcagattaaaaaaatgtataattggatcagtatatgtagttttttttctgttaacattaacaaggtaaacagtttttatgccattaaaaacttatatagctgtcattttaaaaacttcagtgtagaaaacttccaacatacacaaaaggagagataatagcatatgaatcttttatctaccatcatgtagcttcaaaaattatctactcatggacagtcttgtttcatttatacctctccccactactttgtttggaagcaaatccaaacatcatgaaatttcattcaaaaatatttcattatttatttttgaaaaaaaaaaaggattttaaatagatctacattagtgttacacccacagaagcacacccacaattctttaatattatcacatattcagacagtattcacatttcaccagttgcatcttaaatgtttttatatagttgatttgttcaaatcaggatctaaaatatgattcataccttgcaagtggttgctatatcttcagtctcttttaatctataggctccacctctctctctctctctctctctttttttaacttaactcccacctttttcgtttgccctgaaagaattttgacctttagaatttttcaatggattttgctgatggcatcaccatattttgttcctctgaatcttgtcaagtgaaaattaaatccaatttcattctgattggataggaagagggagtacaggattaacttcataggtggttttgtatatttctgtcaggaagctttttatgattttagttgatctttgcctacatttattatttcagtgaaagttttaaattatgataatataatcctgtcattcatttttcatgtatttgctggaatgtctcttcatcaacctattcaattaccctgaagtacattttgagtcggaaagacaggataaatgctttattcttttgcttttgtgtaccagttttcaaaatgatgagttggttcccaagcatccttcagaggaggccagtgagttttgttttgctttcagctttgttatgaacttatagatttaaacatattttatatgttttaatctattgcagttatttttttctcatggggactcagattatccatctttgccagtgagagcctcttccacaattggctccgaatctttttgagattattccactagtgtttgagtttgcctgctttctagttttattctaggctaatcatgtatatttcctgcccgtgactgagaacaatcacttttttgaaataacctggttcctttttgtgagaaattatatttagaaactacagacagatgctggggtgctcgctcttacttggttgatcattgtttctagataagcatcaattatagtgaccatgtaacttttcactttgttagtgatttgatgtttaaaatgccaagaatagtatcttttaaaatatgtcttgttcatgagcagattatttccttaagaagtactaggtcaggcccggcatggtggctcacgcctgtaatcccagcactttgggaggccaaggtgggcagatcatgaggtcaggagattgggaccatcctggctaacacggtgaaaccccgtctctactaaaaatacaaaaaattagccgggcgtggtggcaggtgcctgtagtcccagctactcgggaggctgaggcaggagaatggcgtgaacccgggaggcggagcttgcagtgagccaagatcgtgccactgcgctctagcctgggcaacagagtgagactccgtctcaaaaaaaaaaaaaaagaagtactaggtccaaggctataaacttaaataaggcttttaatacatattgccagattattttccacattactaatttgtactctcttgagaatagtgagaggatgcatctaactttacccccttattagcattaagtattcctttttcatttttgttaatttgatagattaaatgatttttattttctgttagtgacattaaaattttaatgatcttattgccatttgattttccagtttgaggtattgactgttcatattcttacctaaattatctgttgagattatggtatttttcctttttctggatactttatctagagatattattaatttatcttgttaagctttttctagtttatttgctttaaaattttgtttattatgcatttgaagttttaaaaagtttatcatgcacagaaattttaaaaagtttaaaaattagatctatccatacatttccttattgattacattgtttttcagcagaagtcttttccactaataaatgtgtacatttattttaccttccttctctgtttcctcctgttctttttctttctcctcctccttaacttttaattctcttatttatctagaataaagtgaggaacagactggatcagacttcatctcccattcccacacttagctaactagttgttccattattatttattaaataatctttctttttctcccactgacttaagatgttacctttgtcagattaacttcttatacgtgtatgatttttgtattatatttttgcatcaatctagactacatttttcttacttagtttaatatccactaaaaaaaatgggattttttttatttaaaaaaaattccccagctaatctcatctattttttcttctctacgaacttcagaatcattttaaagttccaaaacaggaagagaaattcacagggagatttttattgaaattacttaaagcctgtgtaaattaacttataaagaattacagtttttacacatttcagtccttcccttcatataattttataaagatttataatttccttcacaatagctctctcacagctttcatagtttgtccttttgtatttctttagacttttctaactatttattgctgatctataagaagaaaactattgattaaaaaaaatttcacatctagctattcagttattgaatatgagagttttaccttgtcatcttgacttttgtagatgtagcattatctgcaaaagaaaatttttacttatgctgacaccatttaaaatgtttacttttatgttagaacaaaaataattatatactaaaaatattttctatattaaatatataatacatgttatataaaatatattttatatgtttatgaaattataatctttaaaaaaataattttaccttttattgcagccatttcttcctttgtctgatagtggtgttatatatgattctgatgaaagcattcatagtgatgaagaagatgatgcctttttttcagatacacaaatacaggagcaccaagatccaaattcctataggtaaataagacttttctttctctcattttttttttggcttttctttttgtagaaaatatcaatgttattaattttaaataacattattatcctgaatttatataagaaatgacttatgtttccaggttacaaattctacacctttgaggtcaatgtctacatagtgttttctccacctccaaagactagcttttatggagagtgcaaacacaagcatctttagtgaggaaaaaatatgtaactcatggatatactattagagtttaatatataaattattggtatactattaggtttcatgtgactatgtggttaatctttttccacgaggtaattttcagcaagtgtaatatagtattgcaagttttttgtattcagtgaccacagaggtgccatttttgcatagtaaatttcaatgacagctttttttctgggttggagagtgggctaaacagttggcagggaacaccactctgtttctcccatgattttatttttcacttaaagactctttttgcccctccttgaacagctgggctcttctacatttgacaatggttaaactagcacttcacaatgtcaagaatttctttcctattgctggactggaattctctggtgagtttggaatttaaaaattaatgttattaagtataataaattgccgtcaagtttctctttacaaaatctatatataaggtcatttggtacttaaaaaatagtgcattagatattttataaagtcttgtttattttaggctccaatctgtgactttatttttatttttttagatagagtctcgctctgttgcccagactgtagtgcagtggtgtgatcagagctcactgcaaactccgcctcgtaggctcaagccatcctcccacctcagtctcctgagtagctgggactatagatgtgctaccatgctgggctaatttttgtattttttgtaagagacaaagttacatcatgttacccaggctggtcttgaactcctgggctcaaacgatccacctgccttggcctcctaaagtgctgagattacaagtgtgagccaccacacctggcttcagtctaatactttagtttatatcaagaatcactctctacacagaagattgagaaagagcagaaacccacttctgttttgttgaaagcattaagaatctaaactgtattacattaacatttgcagatttatttgtattttcagaagtattatctctgagaattcagattctataaatatttgggtgatgatcgatattttttattaaaataaataacatattctgtcaccttgtagagctgcctgtaacatcaccattaggtattgctgtgattaaaaacttggagaactgggaacagatcttgcaagagaaaatggatcagtttgaaggtccaccccctaactatatcaacacatatccaactgacctttcagtgggagctggaccagctattcttcgaaataaagcaatgctagaacctgaaaataccccattcaagtaagaaagctcttataatgctgataaagagcgtagcttaacttttctggaagacagtttggctaaatatgccaatatactttaaaacattcataattttgaacctgcagtcctatttttagcagaatacgcttaagaaaaatatcagaaatttgaatagaatttttcccagtattatctgtaattcatagacattccatttacataaaggaaaaagtctttattgtattaatttccggtgtggtgttttttgtttgtttgtttgtttgagacaagagacaaggtctcactctgtcacccaggatggagagcagtggtgcaatctcagctcactgcagcctcaacctcctgggctcaacccatctttttcacctctgcctcctgagtagctggaacaacaggcgagcgccatcggctaattttttttgtattttttgtagagacagggtttcaccatgttgcccacactggtctcaaactcctaggctcaagcagtccctggtcttggcctcccaaagtgctgggattacaggcatgtgccactgcgtatggcatatttatgttcttattgtcagaactcttacagaatttttttctaacaatctatatatgcaaataaggtgcttctgacttttgtcagtaatttaacagtaaacacattacaggtttttaactgatgttttgatcttttacctgccaatctaggtcccttttgataagcagcatgcttttttttttgaggtagtggaccctgattaatagtttttactattaaaataagcttgaaagaacaaagctttttagcttgttaggctgttagaatcggtatctatgacttgtattcattgttgatatgctttaaccaagagaaccaatataaagtataatttaaaaagagaataataagagattcatttgactctcagcttaactggttcattcagtgtaattagagaattagttgctagatgaaatgatttttaggagaactaaaaattaaaagtaaactgtacagttttgttgagcttaatgctgtgtcttctttgcaatagattatgaaggttttaaaaataaatatctttgcaatagattgtgaaggttttaaaaataaatatctgcaaatataaacatattttctatagactaaagtagtgtgatatgttaattttttttaataggtcccgggattcttctgcatttccagtcaaacgactttggcatttccttgttaaacaagaggtccttcaagagacatttattagatatattttcactaagaaaagaaagcagagtgaggtattttgagaaaaatattttctattgtaatttttctttagttttctttaacatttctaaggaaatcagtgcttgatttattctgaaattttctttctggttgggtaatagtcaaagttcactaaactaccgtgaactacttttaagataaaaccttataattttcatttcatagcaatgaaacaacataggtactttgataaattacatatattcaagtgaaagttggtactttacagtatttgtcattaggtttttacacataataaacattgtgatggatggcttgaggaatttaatatataagcttactctataatattctccaaatatgtacttaaaatataaaatagccctttaaaagcattttctttacttagcacttagaaatgaacagaatgatgatttgaagcaacaaattcaggatacttttgtgagagaataaactacagaaatagcaaatacaagatgaaggaagattgctcttacaaagcaagacagaggttctgcattgcatggttatttttaagctaatacaattagtaatgtaatagcagacatggttcaagaagaattagcagtttgggagattggcaagtgacctcttccttataaaagtgggaccttttatatgagcatttcagtctgtttggctatttagtgaggtaattagtgagggaatgagcagtttgaagagtattcagagttgagcgtctgatgtaattaaagatttggcaaacatggccgggcacggtggctcacacctgtaatcccagcactttgggaggccgaggcgggcagatcacctgaagtcaggagttcatgaccagcctgaccaacatggagaaaccccatctctactaaaaatacaaaagattagccgggcgtggtggcgcatgtctgtaatcccagctgctcgggaggttgaggtaagagaattgcttgaacccgagaggcagaggttgcagtaagccaagattgtgccattgcactccagcctgggcaacaagagcgaaactctgtctcaaaaaaaataaagatttggcaaacacaatcaatgagaagagaagaaatgaattatatttcgcttagaaaagtgaaaacagagagagtccatacggctcaatttcccgagataaagtataaaattgcttctcagtttttcctcatgcccagggcagtggaacctaccatacttgttctttttcccactcacccacttacctgaatggtaattgtggtcagcccttatgaacagtcatttgttttctctatggatttaaaaattatatacttaaatgaggaagtagaagaatgaactgtagagaccttttgagtcctagttataagctttttcataacaaaagacccttatggcattgaaattattgatgtgactttgttagggaaatcagaggcaaattatttgcctctgtcatttaaaccactgtgtatagcatttcctatagtgatgctgagtccaaattccataaactaaaatataggaatctaagatagtgatttaaaataaaagattttagccaggcatagtggctcacacctgtaatcctagcactaggtgggggatctcctgagctcaggggtttgagaccagcttggcaacatggtgaaaccccgtctctacaaaagatacaaaacaattatccaggtgtgatggtgtatgcttgtaatcccagctacttgcagggctgaggcaggaggattgcttgagcccaggaggtggaggttgtagtgagctgagatcacacaccactgcactccatcctgggtaacaaagtgagaccctgtcttaatcaataagatttctggtcaattaggggctctgttattcacagaaaaccagttcattgagtgatcaattttctgagtgttttgttcttcaaattattaaaattaatgatttatcacaagtatgttttaagtattggtaaggttgatagcagcttgactggttgacttgtcagagtgtagagtgctgtgggaagccaggtgtctgggtttcttggaccctcccattctcgtcttgcccttccccacgagtttgcttcttccttaactaattctccccctctccgccccttagtctcccttccattatgcccctcagtctctgtgtgttctatttttcttccagcagtgggtccccatgaacagggaagtaggacagagataaacggaatgtttcttaaagtgctatataagcatcagttggctccaaggaagggaagtacatggctgggagttaggatggaagaatttttatcatgtacccttttaattttaaaacattgaatggaattactgtcttgtccagtactgtcccatagaactttctgtgatgatggaaatctgtatctgcatagtccaacatagtagtcaccagccacatgtggttactgagtacttgaaatgtggctagcatgattgagaaactgaattttaattttaattgatctaaatttaaatagttacatatggttagtgattgctgttttgaatagctcagatctgaaaaaaaaggtgttttattaagaaaaaaattatgaataaaacattaaggctgttaggacaaaataaaaactcgtcgttaggctcagaaatatgcaaaacttactaaaactctacccaatccagtaagagtgcttacatctttaaaattgtcaaataggattttggtaatcactaaatttggcaaattcagaaaattgaccaataaaattggcaggctaatcctaaaaatgctgggtgcatttaaaaaaaatccctgagaaatgctgaagttatatatttataagaataagatcttttattcactgaagatattacaggaaaatatttcacaaaacaagtttttgggaaacagattggtgaattcagctagttaagacaaatagattcttcagcagtttggccttcactgagttagctgtgccacacattgaccattccttggaagttttcttggatgcatctttatcagctgcagcagccataggggagtccctggaggcatgggcagaaaatttgaatggcccttcgtgatgaaaggaaggcagtcacctgaaaaggtatgaggaagagtttgtttctctgatcaaaccttcagagtttccacagcagagcagaaatataacttctgattgcagccatccttaggaccctgcatcaacccgggagcaaattactgagttatttctttttccgtgcctgattttattaaacatttatttacttagagaaaaatcatcatattccttataagagtgaaataattatcaatattttgaatctatgtttagaaataaatattttaatttgtattttaaatcaacccctatagggcaggaatttatgtagcatcttctgcatctgcttatacaaatgggctttaattttatagattaccagttatgtaacttagatttcttaaaactgtatacagataactaatttttattttgaaatagcttttatgttcttgtgtttatgtaatagtcacattaattttgctcttttggctttgtgttgtgtttatttgatgactgttttattcggtttaattttttcttgattttgcaaattcatttttatcatctttaagtggtggagtggccatttcagcttgaaatatttcactgtctttataatttcattccatgcatgtgttttgtgtttgtgacggtgtggtggtatttagtctatagaagaacatgtggagcaggtcaaccaaaactgcatagcagaagattgccacatcaaggtagtattccaagatcttgtatttagctcattctttaaagttcaaggagctaacgcctcatctctgatactaaccatgacctgcccaactggctaactactcagagaactcatagtactcccataccacttcagtggcacaggggaggagatgcttcactgtatctggcttgctctgtcttgcccttggttcttctctttcttgctccctgtcccatcttcacttgtcactttttctgttttaagcatggctgtttcatcttcttgattctgccttttctttccttcccatcaccaaccctaagccattgcatcttcctctcatcagtctcttttattcctttcgaagtatccctctttacaacttttccttatttctgtctcaccacccttacttcaaagggtggtttctttgcggttttctatggctttttactccactctgtgcctcttaatgtatacacattcttattgcagaatatttatgcacttttggaagagctaagagagacatactactgtataaattactaataaaaatatattagccatgttttataattaatcagtatcttaccatcacagtggaaattggggtgattacaggacatcagagaatttaagcaaattttccaaagctagttttcaacacattaaagttactcttacccttttttcttgctgctgctgctgctgctgctgctacattttcttcttatcctacatttaaatcttatgggatgtgcataactctaaatagagctgtgctgcagcaactaaaactgctgatgaatgttttctaggttgaagctgatctgggctatccaggtggaaaggcgaaagtcatccataaggaatctgatatgatcatggcattttctgttaataaggtaaaagctctcatcattatacacagtgtatttctccttagtgaaattgcttaaatcatcgattctgcctttgctttataggcaaattgtaatgaaattgttttggcttcaacacatgatgttcaagaacttgatgttacttctctactggcctgtcagtcatacatatggatcggagaagaatatgacagagaatccaaaaggtttgtctcatagtcacttttacatatagttttctgtaagaagtacccaccaaatggttatgcacatgatttgaattatttcaaaaggtatacgtgtatctccttcatttgggtaggtgacaaatataattggtttagctgccagtgaaagtctttgtctacattaactgaatgaattacacttccattaaaccctacactattgataatatttcaataaggataatccctaacacttggcttcatgatattcagtaaattaatctgatctggataattaaaacagtagacacaaatatgttaattacactgagtcacatttaccgagtaattttgcagtgtttcttcttatcacctgataagcataccttttcttaaacataaaaatgtagacggctttacttttcattgaagctatggacactgcaccaagagtgttttgccattcttacctattttgaggtttcttctttgtggtttgccttccctcctgcttttctccagactcttagaaattgttcatgcttgaggatggtgccatgatagtttctctcctcattttgttgaattcttttttttgttagtatgtgatataactaggatttaatatcacatttcagagtagatataaccatgtactatgatacaatccatcccaacaattactttcacattttatatgtcttactccaagaaatctttaaactcaaatttctttaaacgtgttaatttgatactgagctatctgtacttgaagagaacataatatttttccatagataacaacaaacttttgtttcaacttgtgcagcaataaagttgtccccaaacaacattagactaaatttacattttgccaaaagggaaaaaagttaaccagtattaacattggcgattaggacttgtacctaagtttttctcatggctacttagtttttaaaataaagattgtcctatgggtacataagaagatttttagttggaatttgtgttaagagaaaagggaatgttcacagtaacacatgaatgtttttcacagttcagatgatgttgattatcgtggttccactacaactctttatcaacccagtgcaacatcctattcagcaagtcaggtgcatccaccttcatctctgccatggctgggcactggacagactagcactggagctagtgtggtatgttatttacttataggtatcatttctggatttggactctgaaaaatcagttggaatctctttgacataggaatgatcctaaatttcagggacaaacaccagtagataggccatgataatgacagctgacatttattgtggcttttttatttggtgacagggtctggctctgtcgcgcaggctggagtgcagtggtgcaatttcggctcactgcagccttgacctcctgggctcaattgatccttccatctcaacctcccaagtagctgggactacaggtgcatgccagcgtgcctggctaatttttgtattttttgtagggatggggtttcaccacgctgcccaggctgttctcgaactcctgggctcaagtgatctacccgcttcagcctcccaaggtgctaggattacaggcatgagccaccacactggcctcatatgactttcttagtgtcagatacatgctttttctcacaacaatcctaggtggtaggtgctattattaccctccattatcattttacagatgaataaacagatacaaaatggtaaagcaaagttaaaggggaattcatgtctacttctaagtgcttgaaagcatgtcagtaacattcttgtcactgtagctggaggggtcccattcttatgttctgctctgaagcatctggaggtgctcctgaatatcctcagggaggggcacttgaagaagagttcctttattatgagatgaagctccttggtaacctcacaggccagggctataccagcaagtgactgtgcttcctcaccctcttcagacaagtgttctatgtagtggttcagaacatccataacaggctttatctcagtaataagcaaggtgtaagagaataaatgtcagaatttatcctgaagcatatccttcctcatcttttctgcatacacaaaataaaatttttaaaattttcttttaaagcttatgaaaaggaatctacataatgttaagagaatgacttcacacccagtccatcaatactgtaagtatttatgacctaataattgtaagtgtcctcatttggaggttgatttatagaatagaaaatattggaactctttaatttcttatttcctgctttttctcttgtgtttcagatcttacaggtgctcaggacggcagtgtacgaatgtttgaatggacgcggcctcagcaacttgtctgctttcgtcaagctggcaatgcaagagttactagattatattttaattcacaaggcaacaaggttagtttctgggggctactgctgaattcatctgaaaatagttgtggatatttaggagtaagtgataaaagtgcatcgaaaaatgaattcagtgaccctggatttaaactgagtagacagtttgttggagtctattcatacactctcttttcttccaatagaagcaaaaatctacaaaatttagtatggattaatcatctatttaaagatactaaatatactgtgagagtaaaaaaactgcctgtgttgagtgtgttggtgattcctgtaagcacagtaaagttcttgagagaaacctagtttcttactaaatttcatcagtaagaggttagaggaaaacagtgaaacaggtaagcagttaagaagtaatggaagggccagtcacagtggttcacacctgtaattacaacactttaggagcccaaggcaggaggattgcttgaactccagcatttgagacaacctgaacaacaaagggagaccacatccctacaaaaatttttttaaaaagcccaggcatgtgcctctagtcctagctactcagaaggttgaggctggaggatcccttgaacccaggagtttgaggttatagtaagttataattgcactactgcactccagcctgggtaacagaatgagaccctgtctctaaaaaaatttaaaaaaaaagtgacagggaattttttagcacttggactttttgggaatgacagcaacagaaacatagttagaggcagaatgtttatttagtagggccttagtgaatcttccttccatgtttttacctttgctgtggatgctaagaacatgtgtttagtagttatactgttcttacagtgtggtgttgcggatggagagggttttctgagtatctggcaagttaaccaaactgcatcaaatcctaaaccttatatggtaagtatcactaaatgttcccagggcgcatatacacaacactttgttcatgaagtgtctgtttcagacagtgaatctcattggtggtcctattgggaaaaggatgatttttttcagcaatcccagcctgacagcagcacccatccttaccctagttttagactgaaatgacctgaaaaacaaaaagccttgcttttcaccttgaagtacagtttatattttaaaaattttgggggctttccctgtgtgtggtacaacttgggttttttttcattattattatactttcatccattttgaaaactctatcttcttaatatacacatgataaaattctgtcattaagaatcaggttctgccgggcacggtggctcacgcctgtaatcccagcactttgggaggccgaggcgggcagatcacaaggtcaggagttcgagaccagcctgaccaacctggtgaaaccccctctctactaaaaatacaaaaattagccaggcatggtgacacgtgcatgaagtcccagctactcgggaggctgaggcaggagaatcgcttgaacccaggaggcggaggttgcagtgagctgagattgtgccactgcgctctagcttgggcaacagagtgagacttcgtctcagaaaaaaaaagaatcaggttccaaacatctgttccaatttgttccagaattgtgcttaccagattataaaataaccaatcccaatgagccaccttaatccaaattggattacaaaatagttggtgatgaagataagtagatctttacctgatggagatatggtgggggaaaggaacatgggggagggtggaaggtgatgctgtcctgtgtgaaacttcaggcttcacatatatggagggaggttcagaacgccttgaacctcctgggaccagatagattacccaaatactttttaaaatttttctaaactatacatatgttcttaattatgtgtataagataattctcttaaattaggacactatagactgtaccttgtctatgcagaaatggaagtaatcttgaatttatacttttgtcttcagtcagatctgtaccactataattccagacagaaaaacatgcattatattttaaaataccttgacatcctaagactagttgggtctgtaagcatttcctttgtgactgttaaagtttattacatgtatttgagatcattagcactaaaattgacgggtcttaggtaggttcatgtactttgatgtcctattcttacataatctgaaaaacatgacctttaattctgtttttaccaactccagttattaaaaattattggacagtagccaaataatatacacatgacagttaagcctcatactatcacttattcttttatcctagaccgagtttttaaaaactatttttagctcatgcatatagtatgttattagcagacatgtatgttggtactgtatcaaattttatccaatggtaaaataacatcagttgcactttgtttttcgtagagttggcagtgccacagtaaagccacaagtgactttgcatttattacctcttcaagtctagttgccacatctggacactccaatgacaataggtaggttgacagaaaagcaaagtaagaaatataaaaacgttagaaatccatacctttagcaagaatacttttctattagtagggtttttccactctaggcattaaaaaaaaaaactttgttacataattcttatttcagagtgttttttcttaccaaaaagagaaaagcaaaaatgaaagttattcctaatatatgtaatttttattttaaagctattcagtcttttttaaactactactgttaacactgttagtttctctaggactaacaggcatctgatattgtctccatcattctcaacatttttattttattgcagtaggtttgggggaataggtagtgtttggttacatggataagttctttagtggtgattgctgagattttggtgcacccatcacctgagcagtgtacactgtacccagtgtgtagtcttttattcttcaccctcctcccacccctcccaagcccccagagtccattatatatcattctgatcctttgcatcctcatagcttagctcccacttacaagtgagaacatacgacatatgattttctactcctgagttacttcacttagaataatggcctctaactccatctgggttgctgcaaaatgtgattatctcattcctttttatgaagtattccatggtgtatatgtaccacattttctttatccatttgttggttgatggacatttaggttggttccatagttttgcaattgtgaattgtgctgctctaaacaggcatgtgcaagtgtctttttcatataatgacttcttttcctctgggtagatacccagtagtgggattgctggattgaatggtagttctgcttatagttctttaaggaatctccgtatactgtttttcatggtggttttactagtttacattcccaccagcagtgaggtgtccccttttcaccacctccatgccagcgtctattgttttttggttttttaattatggccattcttgcaggaataaggtggtatcgtattggagttttaatttgcattttcctggtaattagtggttttgagcattttttcctgtttgttggccatttgtattttgagaattatctgttcatgtcctttgctcgcttttgatgggattgttttttcttgttaagttccttgtagattctagatataagtcccttgtcagatatatacattgtattttctcccactctgcaggttgcctttttactcttgctgtgcagaagtgttttagtttaattaggtcccatttatttatttttgttgcatttgcctttgggttcttggtcatgaattctttaagtcaatgtctagagtagttttttttgatgttatcttctagaatttttatggtttcaagtgttagatttaagtttgacccatcttgagttaatttttgtataaggtgagagatgaggattcagggactaacaggtatttgacactgtccccatcattctcaacatttattttgacctcacatggttttcattagcaacacatgcccatgaataacatcttgtttccctgcagtggctaccacctggggatataaaagcattccttatactcaggaagtcatatcagtttcctggagtggcaatggaaaggagatggggtagaggatgcagagacgggcaggaccatgtgagatggaactgtgtagtttgaccctacccccatcctagttgggaatcactactctctataggtgtgagtgaacaaaaaagataagaatgaataagcaaaatatttgactgaaagacaggttgtccctgatgacgacttataacaatcatttatgatgtatttttgttattgtgtttctttaaaagaaatgtttgcctctgggacacattaatatcacccggaaacagcctcattcatggtgagttaaggtctatgatttttaaaaatataccatgaaggaataatacaccatgaaggaatgctttcttggttttaattagtgaatccagtgagtgtttattgacaggttgaaaatggagaaatatttagaatgaatgactaaaaatttggaaagttaattagcatatctggcttccttgctgagttaaagatatatggtctcagaaatccaaaatagtctttatattctattcagaaaatatggtatggatagtggtactactaacaaggctatttaagaaattagttgcaaagtattcattgagcttaatagaaaataacatattttaaagaattaaacctcatcataaaatactttttgtctttttttcctttttgtggagatcaaggtcatgctgtattgctcaggcaggtctcaagctcctagggtcaagctatcctcccacctctacctccctaagtactgggattacaagcatgagccaccacacctggccctaaccataaaataaaacaaaggttaaccttattataatgactagaaatgtaaacagtgccatttaaatattattccttttaagacaatacttgccaaattagtgtcctaactctgtcttccacatagtaccacccaaaaagtgctccatgctcaagtaagtttggttaaatgaagtagattgtcagaaagacagaaagattctcagtcttttaatacactgatatgcattttgaaatatgtagttaattctcaattttattgcagaattctgcaaacagtggttaacattgcttacagattttctgcatgttaatttgaatctttaatcatattaaaatgcaaatactcctgggaaggataatgaacttcttaacttgtaactgaaaacattcacacattttctcatagtgtcgttgtttcaattacttacctgaaaagaactttttgtacggtacagcacttggctgggttaatactcaccaactttgagaaggttggtctctgctcttctgtatactttttatgaggcagtatcacttagggcttaaggtttaaactttctttttctctctgtgttcatttcatattgagattatggataaaaagtttgttctgacattgcttaacatttttctttaatcatgtgattacagaaattcaatgacttacaaaacaataaatgtaccttagaatgaaaaatgcatcagtaaggtctgtatttaaatgtggatgtagacatcataattaccaagacaagaaattgttttgagaaattctctgatgtttttcttcttcaggtttcacgtgccacgatcatggtgccacggtactgcagtatgcacccaaacagcaactcctaatctcggggggtaggaaaggacacgtctgcatttttgacatcaggcaaaggcagctcattcacacgttccaggcccatgactcagctattaaggctctggccttggatccctatgaggaatattttaccacaggttcagcagaaggtaacataaaggtgagtcagtacaagaggttggaatgtgctaaagactgattggaaagagaaaaaacaaaaactccacattctttgaaataaagcttcactttatttcacttgggctactgcatggagatactgcatatctcaacactctgccgcctccccatgctcctgtatggttctttctaaactgttatggtcaatgagattatcaaactcattggactcaggccattagaaagctttaaagcattctattttgagtaaagtgtatgagtttaatgcatgaaattttttgatgacattagtttggctccttagaagcttctcccctctccctcagtactcttgtgtgtggtggaggtgacgtttccagtaagtgagctagtgcagatgctccttgactttatggtgggattatgtcccaacaaacccattataagttaaaaatattgttaaagttgaaaaacatactttcaacttaatattttcaacttactatgagtttattgagactaacctcaggataagccaaggagcgtgctgaatgcgtattgctttcacactgtcataaagtcaaaaagtcttgtcaaaccatcgtaagtaggggactgtctgtaccacactacttttacatagccttaggacctagctcagcatgaggaacacatttaactgaattaactcaaatagttaattgaattagagatgggctacatatggttaatatgaagccacaagaggatgtgaaggaaaatatggaaggaggacagtaaatgaatcgtgggagtggtgttatcatttcccacttagataagctcttaggaaagaggcagtgggtgggaaggttgggctttagtgagatcacttgggccaagggagcagaagggccatgtttttgcttttggtcttttcgtaatatatttttaactccttttgttttgcactaggtttggagattgacaggccatggcctaattcattcatttaaaagtgaacatgctaagcagtccatatttcgaaacattggggctggagtcatgcagattgacatcatccagggcaatcggctcttctcctgtggtgcagatggcacgctgaaaaccagggttttgcccaatgcttttaacatccctaacagaattcttgacattctataaagattggggttttatttttatatacatttcagttaaaaggcacactacagtcatcactaggcaattctgctttctaagcagttgtattgaaaacagagaatctctgtgtagaatttgaatatgacccaagctgagtattatctaaacaggttggtggaatgaatgcgcatgtaccttattatgctgacatactaaaaaaaataaaacctagtattgtatgaaggatagctattctttacagcatttagcaaacctgattcagaaaacatttgagattagcaaattagtaacttgaaataatgaaaaggacgtttataccaaattaaggaagaaaatgttgctgatttgggtttttcttcctgttcttaccactgactgaagcatgcctgcagtctcctcctctgttgaatgaaggataatcataaggtgtttgttaggagcgctagaccacctggaaaactttcttagctgtggagcagtgcgcagtgaccagttctctgctgtgagaggccgtttccattctttcctgctgaatatttttcctgttagtgtttatactgagctagtactgtaacttgcaaatgagtgcaaatttaaatgcaatgttttactcacaatttgcacattcacattttttggactgctagtttttctatttaaatatttgccttcatgttaggaatgtactatgtgaacatgacatatttgtagttaaccaaacacaccttcttagtccagtttagtactttttcttttcgtgtattcaaggttaaacacccaaacatttaaggatatgttgaaactacaccaatagagcatttcatatcataattaaaatgaatgttaggcttcttgtggccagttaatagttgatgagattggtgacattatttattgccacagcctattgtataaactatgcagagttaaatatttgcttgtaaaatattagccaatgttgtcattattttgatgtatttccttggttatgaccaaaaatatgttgagatactgaaactaatgtctgtgtgtttaaatgtttaccagcaaattgtcttatcatgttaatgagaatgttcaatgcctgtgtggtaaatagtaaatacaatggcataaaagtaactttctctgaagatgtgatgttcaggctgtgaaatatatatgtaaaagaaaaataaatgttatttgttagagtttttagtttgatactgtttttgaccattgagatttttaatttgataaaatgtttaactgttagagaatttgcaagctatttggcagtctattcattcataagtaagtatttactgaataccttctataccaaaagccattctaggaaatgggatacagtggagagccagacagagaaagcacacaatgttgagatttagcggggcaagagctaacctcactataccttctccagacagatttgaagtttattgaatgaagtactaacctcgtacccaaaactcaaatctgagtcttggctatttgcttgctcctaagtaagtaagggaagtcagaatatgcccactgataagaagagccaggaaaataagcttgtgagtgacatctcaatgcctaaagcaaaactgattcaaaggagctttcagaaaaaagggaagagaactttctctgtcaggtaaaagcagtaagagactctagattcaccttctagcttgaaacaactaaaa

SEQ ID NO: 561 - DNA, 17595 bp, Homo sapiens
gagctgcctgtaacatcaccattaggtattgctgtgattaaaaacttggagaactgggaacagatcttgcaagagaaaatggatcagtttgaaggtccaccccctaactatatcaacacatatccaactgacctttcagtgggagctggaccagctattcttcgaaataaagcaatgctagaacctgaaaataccccattcaagtaagaaagctcttataatgctgataaagagcgtagcttaacttttctggaagacagtttggctaaatatgccaatatactttaaaacattcataattttgaacctgcagtcctatttttagcagaatacgcttaagaaaaatatcagaaatttgaatagaatttttcccagtattatctgtaattcatagacattccatttacataaaggaaaaagtctttattgtattaatttccggtgtggtgttttttgtttgtttgtttgtttgagacaagagacaaggtctcactctgtcacccaggatggagagcagtggtgcaatctcagctcactgcagcctcaacctcctgggctcaacccatctttttcacctctgcctcctgagtagctggaacaacaggcgagcgccatcggctaattttttttgtattttttgtagagacagggtttcaccatgttgcccacactggtctcaaactcctaggctcaagcagtccctggtcttggcctcccaaagtgctgggattacaggcatgtgccactgcgtatggcatatttatgttcttattgtcagaactcttacagaatttttttctaacaatctatatatgcaaataaggtgcttctgacttttgtcagtaatttaacagtaaacacattacaggtttttaactgatgttttgatcttttacctgccaatctaggtcccttttgataagcagcatgcttttttttttgaggtagtggaccctgattaatagtttttactattaaaataagcttgaaagaacaaagctttttagcttgttaggctgttagaatcggtatctatgacttgtattcattgttgatatgctttaaccaagagaaccaatataaagtataatttaaaaagagaataataagagattcatttgactctcagcttaactggttcattcagtgtaattagagaattagttgctagatgaaatgatttttaggagaactaaaaattaaaagtaaactgtacagttttgttgagcttaatgctgtgtcttctttgcaatagattatgaaggttttaaaaataaatatctttgcaatagattgtgaaggttttaaaaataaatatctgcaaatataaacatattttctatagactaaagtagtgtgatatgttaattttttttaataggtcccgggattcttctgcatttccagtcaaacgactttggcatttccttgttaaacaagaggtccttcaagagacatttattagatatattttcactaagaaaagaaagcagagtgaggtattttgagaaaaatattttctattgtaatttttctttagttttctttaacatttctaaggaaatcagtgcttgatttattctgaaattttctttctggttgggtaatagtcaaagttcactaaactaccgtgaactacttttaagataaaaccttataattttcatttcatagcaatgaaacaacataggtactttgataaattacatatattcaagtgaaagttggtactttacagtatttgtcattaggtttttacacataataaacattgtgatggatggcttgaggaatttaatatataagcttactctataatattctccaaatatgtacttaaaatataaaatagccctttaaaagcattttctttacttagcacttagaaatgaacagaatgatgatttgaagcaacaaattcaggatacttttgtgagagaataaactacagaaatagcaaatacaagatgaaggaagattgctcttacaaagcaagacagaggttctgcattgcatggttatttttaagctaatacaattagtaatgtaatagcagacatggttcaagaagaattagcagtttgggagattggcaagtgacctcttccttataaaagtgggaccttttatatgagcatttcagtctgtttggctatttagtgaggtaattagtgagggaatgagcagtttgaagagtattcagagttgagcgtctgatgtaattaaagatttggcaaacatggccgggcacggtggctcacacctgtaatcccagcactttgggaggccgaggcgggcagatcacctgaagtcaggagttcatgaccagcctgaccaacatggagaaaccccatctctactaaaaatacaaaagattagccgggcgtggtggcgcatgtctgtaatcccagctgctcgggaggttgaggtaagagaattgcttgaacccgagaggcagaggttgcagtaagccaagattgtgccattgcactccagcctgggcaacaagagcgaaactctgtctcaaaaaaaataaagatttggcaaacacaatcaatgagaagagaagaaatgaattatatttcgcttagaaaagtgaaaacagagagagtccatacggctcaatttcccgagataaagtataaaattgcttctcagtttttcctcatgcccagggcagtggaacctaccatacttgttctttttcccactcacccacttacctgaatggtaattgtggtcagcccttatgaacagtcatttgttttctctatggatttaaaaattatatacttaaatgaggaagtagaagaatgaactgtagagaccttttgagtcctagttataagctttttcataacaaaagacccttatggcattgaaattattgatgtgactttgttagggaaatcagaggcaaattatttgcctctgtcatttaaaccactgtgtatagcatttcctatagtgatgctgagtccaaattccataaactaaaatataggaatctaagatagtgatttaaaataaaagattttagccaggcatagtggctcacacctgtaatcctagcactaggtgggggatctcctgagctcaggggtttgagaccagcttggcaacatggtgaaaccccgtctctacaaaagatacaaaacaattatccaggtgtgatggtgtatgcttgtaatcccagctacttgcagggctgaggcaggaggattgcttgagcccaggaggtggaggttgtagtgagctgagatcacacaccactgcactccatcctgggtaacaaagtgagaccctgtcttaatcaataagatttctggtcaattaggggctctgttattcacagaaaaccagttcattgagtgatcaattttctgagtgttttgttcttcaaattattaaaattaatgatttatcacaagtatgttttaagtattggtaaggttgatagcagcttgactggttgacttgtcagagtgtagagtgctgtgggaagccaggtgtctgggtttcttggaccctcccattctcgtcttgcccttccccacgagtttgcttcttccttaactaattctccccctctccgccccttagtctcccttccattatgcccctcagtctctgtgtgttctatttttcttccagcagtgggtccccatgaacagggaagtaggacagagataaacggaatgtttcttaaagtgctatataagcatcagttggctccaaggaagggaagtacatggctgggagttaggatggaagaatttttatcatgtacccttttaattttaaaacattgaatggaattactgtcttgtccagtactgtcccatagaactttctgtgatgatggaaatctgtatctgcatagtccaacatagtagtcaccagccacatgtggttactgagtacttgaaatgtggctagcatgattgagaaactgaattttaattttaattgatctaaatttaaatagttacatatggttagtgattgctgttttgaatagctcagatctgaaaaaaaaggtgttttattaagaaaaaaattatgaataaaacattaaggctgttaggacaaaataaaaactcgtcgttaggctcagaaatatgcaaaacttactaaaactctacccaatccagtaagagtgcttacatctttaaaattgtcaaataggattttggtaatcactaaatttggcaaattcagaaaattgaccaataaaattggcaggctaatcctaaaaatgctgggtgcatttaaaaaaaatccctgagaaatgctgaagttatatatttataagaataagatcttttattcactgaagatattacaggaaaatatttcacaaaacaagtttttgggaaacagattggtgaattcagctagttaagacaaatagattcttcagcagtttggccttcactgagttagctgtgccacacattgaccattccttggaagttttcttggatgcatctttatcagctgcagcagccataggggagtccctggaggcatgggcagaaaatttgaatggcccttcgtgatgaaaggaaggcagtcacctgaaaaggtatgaggaagagtttgtttctctgatcaaaccttcagagtttccacagcagagcagaaatataacttctgattgcagccatccttaggaccctgcatcaacccgggagcaaattactgagttatttctttttccgtgcctgattttattaaacatttatttacttagagaaaaatcatcatattccttataagagtgaaataattatcaatattttgaatctatgtttagaaataaatattttaatttgtattttaaatcaacccctatagggcaggaatttatgtagcatcttctgcatctgcttatacaaatgggctttaattttatagattaccagttatgtaacttagatttcttaaaactgtatacagataactaatttttattttgaaatagcttttatgttcttgtgtttatgtaatagtcacattaattttgctcttttggctttgtgttgtgtttatttgatgactgttttattcggtttaattttttcttgattttgcaaattcatttttatcatctttaagtggtggagtggccatttcagcttgaaatatttcactgtctttataatttcattccatgcatgtgttttgtgtttgtgacggtgtggtggtatttagtctatagaagaacatgtggagcaggtcaaccaaaactgcatagcagaagattgccacatcaaggtagtattccaagatcttgtatttagctcattctttaaagttcaaggagctaacgcctcatctctgatactaaccatgacctgcccaactggctaactactcagagaactcatagtactcccataccacttcagtggcacaggggaggagatgcttcactgtatctggcttgctctgtcttgcccttggttcttctctttcttgctccctgtcccatcttcacttgtcactttttctgttttaagcatggctgtttcatcttcttgattctgccttttctttccttcccatcaccaaccctaagccattgcatcttcctctcatcagtctcttttattcctttcgaagtatccctctttacaacttttccttatttctgtctcaccacccttacttcaaagggtggtttctttgcggttttctatggctttttactccactctgtgcctcttaatgtatacacattcttattgcagaatatttatgcacttttggaagagctaagagagacatactactgtataaattactaataaaaatatattagccatgttttataattaatcagtatcttaccatcacagtggaaattggggtgattacaggacatcagagaatttaagcaaattttccaaagctagttttcaacacattaaagttactcttacccttttttcttgctgctgctgctgctgctgctgctacattttcttcttatcctacatttaaatcttatgggatgtgcataactctaaatagagctgtgctgcagcaactaaaactgctgatgaatgttttctaggttgaagctgatctgggctatccaggtggaaaggcgaaagtcatccataaggaatctgatatgatcatggcattttctgttaataaggtaaaagctctcatcattatacacagtgtatttctccttagtgaaattgcttaaatcatcgattctgcctttgctttataggcaaattgtaatgaaattgttttggcttcaacacatgatgttcaagaacttgatgttacttctctactggcctgtcagtcatacatatggatcggagaagaatatgacagagaatccaaaaggtttgtctcatagtcacttttacatatagttttctgtaagaagtacccaccaaatggttatgcacatgatttgaattatttcaaaaggtatacgtgtatctccttcatttgggtaggtgacaaatataattggtttagctgccagtgaaagtctttgtctacattaactgaatgaattacacttccattaaaccctacactattgataatatttcaataagggataatccctaacacttggcttcatgatattcagtaaattaatctgatctggataattaaacagtagacacaaatatgttaattacactgagtcacatttaccgagtaattttgcagtgtttcttcttatcacctgataagcataccttttcttaaacataaaaatgtagacggctttacttttcattgaagctatggacactgcaccaagagtgttttgccattcttacctattttgaggtttcttctttgtggtttgccttccctcctgcttttctccagactcttagaaattgttcatgcttgaggatggtgccatgatagtttctctcctcattttgttgaattcttttttttgttagtatgtgatataactaggatttaatatcacatttcagagtagatataaccatgtactatgatacaatccatcccaacaattactttcacattttatatgtcttactccaagaaatctttaaactcaaatttctttaaacgtgttaatttgatactgagctatctgtacttgaagagaacataatatttttccatagataacaacaaacttttgtttcaacttgtgcagcaataaagttgtccccaaacaacattagactaaatttacattttgccaaaagggaaaaaagttaaccagtattaacattggcgattaggacttgtacctaagtttttctcatggctacttagtttttaaaataaagattgtcctatgggtacataagaagatttttagttggaatttgtgttaagagaaaagggaatgttcacagtaacacatgaatgtttttcacagttcagatgatgttgattatcgtggttccactacaactctttatcaacccagtgcaacatcctattcagcaagtcaggtgcatccaccttcatctctgccatggctgggcactggacagactagcactggagctagtgtggtatgttatttacttataggtatcatttctggatttggactctgaaaaatcagttggaatctctttgacataggaatgatcctaaatttcagggacaaacaccagtagataggccatgataatgacagctgacatttattgtggcttttttatttggtgacagggtctggctctgtcgcgcaggctggagtgcagtggtgcaatttcggctcactgcagccttgacctcctgggctcaattgatccttccatctcaacctcccaagtagctgggactacaggtgcatgccagcgtgcctggctaatttttgtattttttgtagggatggggtttcaccacgctgcccaggctgttctcgaactcctgggctcaagtgatctacccgcttcagcctcccaaggtgctaggattacaggcatgagccaccacactggcctcatatgactttcttagtgtcagatacatgctttttctcacaacaatcctaggtggtaggtgctattattaccctccattatcattttacagatgaataaacagatacaaaatggtaaagcaaagttaaaggggaattcatgtctacttctaagtgcttgaaagcatgtcagtaacattcttgtcactgtagctggaggggtcccattcttatgttctgctctgaagcatctggaggtgctcctgaatatcctcagggaggggcacttgaagaagagttcctttattatgagatgaagctccttggtaacctcacaggccagggctataccagcaagtgactgtgcttcctcaccctcttcagacaagtgttctatgtagtggttcagaacatccataacaggctttatctcagtaataagcaaggtgtaagagaataaatgtcagaatttatcctgaagcatatccttcctcatcttttctgcatacacaaaataaaatttttaaaattttcttttaaagcttatgaaaaggaatctacataatgttaagagaatgacttcacacccagtccatcaatactgtaagtatttatgacctaataattgtaagtgtcctcatttggaggttgatttatagaatagaaaatattggaactctttaatttcttatttcctgctttttctcttgtgtttcagatcttacaggtgctcaggacggcagtgtacgaatgtttgaatggacgcggcctcagcaacttgtctgctttcgtcaagctggcaatgcaagagttactagattatattttaattcacaaggcaacaaggttagtttctgggggctactgctgaattcatctgaaaatagttgtggatatttaggagtaagtgataaaagtgcatcgaaaaatgaattcagtgaccctggatttaaactgagtagacagtttgttggagtctattcatacactctcttttcttccaatagaagcaaaaatctacaaaatttagtatggattaatcatctatttaaagatactaaatatactgtgagagtaaaaaaactgcctgtgttgagtgtgttggtgattcctgtaagcacagtaaagttcttgagagaaacctagtttcttactaaatttcatcagtaagaggttagaggaaaacagtgaaacaggtaagcagttaagaagtaatggaagggccagtcacagtggttcacacctgtaattacaacactttaggagcccaaggcaggaggattgcttgaactccagcatttgagacaacctgaacaacaaagggagaccacatccctacaaaaatttttttaaaaagcccaggcatgtgcctctagtcctagctactcagaaggttgaggctggaggatcccttgaacccaggagtttgaggttatagtaagttataattgcactactgcactccagcctgggtaacagaatgagaccctgtctctaaaaaaatttaaaaaaaaagtgacagggaattttttagcacttggactttttgggaatgacagcaacagaaacatagttagaggcagaatgtttatttagtagggccttagtgaatcttccttccatgtttttacctttgctgtggatgctaagaacatgtgtttagtagttatactgttcttacagtgtggtgttgcggatggagagggttttctgagtatctggcaagttaaccaaactgcatcaaatcctaaaccttatatggtaagtatcactaaatgttcccagggcgcatatacacaacactttgttcatgaagtgtctgtttcagacagtgaatctcattggtggtcctattgggaaaaggatgatttttttcagcaatcccagcctgacagcagcacccatccttaccctagttttagactgaaatgacctgaaaaacaaaaagccttgcttttcaccttgaagtacagtttatattttaaaaattttgggggctttccctgtgtgtggtacaacttgggttttttttcattattattatactttcatccattttgaaaactctatcttcttaatatacacatgataaaattctgtcattaagaatcaggttctgccgggcacggtggctcacgcctgtaatcccagcactttgggaggccgaggcgggcagatcacaaggtcaggagttcgagaccagcctgaccaacctggtgaaaccccctctctactaaaaatacaaaaattagccaggcatggtgacacgtgcatgaagtcccagctactcgggaggctgaggcaggagaatcgcttgaacccaggaggcggaggttgcagtgagctgagattgtgccactgcgctctagcttgggcaacagagtgagacttcgtctcagaaaaaaaaagaatcaggttccaaacatctgttccaatttgttccagaattgtgcttaccagattataaaataaccaatcccaatgagccaccttaatccaaattggattacaaaatagttggtgatgaagataagtagatctttacctgatggagatatggtgggggaaaggaacatgggggagggtggaaggtgatgctgtcctgtgtgaaacttcaggcttcacatatatggagggaggttcagaacgccttgaacctcctgggaccagatagattacccaaatactttttaaaatttttctaaactatacatatgttcttaattatgtgtataagataattctcttaaattaggacactatagactgtaccttgtctatgcagaaatggaagtaatcttgaatttatacttttgtcttcagtcagatctgtaccactataattccagacagaaaaacatgcattatattttaaaataccttgacatcctaagactagttgggtctgtaagcatttcctttgtgactgttaaagtttattacatgtatttgagatcattagcactaaaattgacgggtcttaggtaggttcatgtactttgatgtcctattcttacataatctgaaaaacatgacctttaattctgtttttaccaactccagttattaaaaattattggacagtagccaaataatatacacatgacagttaagcctcatactatcacttattcttttatcctagaccgagtttttaaaaactatttttagctcatgcatatagtatgttattagcagacatgtatgttggtactgtatcaaattttatccaatggtaaaataacatcagttgcactttgtttttcgtagagttggcagtgccacagtaaagccacaagtgactttgcatttattacctcttcaagtctagttgccacatctggacactccaatgacaataggtaggttgacagaaaagcaaagtaagaaatataaaaacgttagaaatccatacctttagcaagaatacttttctattagtagggtttttccactctaggcattaaaaaaaaaaactttgttacataattcttatttcagagtgttttttcttaccaaaaagagaaaagcaaaaatgaaagttattcctaatatatgtaatttttattttaaagctattcagtcttttttaaactactactgttaacactgttagtttctctaggactaacaggcatctgatattgtctccatcattctcaacatttttattttattgcagtaggtttgggggaataggtagtgtttggttacatggataagttctttagtggtgattgctgagattttggtgcacccatcacctgagcagtgtacactgtacccagtgtgtagtcttttattcttcaccctcctcccacccctcccaagcccccagagtccattatatatcattctgatcctttgcatcctcatagcttagctcccacttacaagtgagaacatacgacatatgattttctactcctgagttacttcacttagaataatggcctctaactccatctgggttgctgcaaaatgtgattatctcattcctttttatgaagtattccatggtgtatatgtaccacattttctttatccatttgttggttgatggacatttaggttggttccatagttttgcaattgtgaattgtgctgctctaaacaggcatgtgcaagtgtctttttcatataatgacttcttttcctctgggtagatacccagtagtgggattgctggattgaatggtagttctgcttatagttctttaaggaatctccgtatactgtttttcatggtggttttactagtttacattcccaccatcagtgaggtgtccccttttcaccacctccatgccagcgtctattgttttttggttttttaattatggccattcttgcaggaataaggtggtatcgtattggagttttaatttgcattttcctggtaattagtggttttgagcattttttcctgtttgttggccatttgtattttgagaattatctgttcatgtcctttgctcgcttttgatgggattgttttttcttgttaagttccttgtagattctagatataagtcccttgtcagatatatacattgtattttctcccactctgcaggttgcctttttactcttgctgtgcagaagtgttttagtttaattaggtcccatttatttatttttgttgcatttgcctttgggttcttggtcatgaattctttaagtcaatgtctagagtagttttttttgatgttatcttctagaatttttatggtttcaagtgttagatttaagtttgacccatcttgagttaatttttgtataaggtgagagatgaggattcagggactaacaggtatttgacactgtccccatcattctcaacatttattttgacctcacatggttttcattagcaacacatgcccatgaataacatcttgtttccctgcagtggctaccacctggggatataaaagcattccttatactcaggaagtcatatcagtttcctggagtggcaatggaaaggagatggggtagaggatgcagagacgggcaggaccatgtgagatggaactgtgtagtttgaccctacccccatcctagttgggaatcactactctctataggtgtgagtgaacaaaaaagataagaatgaataagcaaaatatttgactgaaagacaggttgtccctgatgacgacttataacaatcatttatgatgtatttttgttattgagtttctttaaaagaaatgtttgcctctgggacacattaatatcacccggaaacagcctcattcatggtgagttaaggtctatgatttttaaaaatataccatgaaggaataatacaccatgaaggaatgctttcttggttttaattagtgaatccagtgagtgtttattgacaggttgaaaatggagaaatatttagaatgaatgactaaaaatttggaaagttaattagcatatctggcttccttgctgcagttaaagattatggtctcagaaatccaaaatagtctttatattctattcagaaaatatggtatggatagtggtactactaacaaggctatttaagaaattagttgcaaagtattcattgagcttaatagaaaataacatattttaaagaattaaacctcatcataaaatactttttgtctttttttcctttttgtggagatcaaggtcatgctgtattgctcaggcaggtctcaagctcctagggtcaagctatcctcccacctctacctccctaagtactgggattacaagcatgagccaccacacctggccctaaccataaaataaaacaaaggttaaccttattataatgactagaaatgtaaacagtgccatttaaatattattccttttaagacaatacttgccaaattagtgtcctaactctgtcttccacatagtaccacccaaaaagtgctccatgctcaagtaagtttggttaaatgaagtagattgtcagaaagacagaaagattctcagtcttttaatacactgatatgcattttgaaatatgtagttaattctcaattttattgcagaattctgcaaacagtggttaacattgcttacagattttctgcatgttaatttgaatctttaatcatattaaaatgcaaatactcctgggaaggataatgaacttcttaacttgtaactgaaaacattcacacattttctcatagtgtcgttgtttcaattacttacctgaaaagaactttttgtacggtacagcacttggctgggttaatactcaccaactttgagaaggttggtctctgctcttctgtatactttttatgaggcagtatcacttagggcttaaggtttaaactttctttttctctctgtgttcatttcatattgagattatggataaaaagtttgttctgacattgcttaacatttttctttaatcatgtgattacagaaattcaatgacttacaaaacaataaatgtaccttagaatgaaaaatgcatcagtaaggtctgtatttaaatgtggatgtagacatcataattaccaagacaagaaattgttttgagaaattctctgatgtttttcttcttcaggtttcacgtgccacgatcatggtgccacggtactgcagtatgcacccaaacagcaactcctaatctcggggggtaggaaaggacacgtctgcatttttgacatcaggcaaaggcagctcattcacacgttccaggcccatgactcagctaattaaggctctggccttggatccctatgaggaatattttaccacaggttcagcagaaggtaacataaaggtgagtcagtacaagaggttggaatgtgctaaagactgattggaaagagaaaaaacaaaaactccacattctttgaaataaagcttcactttatttcacttgggctactgcatggagatactgcatatctcaacactctgccgcctccccatgctcctgtatggttctttctaaactgttatggtcaatgagattatcaaactcattggactcaggccattagaaagctttaaagcattctattttgagtaaagtgtatgagtttaatgcatgaaattttttgatgacattagtttggctccttagaagcttctcccctctccctcagtactcttgtgtgtggtggaggtgacgtttccagtaagtgagctagtgcagatgctccttgactttatggtgggattatgtcccaacaaacccattataagttaaaaatattgttaaagttgaaaaacatactttcaacttaatattttcaacttactatgagtttattgagactaacctcaggataagccaaggagcgtgctgaatgcgtattgctttcacactgtcataaagtcaaaaagtcttgtcaaaccatcgtaagtaggggactgtctgtaccacactacttttacatagccttaggacctagctcagcatgaggaacacatttaactgaattaactcaaatagttaattgaattagagatgggctacatatggttaatatgaagccacaagaggatgtgaaggaaaatatggaaggaggacagtaaatgaatcgtgggagtggtgttatcatttcccacttagataagctcttaggaaagaggcagtgggtgggaaggttgggctttagtgagatcacttgggccaagggagcagaagggccatgtttttgcttttggtcttttcgtaatatatttttaactccttttgttttgcactaggtttggagattgacaggccatggcctaattcattcatttaaaagtgaacatgctaagcagtccatatttcgaaacattggggctggagtcatgcagattgacatcatccagggcaatcggctcttctcctgtggtgcagatggcacgctgaaaaccagggttttgcccaatgcttttaacatccctaacagaattcttgacattctataaagattggggttttatttttatatacatttcagttaaaaggcacactacagtcatcactaggcaattctgctttctaagcagttgtattgaaaacagagaatctctgtgtagaatttgaatatgacccaagctgagtattatctaaacaggttggtggaatgaatgcgcatgtaccttattatgctgacatactaaaaaaaataaaacctagtattgtatgaaggatagctattctttacagcatttagcaaacctgattcagaaaacatttgagattagcaaattagtaacttgaaataatgaaaaggacgtttataccaaattaaggaagaaaatgttgctgatttgggtttttcttcctgttcttaccactgactgaagcatgcctgcagtctcctcctctgttgaatgaaggataatcataaggtgtttgttaggagcgctagaccacctggaaaactttcttagctgtggagcagtgcgcagtgaccagttctctgctgtgagaggccgtttccattctttcctgctgaatatttttcctgttagtgtttatactgagctagtactgtaacttgcaaatgagtgcaaatttaaatgcaatgttttactcacaatttgcacattcacattttttggactgctagtttttctatttaaatatttgccttcatgttaggaatgtactatgtgaacatgacatatttgtagttaaccaaacacaccttcttagtccagtttagtactttttcttttcgtgtattcaaggttaaacacccaaacatttaaggatatgttgaaactacaccaatagagcatttcatatcataattaaaatgaatgttaggcttcttgtggccagttaatagttgatgagattggtgacattatttattgccacagcctattgtataaactatgcagagttaaatatttgcttgtaaaatattagccaatgttgtcattattttgatgtatttccttggttatgaccaaaaatatgttgagatactgaaactaatgtctgtgtgtttaaatgtttaccagcaaattgtcttatcatgttaatgagaatgttcaatgcctgtgtggtaaatagtaaatacaatggcataaaagtaactttctctgaagatgtgatgttcaggctgtgaaatatatatgtaaaagaaaaataaatgttatttgttagagtttttagtttgatactgtttttgaccattgagatttttaatttgataaaatgtttaactgttagagaatttgcaagctatttggcagtctattcattcataagtaagtatttactgaataccttctataccaaaagccattctaggaaatgggatacagtggagagccagacagagaaagcacacaatgttgagatttagcggggcaagagctaacctcactataccttctccagacagatttgaagtttattgaatgaagtactaacctcgtacccaaaactcaaatctgagtcttggctatttgcttgctcctaagtaagtaagggaagtcagaatatgcccactgataagaagagccaggaaaataagcttgtgagtgacatctcaatgcctaaagcaaaactgattcaaaggagctttcagaaaaaagggaagagaactttctctgtcaggtaaaagcagtaagagactctagattcaccttctagcttgaaacaactaaaa

SEQ ID NO: 562 - DNA, 1134 bp, Homo sapiens
aaggcaataggtcggggaaggtgatgaatgttctgtggggcatgtcaaattgggtggaacctctggggccttctgtgggagatgcccagggagcacagatttaggagatgggagcaactagtgtgatggtggtgagggctggttgaaaccctggggagtatgtggagctcatctgtgtttccacagagcttatctcccaggagatagccatcgggagtgccttgcctggcatgttcccctgctgaggtctgttacccaggagcctgcagacacaaagagcaggctggtaatgctgagaagcgaacattcagtacctgtcaccagaacccagcatgggtgttcaacactatctggtgactctgtgagaagaccctatgctcaggggatgaagtgtgttgcttgtgcaagagggatggagagagagtgttttccaagtatatgtgtgtgtgcatgtgtgtgtacccaggtggaaccctcctgcatgctcacatatgcctttatgaatactggaatctctaaacctaccatcatgcatctcgtcttagcttcctacctctctctttctacccctgcaacagccatgttattgccagtaacacatgagaagagtgagggagacctgtctgtagacaagctcagtgtgctgctaaggaggcaggcagcagttctgtcctcatgcgttcccattgtgccctgtcctgggatggcaaatgcaaggccagacaggctctgggctctctggtctgaccactaatagcatcttctcctcccgctaggctgaccagcctccaaggcaggactctgacaccagggttataaatgcatctgtctgggcacattatctaaattgttatgtatcaccctgggtaatggcaaaagtaaaaaccgctgttagctcagtgaataaatccttggtgctgatcaatcattgcacgacatagactcttttaataggcacaatttacacagaggcttggcagactgcttcgtcttctaattgccgatggaaaatggatgccgatctctgctgtgccgtaaaaatgtaaactataaatgacttaaaaacttgtgtgctcccttctccacccagcactcattttaaccttttatttagaaacaaaacaaagaaaaaaa

SEQ ID NO: 563 - DNA, 2332 bp, Homo sapiens
gaactcctcgatgaggaccatctacagtgcttttttttttctatctctctgtctctcagttctgctttcttctacagtatttgatgactggcatcccatttctataagctgggtccagaactttgggctcacaccttcctttgacgtgcaagtgccacagaccctgagatgtttcttcagatcagggtgccgctggcatccactgaacttgcttcagtttaagctgagcaccttcctgagaatcatttcattttatctttcattctgtagtgagaagaggcttcagcatgaatagtctagggacatgcaagatgtataaaatagaatggagttgtgaattaggttatatgagggagaaatttataaaaaatataaagcattgtaaagacaaatgcatgttacacaaaaccaggagaccacttcattttaagaggtacctgctggtctcagaagctttaagtgatttataatctagtcaacaataagtggcagatgaactgaaaatatatttgcatgaagttcttagttcagaggtaaagctaggatgctatgcatggcaacactggaagggaaagagcttttgaaatccaggtctgggcatttgctctaatcagaggtcaacatcttctctgccctcataacccactccccgccaggggtcctgtctcctagaccacacattagcagatataatatctgtcattctggtttctcattctctttccagaaaaatccagacatgattttattgcaagatggagagaaaaggagacagcatcacatgtcttatattagtcacaaaaactggatgggttttatttcaggcgctaattcttttgagaacacaagggaaactttgatcttaatctatttgatgtggttttaagtaaaggagcatcttgtgcttactttgaaagtgtttttttacttcgggcttggtcaaatattacattttgttccagagaaaaactcatttggaaggcagcatggagtatagaattagacatccctgggcttgaagcccatctcagccatgaactacctttatgactttcagctagttacttttcctcactcagcttcagtttcttcatttataaagcaagtgcctcaacatcgctttttgactctcttaatcttgtctacgcatttacagtagcccttttattactgattttttactactcctggccatggaatgacgagaagcccatgtgtcattctcagacgggggattttgattctaatgacagtcatggttgagaagtccactgtgttaaagtctcttcatttgaagcatctgatgtgaattttattttttgcttaaaccccagacatagatgttaagtttcaaaattatgtcatacattcactcccactacatactcattgaatgcttaccatgtacagactctgtgatagactatggaaatacatagaaagaaattccctgtttttaagaactttacctagtgtttagaaattgcatttaaaactgataattaaaatactatagaccttggcttaaaggatgcaccttgtaatctgtaatcatatttgtagttatatattgctttgaaaatacactgtagacagtaagacaaaaaaggaaataaaaagtacatgaattgcgaaggagaaaataaaattgtctttgttcacagatgacatgattgtctatgtagaaaatcccgaggaactgacaaaacaaacaaacaaacaaatctagaactaattagttctagattatagcaaggttgcaggatacaagcttaatacctgaaagtaaattcctttcctatataccagccatgaacaattggaatttgaaatcaaaatacaacaccattaatattattaccaaaagagagagagggagaaatatgtattatgctaacaaaagaagtaaaaaaggtatgtgagaaaaactacaaatctctgatgaaataaatcaaaggagatctaaattaatggaaagacaaactatgctaatggataagaaaactcaatcttgttatgtgtcagttcattccaatttgatccatagattcaatgcaatcctagaaagctactttgtggacatctgcaaactgattctaaggtttacacgaaaaggcaaaaagatgcaatagtcgaaacaatattgaagaagaacaaagaagtcggactcttcttgacttcaagtctttctataaagctacaataatcaaaatagtgtggcattggtgaaagaatagatagatcaaaaccaattcaatggagaaagggaaaagacagtctttttaacaaatggtgctggaactggagttccttatgaaaaagaaaaggaaag

SEQ ID NO: 564 - DNA, 115 bp, Homo sapiens
tttttgtatattttagtagagacggggtttcaccgtgttagccaggatggtctcgatctcctgaccttgtgatccatccgccttggcctcccaaagtgctgggatgacaggcgtg

SEQ ID NO: 565 - DNA, 115 bp, Homo sapiens
gctgaggcaggagaatcgcttgaatccaggaggcggaggttgcagtgagccaagatcgcgccactgtactccagcctggcaacacagcgagactccatctcaaaaaaaaaaaaaa

SEQ ID NO: 566 - DNA, 1237 bp, Homo sapiens
gtagaatgccatggagttaatagcttctgtgatcctacatgttccaagataactgcagcagtccaaaaagccagtttcctttctggtgtttgtgggcatacactttgttctgctcctgagtaagtcacactttgtcttccaggtcctctaggatccctgcaatgttccatttgttgcctgggcattggagtaatagcagtgcttggtgctacagaaatagatggatggaagttgtggttactgtgacaccaaaaacttgtcccctgagctccctactcctctttctcctatattttttggtaattggctctgtcattcacctcactgcaggattcagaatcctggtactgggtcttgtatttctctttttcccttaccctccttatccaaattgtcaccaagttctgcttcatgctctcatgatttctcacctgagttaccctagtagcttccaaatagggccctctgatttcaaccttggacactcccactatcttttatattatggaaagatctaatcatgttaccccccatttaaaatccctcagagagcactgcagatacaattcaagccagttagcttagtgttaaggttttacatgcatttctgcagccatctgcccctattcttgcaccctaataatgccaaacttcttttaggccttaatttcatcatctgcaaaatgaggataataaatagtacctacttcatatgattgtaataaggcccctcaaaactgtttcatgcctcttttgcccactgcattaggctgttctcacattgctataaagaaatgcctgaggctgcgtaatttataaagaaaagaagtttaattgactcacatttctacaggctatacaggaagcatgatggtggcatctgcttggctgctggggagggctcagaaaacttacagtcagccgggcacagtggctcactcctgtaatcccagcacttggggaggccgaggtgggcagatcacctaaggtcagaagttcgagaccagcctgtccaacatggtgaaacctcatccctactaaaaatacaaaaattagccgggtgtggtggggcggcacctgtaactccagctactcagaaggctgaggcaggagaatcacttgaacccaggaggtggaggttgcagtgagccaagattgcgccactgcactccagcctggacaacagagtgggactctgtctcaaaaaaaaaaaaaaaaaaaaaaggaagcaagaaaa

SEQ ID NO: 567 - DNA, 1974 bp, Homo sapiens
tgagttttcatccattggtgacaagatggtcagacttctagagaaataaggtagttttgtggtagaacaaactcttccttgtgggaggtatagtgggatttggggaatagggtttatgaaatggtccccagagtgggatggcttgccttttcaaactgggtttcccacccagcaagttaagttgacccattgcagtggattgagtggagggcaggtgaagggcaggtgttttcaagtcaaaggagttcaggtgaagggcaggtgcttttagtcaaaggagttccttagcattatttcctcctttatttggagatcagattgaagatgtaggggactagaatgcagttgtagtttgtggtgtttactttttatggaaaagtgcctcttatgtgaaaagtcttctgtgcttgatcctgggggtaggggggttataaaaatgtcatacctgggatcctgcccttaaggagttgatggtaggtaatgctttcctttggctttttgttcatcttgagtctgtgtatgttcagttatcttcagccatttcctgggcaatgggaaacatttctgttaaaacaaacttctgactttgatctgtgacttatatttctttttagataatgaagaaccactgggattagagggtgtataaaatacaataataagtatagtgtatgtaggaacctctgtacaaccaatttggtgacttttaggcaactcatttgactatttgactgtttgttacatgagtgtgcatttggctttgtttaaaattcctctataaagcacattttaaaaaatgacccagtacttagtatataagatgaactgccatttgtataattgatcatttaaaaatgcttattatacttttaatcaatcagtttccatgtttatgaaatgggaataattattatatctagctcatagaattgtcctgaagatgaaatttatatccatatatacataatgaagctctttagagcaatgtataactacatgccaactgttcaaaaaatattaatggctacatcactattaatattttaaaattagtactgtcattttcccttcctacatgactgaatgtaggaggtgactatttttgttataaaaggatttccaatgagatacctttgaatggtaaaatttcctatgcatttatttaaatgtttatatatatatgtctttaaagtatgaaagttaagtgcacttatacaaggcagattcaggtactaattaaactgctcatttagattacagaatgagggactgaaaattatatgtatttaattaggaattggattgattggtcttgactgctgttgtctttcagttcttttttattgttatacttcccatgtgtttgtctccttttctttttatcttttaaaaattgctttctgatttatttcctgttcagttttcagtaatgggtgtagaatagggcaagaacttatgttggtgcccgttgtttgaaccaggaaggagcaactgcatcagacagcctggggctcagttgggagggacttcagatcagtccctgcagagctgcctggcccagggaaccactgaattccagtttcctaactccaaatcggacagtttgtgggtctacactgtatgtacataatgaacattttaaggctcattcatccagtgttttccacatgctcccatttgtttagttctcctttttaaaaaccaataattatggaaaaatttagctatgtacagaaatagtagtgagaaaccccccacttagccatcatgcagcttcagcagttgatcatctcatagccagtcttgtttgctcaatactcccaaccatttcttttctcccattttattttgcaggaaatcccagacattatatcatttaatctaaaagtatttcaggatgtatctgtaagagatgaggactcaaaaatgcatacacacattttgagaacttcccagaaatgtaaaaaaaaaaaa

SEQ ID NO: 568 - DNA, 90 bp, Homo sapiens
ttttttttttgagatggagtctcgctctgtcgcccaggctggagtgcagtggcacgatctcagctcactgcaacctctgcctcccggatt

SEQ ID NO: 569 - DNA, 6713 bp, Homo sapiens
tagacagtgtctccttccttgaagatgctatcctctgaaataactgtgagtacagtcgcataaccctaatttaagatgtgcctgctgaacatgtgctctctcagatcctgtcctcagaatgcttttggctcttttctcggtatctcatccttagagtttttattttataccaatgttctggattacatacctggtccagaaatctagacttgtacttctttttaattgcctagttgacatttcaaccttgattaaagattgacaatatttatcaccttttcctcctggaacaatttaggttaatggtgcagccttttttcctagtcaaacatgccaggaagttcagggcaaagttcaactgctccctcttgtcttatgtggtcactgcttctgagaacatccaggaagttctttctatacttgaatcatcttctcagtcctttggggctttactgctatgagtatgaacttttgtgattatttatttcagtcttcatgatggtgctatcacattctacagttgtttatgtctgtacccagtaagctcttttgagggaaggaatcttgtcttctcctattcccagtcttgctcatgcataacagatgcccattcctcctaaatatgaatgctgtattataggcattagtaataatccctgttacattgcagtctgaagtatgttttaaacatacttttttaaagttagaactgacttacaagtgaatctattcttagattcttagatactaactactttagatatttagttatactcaataactaaatatcaatactcaatatctgtttcttctgaatttcagagtagttagaatgtttttcttaagactttgctagaaaggaactggtttgttagtaattctgccatcaactcatggagttataattgccaaatgagttaatttttatataccttaagctatcttgcctacaaaaagtaaaataaggcaggattcataaatgttacttgtaaattgagtgtttcacatgaggccaagtatgattttaacataatgaatatcattgctcctcatctgtaaatttgctgctgctttcatatgtgtatctgtacatagagttatgaatgaaaatccagtaatgccctaaagcaactttcttccatagggtcaaagctcacttaaggtaaacgtgtgaaaaaagtgactgcagtgtgtttgaaaccacaagctgtttctatgtcataaattaacatcagcttgcaagtctctgaaagaaccactcatttgtaattggtatatatgtcacaacctcccacattcctttagcccatctcagggaattattgaaacgctggcagggttagtttcattttgttttggtttttttgggtttttttgtttgtttgaggattttttttttcttttatcatttgtttgctcctgtgtaagcttaatatataatggcagtttggcatctgttcttcgcacatgtctaacccagcagagttatgcaaaaatgatgacttcattttaggtcaaattggctttgttcccagtcctcattgttggtcactttgttcagttctggtgactcattggtgatgttgatgaaactgctcagcctgccagctgggatattgatggcaggtctaggcttcattgttaggtagaagattgaatacttctcactttatacaaatttacattggctattgctcccatgtgttagctagtcttaacatgtttgttatttcgttatcttattagctgacatacggagtggtattattagtgtcgtactccttagcgtgagcatgacaattaagttaccttactaacagtgatgagtaaaccatactctgatctaaacccattgttaccaatgatgtgattatgaagttagctgaatctatggtctacatttgaagaaatagttcagaattctctactacattgtaagttacttgctaatagagattgggcattattatgtactactccccttctcacatcctacccaaagtacacaaggccgtagtaaaatactgttgctactaaaaactaaacatactgtggttgctaatgtcctttacatcttcagcctatagggaatggtacaggcagaaacaagcaccattaagtatattatcatcagtagtgagatctgtatgattaggatatctttgcttaagcccccaaaggaaaaattctctagcattaaaaacatggctggaacatagctaagcagttaacctaattagtagacttattgttaacgttcagtcctaaaaatgaaaagcttcagttgggagtagaaaatatactatgctggtatatagagcaacaaataccctgatgagataaaatgaagtagaaacttaccatttgacattatttgactttcatacatgctactgaaaagtctaggtttagctaagaagcataaataatggcagtacttgtagaggaaagaacataccagctaaaacaagaactgtaatgaatataatggaaagtgtttggagcttgaatacttggcttcaaaaatctggctttgccatttactgttaaaaaaatatctgagaatttatctcaggctgtaaaacagagaagtcataccaatttcaagaataaaatatgatataaagaattgttgaagccaaaatatccagaaataaacagaatggaaggtatcattgctataattatcttttcagaataaaaaatagagtattctttatcctttctgttgtctcacatgacaagcatgggatggtgaggaaatggcatattgcctatgttcgccgccccacccccttagttccaccaccccttcaccgtcacccccagttcactagtgtatcagaatgcatcttcagaattacacactgaagatacaaaaggtccagttggtaagctcatcagtaaataacaaggctttgaaatctgacaaattagctatttttgtaggaagataatagaacagcaagatggaagacaagtgatgagtatcatctgttttgaggttgacaaggtgtgacataaccctgttaatagacacaagtaaaagaaaatcatactaggattggatattagtgagcgagcaccgaccagtagaaacaacaacagcataaatctgttatttaagtatcccaataatgaggttaaaaaaaaaaaaaaaacagaacaaagcatgaaaagaccacaattagtgctggctatgcttagagaggagcagtctcttggtaaactcaggcagtgatgatgaacagaaaatggccgactgatactgtaatagaggcatagaactaaggacactccgtgagctggcataaatacaggggagtctttaagactgaaaaaagttcatgggtatgacacttaatatgactcaacattactgcagaattttaaagcaaacatgaaagcttgagaataaacactagtccctctacttcaagaaaaagcagaacctgtactagaacatgaagaacttagagatcaaaagacagccagaactatgatgaaatattttgaaagcagtgggcacatttttaaagattttttttggagaactttatgaggctgtatgtataattcctatatgtaattttataggaattcttaactgaaagtagttatcaactgctacttatcaggagcagtgttattagggattttaagttaggcatgtagaaaactttctgacaaaagggctattgaactccagccagttcccagtgaatctccaggaggcaccttagaagtcttcacaagctgaataccatgtctttagggtgtccaaatgcttctgtcttgggggagagatgagagatgactgggtgcctttccactcagaacacagtagaccactcactatttatgaccaagcctcacttcttttctattacagttacagattcttttttagtctggaagttagggtaaataaaatttgtatgtttgatttttctcttaggaatgttttctcatcttaactcttatgttatctttatggccaacagatttgctcagaatatatcatcaaaatatatgtattgtattttgtaaaggtgaaaggatcgaaataccactttgacagttataaaccagagtagatttgagaactgattgctcacatcacacttacgaatagtctcagaagcctttaagagaaacttacttctcaatggacacttagaagaatttgatgatcttactgtcataaaatcagtaatgaaattctcagcaaaactatttggtaaacattgcaccctgtatttttacccaacatcttgttatgaaaattatcaaatacattaaaaagttaaaataattttatagtgtactcactacctagatgctaattagcattacctatgcttgctttgtcacatatccattcatcatttcatattattatttgatgcattttaaattgcatatcattaactagagttcattgttggcttttttacataaaattagcatgcaatgaagtgcatagaaatatgtgttcactgaggtttggcaaatgcatatagtgctatggaaataggaaacgttatcaccaccctagaaagtttccacactgccctttccagtcaattcctgtccctacttgaccctcaaaggcaaccactgttcctttgtctaccataagatttttctgttctaacactttatataaatagagtcacgcaacatgtacgctcttctacaaggcttcatttttttattgctgttcttttttattgctgagtagtattccactgtatgacaatattacagtttgttttcttaatttcctattattgatagatacctgggctgtttccaggattggccattataaataaagctgctatgaccattcttacgtaagtctttgtgaacataggttttcatttctttgcagtaaattccttggattagaattgctgggtcacagggtagttttaaaagaaactgccatacctttttccagttcagttttattgtgccctgtattttgtattttgatgtgcataaaggtgtaaactatttttatgatccatattgaagtattagaagaagtgagtttggaataacaatggcattgttcatggtcaaggatgacaattggaactatctgaggaaagcaaagacctgtctgccccagacagctcctcaaggggttcctatgcctgaaactttagcaatatttcactccttgaaaggttaaagcccaaccatggtgatatgttagctagaagaaacagcactggtttgtttatgttactaactttcaccacccgttttcagtaggtaaagtaagactgatcattgacagaaaaggttatttctgtgatgaggttgagggggtagtggaaagcatgtattgctagtaagccccaggtacagctatgtgagagagagtcacctggacagggaagtcccccaaatggtggccagaagagcagaaaacggggtgggaaaaattctacctcacagttttgcataggggatagctatgcttttacgggacattttagcgtttaaaaatattttcaatattgtctctttattcaataccacccagctgtagttttttcacactctgatgactctcttatccactcttttacctctcccagctgttctattacatacagcattcacctgtattagtctatagaattataatcatctgtgtgtttctaatgctcattttcaaaaatatgtatggtttattcgatttttcctattaaaattttaagggctgggaaatttggcttctactgtaaatccttataatgttccacacattgtaaatatgcaataaaaatgttaacaactataatggcagcaggttttggtatgtatttctttgatatattgtcactttggacaataagtttgatttctgttaataaaagttgttcataaaatctagggagaattaagtcacactggtctctataagataatctgatgaattctgcatctttgaatcaatttgagttattttttgtaaaggtttaaattgtttctaacagtgttacctaaaacctttcattaaatcaaaaatgtaacttgtatattctgaaataacctggagtcttagaagacagaggcttctgcttccctctcccgtgaccccaacaatcccttcccacaggcttggcacagaagttcagtgctttctctacgtctcatgttgtcagaaataggttctcaccataatagacagtggtgaaatttccattgttcctactgagaagtccatttttaaggcatcaaaggtgaatgtgtatttagggatggaggaggcatattacaacaaagctgtatttaaaataacacaatcatatcatgctataaacaatagcagttccagaatggctactaaggattttggactgccagactttggaaattggcaagccttataccttgtccaatgaagttaagtacatttgagtgacagttcaacatacaagcaaaaaaatatatagaagacattgtacatttgttattaatggacatgtttactttacatgttagagtatccatccatctctaggttttccattagatgcttcattgtatccacaaacctgtttcaaaccattgaagtgatcttaccattgtgtttgttcaaaataaaattgggagaaaatgtgaatgagtcaatatcaacacttgacattcctgtctttttaatacattttattcttttgtttagaaaattt

SEQ ID NO: 570 - DNA, 15914 bp, Homo sapiens
aaattgcagcactcttgaatgctggcgatgaggaagatcttgtggaactaaagtcactgcagcaacaacttagtgatgtttgttatcgacaggccagtcagctggaatttaggcaaaatctcttacaagcagctcttgaatttcatggtgttgcccaagatgtaagtgtctattctgattcttttcttttcttcaaattatctgaacacttacctacacgtaatttttttcaggtttgcatgcctcctaaattatttttctgaaccaataaaatgaattactggtgggggtaatgagataaaattctttgattttttttaaaaacaagtattttttaagtcattctgcatgcaattcaaccttttattgtctaactagagtgttccaatctagtagaatattttattttgactccttctcaatgtttatgctttataacttagatggaaatggaagtctcaatacttttttgcattctgctgacctgaatgtacttctttgtcttcctggtgcatgcatctgtgtgttctgtcttccagataatgcatattctaatgattcgtccttgtcttgtaacagtgtagtcttttcaagtgtaattgtgataacctcattagatataaacctcattaatcattaaacactttagatgctgattacatcagggttatctctttggtgtccctctgctttagttgtctcagcagttggatggcttattagggatgttgtgcgtagatgtagcaccagctgatggagcatcgattcagcaaactttaaaactgcttgaagagaagctgaaaagtgttggtaagcagattttaaaaatgctgaaacataaggtttttttttttttaaatatcattaccatggttagacaattaagtcaacttacactgaactaattagtattattttcaggaaacagaaaaatagtataaaaagattttattcccttgaggggttataatttatgctgaaaattttatttttcatcgttagttagtcactcctcccttcactgggcctttacccttgcctgtttacccagctatatctacaggtgctgtgtcttgcatatactatgaacaattatttgtagtgcatgcatgaactgtaattagctgtgaaatgttctgtggtaaatcctgtatgcccaaaattgtgttttatgcaatgatttttgttgttgctttatcctaaccttgtgaaaaaatagttggtttggttttttggttcttgtctcaccaaactgggaatattgtcagattacccattctccaaggagtggggtacatttacattaaggggtccagttacattaagctgatgtaggcttgatgtcatttgacatcaaggcctttagaatttttctacagcaggaagcacagtgaactttcctaaaaggtcaggatgtgacaatgggaaggtggggagtcgtatcaaggggggacaaaaggggaaatggcaatggaagagaggaaacaggaacttaaggcagagaactagtaaaaagtggttgcacatgactaaaccaaattattgaaaactgccttagggaattggtttgaaaaatcacacttgtactgacattttacttgcttacagcctttgttattttatttttttgagatggagtcttgctgtgttgcccaggctggagtgcagtggtgccatcttggctcactgcaacctctgcctccccgattcaagtgattctcctgcctcagcttcctaagtagctgggattacaggcacctgccaccacgcccggctaatttttgtattggtagttatagtagacatggggttttgccatgttggccaggctggtctcgagctcctgacctctggtgatctgcccacctcagcctcccaaagtgctgggattacaggcatgagccagcgcacctggccagcctctgttattttaacagatggtatgcataatacatatttagtgtttaatatgacaaatgaattttcttttaaaatattagttttcttgagccacagtctttgtttaaaaaaaaaaagttcctttacacatgtaatttggagaattgtaaatataccctaattgttgcttcctatggtatagaagctagactgtatctttagtcacaatgttcaacatcctttgacattgatgatacattgctggagtgtcttaaaattttgcaaggcttatgcgcttttttaaacaacatgtttgccttgttctcctataagttggacagcataaaagcaggaagaaaaaacagaaaattgttttctattagaaataggaattttcatatttttcttctgctttcattttttaaaagtaattattgtctatggaaacccatgttttcaaaattccctttagggagaatttggcatgagagagagctccaattcgagttacatttaaagggttttattgcttgaaatgttcataggatggagtcttgggattccatcccaaggtggtttactgtacaaagctcctatacttgggatccaggtacaatatctgatgagacgatttgtttgagggagggaaagcgccttagttgtgtaagagattaaatctagtaacttttgttttagatgtgggattgcaaggtttgcgtgaaaaaggtcaaggtctcctggatcagatctccaatcaggcatcctgggcctatggaaaggatgtaaccattgaaaataaagaaaatgtggaccacatacaaggagtgatggaagatatgcagcttagaaaacaaaggcaaagtttgaccgttaattactttttactaaaataataacaatattagttaaaatgaagttatataacattttatatacagacaaaacgttcttaactgttatatagaagacatgtagtaggtttttggtgaatgtgataattactgtatataattttactaacatagtaataatttattcaattattaggtaccattttcctttttattgggttgtaaaaatttcaattatactcaactatttcaaattccatatccccagtgtagtctatgactcttctgctttaaaaaaaacttactgaagaataattttgctttttaaatttcatttagtttagagttgccattaaacttgtcatctacattgatctgtttcttcatctaaacttacagaatgtcacacattcattgttctcatatttgctgtaggaggattaaacagtggactagtgatgtttagtttcattttctataaaactaggaattcaaaagattctttgaaaactcagtttgcaatagcaactacaaagtattgcaaagtaaaggattaaaattatgcaatatacacaatctagcatggttatatgaaattttgcacacttaaaaattttatgatcatcaacaaaacttcacagaaagcttccttctgcatcacagagaaaacagtcatgaggcagaaatttcttccctcatatctgcaaacttacttttattctgtcaccacagaggatgatagagctctccgtttatatcaaaaaatatcaaagctgagcttccatttaggctctgattctgatcaccctcctgactcctaactccatcaaatcccattctctactctggttcctgccctcacttaaatgcttaaatttctcctgttttaaaaataataatcacacatatgggtacgtcttcctcttcaactctttgtcttttagcattagaactcttcctcacagctaagtcatttggataggtttacggtacattcatactacttcccccactacctccaatttattttcaactcttttcagtctgacttctaccctaactatttcattcagtgttgctcttaccagcattaccaacgtaataaatgctgtatcttacttaaagttcagagaatacttttagtcttgacttgcttaactgtgattagcgttaggcacaactgacttttcgatttcatctttcttgaaaacacatttatgatccttctctgtttcttcttggtttttgtcactgatttcttggccactagctaaagttactgcttccagggtttgttctgaggccagattcccttctttatatattctccctggacattctcactacttgaattactttctttaatagatcatggtttagtagttacagctctcccgtgctgtagacccataattccaattgcctacttagtgtcgcctgcgggatgccccatgtactgctgaaatctagtgtattagtccattcttgcattgctataaaaaactacctgagactgggtaatttttcttttcttttcttttttttttgaaacagagtctcgctctgtcactaggctggagtgcagtggtatgatcaaggctcactgcaacatccacctcctgggttcaagcgattcttctgcctcagccttccgagtagctgggactataggcgggtgccactgcacccggctaatttttgtatttttagtagagacggtgtttcaccatgtcagccaggctggtttcaaactcctgacctcgtgatccgcccactttggcttcccaaggtgctgggatcacaggcgtgagccaccgcacccggccgagactgggtaatttttaaagaaaagaggcttaatgggctcacagtcccacaggctgtacaggaagtatggctggggaaacctcaggaaacttccactcatgatggaaggtgaaggggaaacagacacatcttacttggatggagaaagaggaaaagagtgaagggggaggtgcggcacacttttaaacaaccagatctcatgagaactcacttactgacatgaaaacagcaagggggatatgtgcccccatgatccagtcatctcccaccaggccccttgtatttattagtccattctcacgctgctatacctaagacaggataatttataaaggaaagaagtttaattgactcacagctttgcagggctggagaggcctcaggaaacagaatcgtggtggaaggggaggcatctaatcacatcccaccaggctcctcctccaatattgggattacactttgatgttagatttaagtggggacacaaatccaaaacccagatccaaaccagatcacctagtatgtccagactggaatcattttcctctaaaacttgctctccttttttaatttcctgcctaggttaaagttaccatcagctaccaaacttgagatttatcctaaaatccttcatctttctcatcccttatagcttaatcaaatgtccaggttctgctgtctctgaatctcaaacatttatggtcaagatcttaaactcttatctgcctctggcctggctactctccagctttttgtatataagtgtaattttcataaagtacaacaattgtgtaaaacttccttcagtgacttcctgtttgctcagatggagtttgtcttcttggaataatgtaggagacccttcataatccaattcttgcataattttatcttctataacattcccataaaatcacacagttgtttttatctccctgaaagcatcatgctgtttcatgcatccatgactaagaatacttgtttccttgttttctgctcagtgaattcctacttactcttcaagactcagggatacttactttactttaggaagcctttttggacttctaaggcaagttagtcacttgctcctccctactctcataaaacattttaaatagctttataatagtacttataacatctctgcaaatgggagcatcttgatagtagagaccatatcttatattttccccagcacacattatctaatacctgaatacagtatatgtatgataccatcttcatcaaagtggcctacattgttttttagtttcatatttaaaaaataattatcacttcccttcagtccattgtagaattactttaaccaagttgaattttaatgtcatgttatagcttttattcagagcatctttatttttttttaaaaaaaagccttgtgatacctacttctatattgttattaagctttctttaaggacatcaagtatagtagagcacagtgtctggtaacatattatcggtatttgagactgcagtgggagtcccccatcccacctgcagtacgcagaatttcatggaaatgaaggaaatggaccagagttaagttaggttaagttgccttaaaaatttaaatggttatattatccaaaaagaccacaatgagattaaaaaaataatttgaattgtgtttctctacacccagaggtcagtagagtttttttgtttttttaagccctccatctagtttttaagaatgtagatggagggttttaaaaaaaatcagaattaaatattattttaggtactataatataatgaaaagcgttaatgtttaaatgtttctttagctgggcatagtgatgcacacctgtagtcttagctacttgggaggctgggatgtgaagatcatttaagcccaggagtttgaggttatagtgagctatgatggtaccactgcactccagcctaggtgcttgagtgagaccttgtctcaaaaaaatatcatcctgtatttgagaaacattacacttttatccttgaaacttgtttgatgctaaacagcaatggagattttttttgggttttagtgtactattgtccttacattttgctttaatattttgcagaatccatgctatctttaagagggtttgtcattgagtatcatttgggtattttgatgttttgatgtaacattgatataaatatccctaaaattcttacaaatcaatacaaaatacttgcattctccattgtttaggactaagtattttagtgtactataaaatacatgtaccaaatgatgatgttacaatagtaatcaataaaacagaaatgatgagttaaatttatgtttgggttcattagatgtgaagacatggtagatgtgcgaaggttaaagatgcttcagatggtgcagttgtttaaatgtgaagaagatgctgcccaggtaaggagcagtcagctacattatgtagttaacttttcttagaagattgattttatctaactacaaacaaaagtgtacttttcatggtcctaaaaaagtaaattcttgaagtcaggttctagtttatctatcttgttgaagaatacactttggtattcccagctagttgattgatctcatttaacttaattttctcaatgaaatcctctataatcctctattgagctagagattgggatcgtttattatttattattgttgattaggttgtcagttacatccaggataaaatctggtggagcacactgcattttgctctcttgcatctgcaagagaaatttcaataccagataaacaatttgatatattttgtcgttatcatcagagaacatcatttcagttagatatagataaaatttttgattttatgtagtaacacaaatctgtaatgcaatcctgatggatctacatacagaaatacatgatcttttattatgtgatattaattttaaaagaatgcttttcttcagtatgtcttgccttcagatttaaagaattttgaggagtaggacaggtcattaattcatgtagcttatcattgaatgaaataagcttttaagactttaggttataattaacggatttattaatcacatgatagtaatctctgtataaatgacattttgatacaataagtaaagagttctgaatccagcttcattgttatgtctttttgtttaggcagtagaatggctaagtgaacttctggatgctctgcttaagactcacatcagattgggcgatgatgctcaagaaacgaaagttttgctggaaaagcatagaaaatttgttgatgttgcacaggtgcaaaactggttatcttccttttccacaagctcagtgtttgaatagctttctgcatgattataatgtaactttaccttccaagtacaagaaggttagttttgttattccagaagtgtcacagaattaagaaaatgtcagctggtgcatcaaaactagcctgcataaacttgagagggtttacgtttccctgaatacatgttctgcatggtccctctgatttatgctatgtattacggcatttttaaggcaatccaactgttcatccacagaagttaatatgaaatggatgttaatatcagtaaataagaaacctcactttctgcatcacactagtgttagcataataatacagaacttttttgtggtgaaaagtgtctttttttttttttttaagacacagtcttcctctgttgcccaggctggactgcaatgatgcaatctcagctcactgcaacctctgcctcccaggttcaggcgattctcatgcctcagccacctgcgtagctgggattacaggcaccggccaccacgcctggctagtttttgtctttttagtagagatggggtttcaccatgttggccaggctggtcttaaactcctgacctcaagcgatccacccgcctcggcctcccaaagtgctgggattacaggagtgagccaccgcgccaagccaaaaagtatcttattttccctaataatgagttcacgttttaacagatgtagtttcctatatggaatataaagtgcctaatttcacctacttttgaaagtagttttgattaattcataagcagacattctttctggccagtgaaatttaagcagactgcgatgggggaaacagaataaagtggggaagcctaacagaaggagacttttttctaattaaaaattttaaaacaatttttgtttttttgagacaaggccttgctctgtcaattaggatatgatgtttcagcacaatcatagcgcactgcatcctcaaactcctgggctgaagtgatcctcctgcctcagcctccaaggtagctaggactacaggcaagtgtggccaaactcaactaatttttttcatttttttagagataggatcttgctatgttggccaggctggtcttgaactcctaacttcaagcaatccacccacctcagcctcccaaagtgctgggattacaggcatgaatcactgtgcctggccatgaaacttattataaactaacaaaaacatagcttcccctttattacttatacacacagatgatttgtagtaataagtgccactagatttattcagtattgatttctagtagtgtcacttaactgtaacgacaatcttcctgcacactttccccatccttctcttaagaattcttttattacaattttatgtttccttttcttttttagagcacttatgactatggcaggcagttgctacaggccacagttgtgttatgccaatctttgcgctgcacttctcggtcatctggggatacacttcctcgactgaacagagtatggaaacaatttacaatagcatctgaagagagagtacatagattggaaatggctattgcatttcactcaaatgctgaaaaggtttgcttgtgtttttgaaatgttattctcagtggtattgattatatgtgtttaaaatatgttaattttagtaatgtaactatatgactaatctatttttcaatatttatattagttccgttgttacggtttgtttagatataatacattgccttagagagttcaaattaaatttccttaatccttaccagtgctggagagccatgattggagaaatccagaaccacctggtagtcttcttctctttacacttctctcctcaccaagcctggtgtccagaatatgccctctgttctttagagtatcatgagttcaatctctttcgttatgcctggaagggaaactttttgctttggcaactgctattaattgtcacacattttttaaaaggcaccttgtgattttataaagtcgggacattaaaaaaataagaataaggacaaaagtaaaatgcttttttatatgtgttctttaaagattcattctagaatttattattcaatgaattaaggtcattaatttcagaaacaaaaaataaaatatgcagggttatttggacacattttcaatagaacttttttcttactcttcatagtaagaatttattctacccaagccttacatatccattctgaaaaggaactttattatgtagttaattttgttttgatctcttacaataaaagtttatatgtagggaatgttcgatacactttgagatattagcaaacctaacttgatccatggaacagatgttgcaaggaacctcaggaattaaagtttctatctgagttatgaagtacatctgttgggaagggtccatagttaactcattctcagctggtcattgaactccgtagatcagtgtttgattaacatgggcctaatgatgataagtggaagtatacaaaatagtgtaacttgtttatctactgattgtttcaatgagaattttttattattatgaagtatactattaacatagaaaacataccacaagtattctgtgcagtgagatttcataaagtgaacacacctgtgtactcagtgtactgttcaaaaaaaacagaacattaccagcacccagaagctccccccaccctgtgtaatcacagtactgctcccccaatcacctcactgtcaaagggtgacaattggcccaatgtctagcaccactgataacttttttttttttttttgagacagagtctcactctgttgcccaggctggagtgcagtggcatgatctcagctcactgcaggctccacctcctggagcttgttgtacaaacctaagtaaagccctttgttatcagatattactttcctcttgactgtattctattttataccataagcataaatataaataaccacaactataagcaaattgtatagtataatgattagaaaaatatctaaattaaatcttgagttttaaaatacaaaaatgtccgttcatgagtaatgctgaagtaaacatgattagataaagtgtaatgcaaaaaaaagttgtaaaaatgaatactttttattctctctctcaaattttgcagttcttgtggtttaatttaaatggtaatggttagggtggagtgaagaacagtatctcatcaaggactatagagattaccatatttgaattataacctaatcattttatggcagttaactcaagccagcagatcagttgttaaatattatcatctagctgagttgtcacatcagttatttatttgtactctttgttgttttttatttatataatttttcatttgtaatgtctatatgctctttgagaacacagtctatacctccttcaccttccagactgctacataaacataaactgttcaataaatggttacttaatataaatgaaagaatacttcttaaggacagattgaacttattttccaaatagtagtctagttattttctttcttggaaatcaccatattgttagtaggaattatgtatttcattttgtttgtttgaatttcttgaagaattttgccaataatagatcaatcttatatagtggtatacctgaagatgctaagaacaagaaaatgcctttaatctaccaaatttgtatgagcttgattccatttctgtgtctttcttttctctctttttttttgtggggtggggtgatcctctgaaactgcagacctgtctgtgtctcttgattgatgttgctcttttatttgttgcagattttgcaggactgtccagaagagcctgaagctattaatgatgaggagcaatttgatgaaattgaagcagttgggaaatcacttttggatagattaactgttccagtagtttatcctgatgggtatggggcatgttcttataattttattttttattggtgtggtcttaaagtgaaatcattaaaagaggaaatctattctttaaaaagccaagtaaattaggtttggtccacatctttaactcctacgatgaattagtttaaaatgaaaagaaatccacacctcttagccacagtaatggtacttgccaacaacagatgcgttacttcttgacagcttgttgtagaatgatcattgactagattaagacactgggttctagccttggctatgatggtggggaatagtgtgacttggggcttcattcaggaaaaggaagaggggacaagggattgatgtttagtgagttcacaatatatgccaagtaccaagtgaaacatttcaccttcattacttttgaccaaagaggaccaaaccagtatgattattcctgatttacaaatgaagaaactgaggcccacagagattaagtaaggctctcaggatttcacagcttctaagagttagcataaacttacaatctcaggtatgtctgtgtggctccaaacccattccctttgtactgtgttatatggcgttctaatttctttatgtgtgaaggaatggggtcctgattatcttacacctttccatttcaaatagtgataaaaatatgaaataatctgatgcaaaataaatggatcaggaaaagaatcaggaagagcttcagccgggcgtggtggctcacgcctgtaatcccagcagtttgggaggccaaagcgggcggatcacaaggtcaggagatggagaccatcctggctaacacggtgaaaacccatctctactaaaaagacaaaaaattagctgggcgtggtggcgggtgcctgtagtccagctactcgggaggctgaggcaggaaaatggcatgaacctgggaggcggagcttgcagtgagccgagatcacgccactgcgctccagcctgggtgacagagcaagactccgtctcaaaaaaaaaaaaaaaaagaatcaggaggagcttcatccctggtgatttagacctgattcttactgaaaataatttagagataatccagaggatatttaattcaaatgatagagtaaccaaaccagtgaataaaaatacaagtacctttaacgttgtggtatagtgtgatgagtctgtgcactctggagccagaggtctcagctctaccacttactcactgtaacaccttgggcaagccacttaacctttgtgcctcaattccctcatctaaaaactgccatgtaacactcataccttcctcaggttatgggggtgtgggaattacctgagctaaataagtataaagtacttaaaacagatctgacacataataagcactgctactactgtgccatgatcttccagtgattatttgggattgatattgaaaagatggcattttattcccttgaaataatattattcatagtctatacttacgttatctcaagccccacctaaacttgaacaatcagaggtagcctaaagtcacctaaagttgtattacacatctgcaataaaagacaacaaaattcagctagtagcagaattacaggcgtgcttctggttgttccattccaggatcccttaccctccctgattcctacatttcacagccagttgtcacacagtcagtctcctgttctacccatgtcagcctaggaacacctctccctggtatgcttgcttcagcttctcgtctgtgtttcacagatagtccatgtgtcatttcctcatccatccttttaagataaaagaatgttagtactatatattcaaagttcacacccacctttaatattttggaattgctgttttattccactttatattcatattaaaacttatgtatatctcttttaggtattttgctgaattaaatatttcccaaagttgtgtgtagtgttttccataattattaatataatggtaatctgtttatgccatgtatagtttgtttgacaggttagacagatttctcttttataccttctcctggtaaaataaaagagattgatggtctctctggattcactgctcaaagacctaggttcaaattctggtttttccctgggtgaccttgcttacatcatttaacttgctaggctccacttttctgatctgaaaaataaagagattaacctgataatttctaagaaatcttccagctctaaaaatattctgtgattctgaatacagtatctttgagagtagaataaaattaataattttatctgttaatgtaccaaaaaatgtcataacattaaaaagaatatttattttgcttgccagctctatagacaagtggtgtccccagccggtagcactcaagtacctgtataaattttatgtttgtgcatccttctggacccacatatttccagtgtttcattgttcaatttgttgctattatcataactacacatgatataacctttataccatcaatatatttttctcatcatgtcttaatgtattttatgccattttaaaaaatgtttttcctgctgaatttcctgctcaaacagtatgatcaccgatgaactgatatttacacataggctatctcatgtagattttttatggtaaatttttgcttctatttgtattcactgcagttaatagatttgtattaatctgaggtttttctgtgtgttttgatttttagaaccgaacaatattttgggagtccaagtgacatggcttctactgcagaaaacatcagagacaggatgaaactagttaatctcaaaaggcagcagctgagacatcctgaaatggtgaccacagagagctaatagctaccagctacctacagatttgcagttcataatcccgcatgttgtcaacatactacagcattagccaccacaccttaagatgcatttcacagccaaaataagtctcatttcttttcatgacacatttctctttacatgttaacaccttgctactaccaaggcataattacttaacatgcttcgaggctgtagattccaagtatcttaaaagaaggaactataaacattgcactgaaaacttgctttaaagctttacctgacctgtcagtttgtagacaaacaactgataataagctttgaatggtgctaataagagtaggaattctctctattaaaaagaaaaaaaaaagttgcccttcctccacaggtgatttagtaaatttagacagtagttaaactcttgttagtagacagtggtgtcctcaaaattttactttgtaattcttcagaattgattatttttattgtgtcaatacagagaaagcctttcagatctttgatatatcatagtcattaaaagaccttttcctatttgtattgataatgtattaaaagttgtttgtgcttaataaaagacttctttaaacatcttatttaatttagtagttacatcctatttccaaacatgagtgccttatttaaaagggcattcttaggactgtgaggatggtttaatatttgttttttcatggtggttgcatgtattttagacaggaaatacatatgtaagcatgtgtatataataaataagcatgttttatcatgaaaaattattgtgaacaatttagatctttaagaacttattaataatggaatactatttctaatttttctctttttcaacttgaaaaatattctcaaaattattaactaccctgaagatactttgtctttaggggaggagggctgaggaagaaggcatacataattacttcagtgtaatcctttatatcagagtaatctttcaggaactaaaatagcaattgttaataaaatttagtttctcattatagtctaaaagcaaaataaattctgaagtagtccaataacagaactgtatgacccctttagaaataaaatttatcatgaaatgctagttcttttaagtttgtattaagtttaaatggtaaaatgcatataatttaaattttatgtatttttatttcagaacattttttaaaatattaaaaattattttttagtcttgtagtcattacaaaattataaacgagttgtatactggttcctttttgaggtctacaaacatgctcgtgtatcttccaatgc

SEQ ID NO: 571 - DNA, 217 bp, Homo sapiens
gagaaaccaaacatgtttatgaaattaacacgttctgaaagattagcacatccaatctatggtaaattttagcaaattcaaaacagagtgaagcctgaactgtcattttccagcatctcatcactaagggaaggttgttttcaactggaaataactaattcctttatgctttattatttaaatttctgtttaagaataatgtgtagttattattttt

SEQ ID NO: 572 - DNA, 677 bp, Homo sapiens
tgcttttcaggcaacctgaaatggttttttcttcgagtacctgtaaagtactgactctgaagcaggagcgccttaatagttttataaactcaatcaatagaatgaattttttcttttctccctttctttctctctccttccttcctgcctttctttctctcccttcttttcccttcccttcccctcccctccctccctccctccttccctcccttccttccttccctccttcttggtcttgttctgtaacccaggctgcagtgcaatggcaaaatcatagctcactgtaacctcaaactcttgggctcaaggaatcctctggaaagctttttcaaagagatggtcgtaggtcttctcctcaaagatgtttaaaaatgggatcaggctgggctcagttgctcatgcttgtaatcccagcactttgggaggccgaggcaggcagatcacatgaggttgggagttcgagaccagcctgaccaacatggagaaatcccgtctctactaaaaatacaaaactagccaggcgtggtagcacatgcctgtaatcccagctatttgggaggctgaggcaggagagtcgcttgaactggggaggtggaggttgcagtgagccaagatcgcaccattgcactccagcctgggcaataagaatgaaacaccatctcaaaaaaaaaaaa

SEQ ID NO: 573 - DNA, 677 bp, Homo sapiens; identical to SEQ ID NO: 572

SEQ ID NO: 574 - DNA, 339 bp, Homo sapiens
aatgactggcaagagtgaagagaaaatctctggcaaggagaggctagtgagggttggagaggagacagcagaacagatgagagttggggtaccttatgaaaaagggaattaagtgaaaaaaataataatggatgttgagattctccactccccgccttctactcccccaccacttccgaaccttgttgctcctctccaaatggctggcagcttgcatatttttagggcagggctaagtggcacagctcctgaggagtctttcatacacatggttatgggaatgacgtcccctggagtcatgcagggtctagtttgcactgtcatacgtaaaggtcccgg

SEQ ID NO: 575 - DNA, 10149 bp, Homo sapiens
cggctctgctccactctgctcagctccgctccaggaaggccacctcctcctccccctcctcctcccgctgtcaccactcaccgctcataacctcaagggggtggggaccccagggctggacacaccccaccgtggccccagagctcagccggtcgcacggacggacagttggaagccggaccccagagcctgaggtgggcagtgtgccagggtcccttgcggcctcctcaaggtcagtgccagctggggatgcagctactctggggctcttgagacttgtggggcacaccccaggccctcatcccaaatcacaggccccaaaaggggctttacccccggggcatctggggcaggcaggaccaggggaaagggtatgcccccgtgtccacaggccagccctggtctgggggtctatcaggagaggccccaggctgggggccagctccttgcagaggcctcactggggacaccccgcaccggccatggggagctaaaattggaaagtggcgagtgggaggcagctgacaaagctatttcacgggctcttcaccatgctccggtttcaagctcctgctccattaacctgatccccagggcctctccacccccacccaactgatgaggaggtgcctccaccctcaggccgacagcacagccatcaggctggcagcctctgctgtgggcaggggcagtggtggtcttctcttaccccagattccagaggggggtcactgagaaacccaatcctgaagggaggcaggcagaagtctgtcccaggtctgccatgtgaccttgacaggtccctgcccctatctggcccatgacccctccatctgtacgaggagaccgtcggctgctggggggcccaggggagatggctacagggctggggatgaagatttaggggaggatcaagggtgggcaaaagggccacatcagccacctcttggccccgtcagcccaagagttgcctggacatgttccctgcttcctccctttaatttgggtcctatgtctgtatccatggagtccttgggaagcccctgagccaggctgaagcgggataggaagggtaaaggtgctagctgagccgtagtacggcccagcagttctccaggggacaagctaggcccccgctggagggagtggtgagactcagccggggcctgattctggtcagcaccttggacagcagccagtgccctccctggccccgcctggccccgcctggccccacatccgctactcctgggcacctcctcaaatagcacagcctccagctggtgcccagggcctgaatacacagagcgctgagagagtggggcagtgtggtcacggacacaggcagggactgggatgtgacaggctggagctcagggacttgttgggggaatgggggtcagtgacaggctggaggcttaatgcgaggatggaggcttggctctaggggcagcacctggggtggtcatgggatctcagggaggggagtgggagtcagagaaagggtcttagagaagctggggctttgtgaggagctaagggagactcactgatcgaggtggggaccctgcaggcagaaacctgactgtagtgatagaggtggggtttctccgcacgcaggtcatgggggccttggcaggagcggttttggcagagggtggggccggtgcctctggaaggtatgaagatgtaaatgaaggtgagggaggcaggctgcgagtgagggctctgcgggcaagagccttgatgggtggggtgggggcaagagcagcagctgggatggggcactggtgttcggtggcctgtgaactgtggggggcacaggggcaggcagagtgatggtacaaggtccccaaggggctggaggggcaatctctcttcagagtgggtccccactggggtggtgggaccatgaggtggggctaggcttggctggagactgtaattccctcacccaacctgtctccccagccctgtccaggctatgggcatcaagacagcattgccggcggctgagctgggcctctactctctggtgctgagtggggccctggcctatgctggccggggcctccttgaggcttcacaaggtaatggctgtgccccggggcaggtggacaggacccttcttcccctggaggcctcagggttccaaccagcaaagccagaaagttacaggctccagacctagggtactccttctagaacacggctggatctcccttttcagcccggggttcccatctcagatagtcactggaggctgggtggagccaggttcagtcacaggaacacagagatgcagagacactgacagagagatggacacagagtcacacacatagacacacacacacacacacacagaggcctggacccagacacacacacacagagacctagacccagacatacacacacacacatcccgacacacacacacacacacagagacctagacccagacacacacacaaacacacagacatatacacacaccccccaacacacacacacacacatacacacacagagacctggacccagacacacacacacagagagagacctggatgcagacacacacacaaacacacagacatatacacacacaccccaacacacacacacacacacacacacacagagtcctggacccagacacacacacacagagacctagacccagacatacacacacacacatcccgacacacacacacacacacagagacctggaccccgacacacacacaaacacacagacatatacacacacaccccaacacacacacacacacacagagtcctggacccagacacacagcgagacccagaaagaagcagatgcagcaccaaagagactcagacccgtgccccgttcctgatgccctcgctccccagggtggggcagccttgtccacgggggaaggtggggcaggggatgtgaaggcccctctccctgaggccacactctgttctcagatggggcccacaggaaggccttccgggagtctgtgcgacctggctgggagtacattggccggaagatggtaggtcccccacatcccagggtccctcccatcccgaacccttctctgctctctgctgttccagatgttggcaagtaacagagagcttctcacagctctggggcctctggcttgagcttcagtgccttcagcttctttactggcccctcctgtatcctcctgggacatcaagtttgcccgggccctgctcacttgggaaataggtcgcattagtggagtgtgcttcagtggagcctccagcacctccttcccagaaacaaagcagtaaagggggaatggcaggcaacgtgcggaggagagggggagcttcaagcgacccggcagcccccatggtgcccttcactcctctctaccctcctgcctcggtacttccttcacagaggagtgtggagacctgcaggcactgctcttgtgtttgcataaagaggacacgttgggtttggctagtggtaaaaaataattattattattaaatttaaaaatgataataataaaagaagaacatgaaggctgggaaaggtgctggggctctgaccagcccaggttccagctcgtcctgtcccctctcccaccctcacctgccccacctccttctgccccggactgccccaggatgtggctgacttcgagtgggtgatgtggttcacctcctttcgcaacgtcatcatctttgccctctccggacatgtgctgtttgctaaactctgcacgatggttgccccaaaggtgagctggacctgggccacccagcctctccctgccagctcctctttcaccacaagggttgtgggaaccccctcctggggtcacgcccccatttatatggcgaaactgaagccttctccctgcccacagctccgctcctggatgtatgctgtgtacggggccttggctgtgatgggcacaatgggcccttggtacctgctgctgctgcttggtcactgtgtgggcctctatgtggcctcgcttttgggccagccctggctctgtcttggccttggcttggccagcctggcctccttcaagatggaccccctaatctcttggcaggtgtgaactggtgcaggggtagagggtgtagggataagatcccaaacctctcacttcatccaaagtccttgcaccccaagtatccccaagtattcccttcactttccacctgtcttcaagcctttgggtatgtcctggccacaaggtgagcacctgcatcacaggaggaactatccagatcatcccctgctcctcgcattgctgggatagagcagtggccaaagttaactggctctggaagagaggaagggacaggaccaggctgggcccctgtgggaagctagggagtggggaataggttttccagagacaggaggcaccctagtgagctggtggcctgttctttccccctccagagcgggtttgtaacaggcacttttgatcttcaagaggtgctgtttcatgggggcagcagcttcacagtgctgcgttgcaccagctttgcactggagagctgtgcccaccctgaccgccactactccttagctgacctgctcaagtacaacttctacctgcccttcttcttcttcgggcccatcatgacctttgatcgcttccatgctcaggtgaggggacaccctgtgggcttctagaacagggctgaatctcccttttcagattggggtttccatctcagatagaattccccaagcaggctgtatccccatcctcaggcatgattccaggatgaagccgtgtctcccctccctcctcagaccccaggatggggccacctttcccctccagcagggaccccagggtggagacatgtctcttttctcagacaggactcccaggccacgaatgttcccttcccactcaaatggggctcccaggacagaactgggtctcccatggctggctgtgaatcctcctcagactccagggtgacctctgtctccaccctcaggcaggactcctggataaagccatggctcctcctgccccaagtagttggtgagcccccctcagacagggctccccaggcagggcttgcctcttccctcagacccttcgcatccccccaggtgagccaggtggagccagtgagacgcgagggtgagctgtggcacatccgagcccaggcaggcctaagcgtggtggccatcatggccgtcgacatcttctttcacttcttctacatcctcactatccccagcgacctcaagttcgccaaccgcctcccagacagtgccctcggtgggtccacagaagagaaatgggggcagggctgccgccccaggaaaacagaccctctgcacccccacggtgccacagtcaggggagctgaggcacgcagggcacagcacctgagggcgtgggagcaggggcttattctttctaatgcatgggtcttggcattagcttcatcctgtggggccagagcagcatcccacggaccccacccacttcaccaggcatgactgatttccacaatatgggggggtctccgtggggcgggcagagcctggtgtctccccaaggaagtggtgggacagggtcttcatgggggcaggccccaggcgattggaccccaggcagtgacagtgccctgcccccagctggcctagcctattcaaacctggtgtatgactgggtgaaggcggccgtcctctttggtgttgtcaacactgtggcatgcctcgaccacctggacccaccccagcctcccaagtgcatcaccgcactctacgtctttgcggaaacgtgagtgctggccaggacgggggaggctcaccccctgggaccacaccttcccctagcctcttcccccatgcctggggagctctgcgcctgatggcaacatgcccatctgctttcctcttacaggcactttgaccgtggcatcaacgactggctttgcaagtgagtaggagtggggtgggggtggtcacagccatcctgccaggtgtctgagcagggcagtgccaagatgggtccacattttaaaagatcacccctgggccaggggaagcaaagagggcagtgaggaggtattggcagaggtctgggtgaaagatatagaagttaggatttaagtgagggccctcgaggtggagagaggtggtgggaggagggtcacacagtcagcagcctgaacaggacgtggccatgaactgtgggtgttgggaaggagaaggagatgacgctcaaattgctgtctgcagcctgggaggatggagggcagtttccagagagggcttcagtttaagaaatgtatagtcgcaatctaggagacatccctgtggaggttcagggaggtggttgggtctgagggtctgggtttctgagggtccagaggactgatggaactcagagcgtcctgagtgtgggcaggtggtttttaggctttgggagtgggtaagtcctcaggagagggagtggtgtgagaagaggagagacggggatggccgagattcagcctgcaagagctctgcttggaaggaaaaggagccagcagaaaggactggaaagagtagttggaggggcaggagaagaatcaaggtcatgtgccaccctggaagccaagggaagaccatccaggcatggtggggacagcttggtcagatgccactgagcctcaaggaagctggagaccgaggattagtgctggtgacatggaggttttcagcctttcatgggcaaggcaggagcaggtaaggagggaaagtcaactgaggagtagagaagtgtgtgatgactcctggaagaagcctgggactgcagggggaagacaggagtggctgagggagaagagggatgtgttaaagataggagagaatgggacatgctaagaagaattattcaacagagaagctggggatgcaggatacaggggtgattgatggagtgaggtccctgaagaggaaggaggtgagggtgtctagttccaggcggaggcctggcttcagtgggaggaggaggaagagaagccagtgtggatgcagaggaaagcaggttaatgtagacaagtaagggattccacctgaaggcttcagccttgtccatgaagcaggaggcacggccatcagctgagaaagccaggacagggacgtggagagaggcaacatatatgcttacccccacaacccagcctggatccccccactcatactatctctccactcatacttgtggggagataagaatacagtggcccttgcagagcaagggagaagcagctgactagagaaatcttggcactgagtacccaggtggtattggaggtggtgggcttatgaactccagcatgtgaagatgtgagatttcccccatggggcttagctgcctgggtgtagctgaggagaaagtaagtgattgggctctcccagatggatgacaaggaagaagtcaggaataagggtttttagattatttatagtcatgactcattggatataagcctgctaaggacggtggtgaaggtgggagggtcacaagatcaatgggattgaagaactgaagctggggggccaggaggtcaagaggagttgggcaaagaatgggaattagaaaggagtgaactttcaagtggtgacaaagttggggcatggccatgggtgtgggtggctgaggtggagtggagaaaaagccattggaaatgaggaggtcgaggaatggagaggctggttattcctgggtcttccacagaacttatttaacaaatatttattgagcacctatgtgccaggcattgttctaggcactggggatacagcagtgaacatggcaaagaccctgaactcatggagcttacagtctagtggggagaaacagaccataaacaggtaaacaaacataaataagataattttagagagtggtaagtgttatgaagaaaataaaattgcaatgggatagaagttgacaacagggtagaagcttctttagtcggggtctaggcaggcttctctgaggagatgatatttgaattgagatttgagtgataaggagatgtggagcagagaataccaggtagagggaacaacaagggcaaaggccttgagacacaaaccaactgtgtgggtgtaaaggtaagaaaggccagtgaggccagcatgatgaactgggggagcatggtggctgatttggtcaggaagggaacagaaaccagaccacttgggatcttctagccagagtaaagagactgagtttattcctattgtaatggggagctattcagagaggttaatcatggaagtgatgtgacctgagctacactcttaaaagatgcctctggctgctgtgtggagaatgaaccatgggggcaaaagcagaaacaagaagaccacttaagaggctcttgcaataatttatgtgagaagagtgatcatcttgactagggtggtggtggtagaggaggtgagtggtggtcaggactgagaggagccaacagaatttgctggcttgcttggatgtgggtgatgaggcaaactgagaatccaagatggcaccaaggcttataccctgagcaactgaatggatggtggtgccattcactgagatgaggacggagctgggtttgagcagggataggggaatctgtcaatcaagtgacatggctagtagcaattgcatatacaaatcaggagagactgggctaaagacacagatttaggggtcatcgtcatagagctagtacttgaaatcttgggtctggatgagatcatttgggaagtaaacgaacagagatagagaagctataatgtcccaggctgagcctgccacaatttgaagttggttggaggaggagctgctacgtgaggtcaggaatgttgaatgcacccagggtgacagtgttgaggaggacgccctgttgtgtgtcctctcccatctcatccctgccctttcccacactcccagtggcccttctcccatctttcctgcagatatgtgtataaccacattggtggggagcattccgctgtgatcccagagctggcagccacagtggccacatttgccatcaccacactgtggcttgggccttgtgacattgtctacctgtggtcattccttaactgctttggcctcaactttgagctctggatgcaaaaactggcagagtgggggcccctagcacgaattgaggtgagcagggaagacctggggctgggactggctgggtcatagagggcgggggggcactgctgctttctggagttgtccaaacacctggcccctaatccagaactttctcaccaccaccctcttagttgtcagagcaatggctcactctgtaggaatctgcccctccctcccttctatgaggaatggagcacctgggccttgccatgttggtcaggccttgtcctctctctggacctgtttccccatgtttaacaaggagggagagctgacctggggctctccgagacccagacatagccccaagacctgactggccaggtgggtaaggctgctgacccaccatgtcctctttcctttggcctcttgtcccgctgcccatgctttcctggaccggataggcctctctgtcagtgcagatgtcccgtagggtccgggccctgtttggagccatgaacttctgggccatcatcatgtacaaccttgtgagcctgaacagcctcaaattcacagagctggttgcccggcgcctgctactcacaggtgagggacaggggtgtggggatacagaaggtgccaggcatcagcctcaaggaccgtgaccttccaaaatgcctcctatctccctcatcacccctgggactcagaagggagggcccatcaagcggggagaggggtgggaagacaaaagtcgctgaggatgcagtgctgctcctgagcatctatgactccctccccacacagggttcccccagaccacgctgtccatcctgtttgtcacctactgtggcgtccagctggtaaaggagcgtgagcgaaccttggcactggaggaggagcagaagcaggacaaagagaagccggagtaggagggagcgggtagagggatgggctctgctcagctattcttgggccagatggggcctgaccgatagaataaaagacttttctacaacag

SEQ ID NO: 576 - DNA, 10146 bp, Homo sapiens
cggctctgctccactctgctcagctccgctccaggaaggccacctcctcctccccctcctcctcccgctgtcaccactcaccgctcataacctcaagggggtggggaccccagggctggacacaccccaccgtggccccagagctcagccggtcgcacggacggacagttggaagccggaccccagagcctgaggtgggcagtgtgccagggtcccttgcggcctcctcaaggtcagtgccagctggggatgcagctactctggggctcttgagacttgtggggcacaccccaggccctcatcccaaatcacaggccccaaaaggggctttacccccggggcatctggggcaggcaggaccaggggaaagggtatgcccccgtgtccacaggccagccctggtctgggggtctatcaggagaggccccaggctgggggccagctccttgcagaggcctcactggggacaccccgcaccggccatggggagctaaaattggaaagtggcgagtgggaggcagctgacaaagctatttcacgggctcttcaccatgctccggtttcaagctcctgctccattaacctgatccccagggcctctccacccccacccaactgatgaggaggtgcctccaccctcaggccgacagcacagccatcaggctggcagcctctgctgtgggcaggggcagtggtggtcttctcttaccccagattccagaggggggtcactgagaaacccaatcctgaagggaggcaggcagaagtctgtcccaggtctgccatgtgaccttgacaggtccctgcccctatctggcccatgacccctccatctgtacgaggagaccgtcggctgctggggggcccaggggagatggctacagggctggggatgaagatttaggggaggatcaagggtgggcaaaagggccacatcagccacctcttggccccgtcagcccaagagttgcctggacatgttccctgcttcctccctttaatttgggtcctatgtctgtatccatggagtccttgggaagcccctgagccaggctgaagcgggataggaagggtaaaggtgctagctgagccgtagtacggcccagcagttctccaggggacaagctaggcccccgctggagggagtggtgagactcagccggggcctgattctggtcagcaccttggacagcagccagtgccctccctggccccgcctggccccgcctggccccacatccgctactcctgggcacctcctcaaatagcacagcctccagctggtgcccagggcctgaatacacagagcgctgagagagtggggcagtgtggtcacggacacaggcagggactgggatgtgacaggctggagctcagggacttgttgggggaatgggggtcagtgacaggctggaggcttaatgcgaggatggaggcttggctctaggggcagcacctggggtggtcatgggatctcagggaggggagtgggagtcagagaaagggtcttagagaagctggggctttgtgaggagctaagggagactcactgatcgaggtggggaccctgcaggcagaaacctgactgtagtgatagaggtggggtttctccgcacgcaggtcatgggggccttggcaggagcggttttggcagagggtggggccggtgcctctggaaggtatgaagatgtaaatgaaggtgagggaggcaggctgcgagtgagggctctgcgggcaagagccttgatgggtggggtgggggcaagagcagcagctgggatggggcactggtgttcggtggcctgtgaactgtggggggcacaggggcaggcagagtgatggtacaaggtccccaaggggctggaggggcaatctctcttcagagtgggtccccactggggtggtgggaccatgaggtggggctaggcttggctggagactgtaattccctcacccaacctgtctccccagccctgtccaggctatgggcatcaagacagcattgccggcggctgagctgggcctctactctctggtgctgagtggggccctggcctatgctggccggggcctccttgaggcttcacaaggtaatggctgtgccccggggcaggtggacaggacccttcttcccctggaggcctcagggttccaaccagcaaagccagaaagttacaggctccagacctagggtactccttctagaacacggctggatctcccttttcagcccggggttcccatctcagatagtcactggaggctgggtggagccaggttcagtcacaggaacacagagatgcagagacactgacagagagatggacacagagtcacacacatagacacacacacacacacacacacagaggcctggacccagacacacacacacagagacctagacccagacatacacacacacacatcccgacacacacacacacacacagagacctagacccagacacacacacaaacacacagacatatacacacaccccccaacacacacacacacacatacacacacagagacctggacccagacacacacacacagagagagacctggatgcagacacacacacaaacacacagacatatacacacacaccccaacacacacacacacacacacacacagagtcctggacccagacacacacacacagagacctagacccagacatacacacacacacatcccgacacacacacacacacacagagacctggaccccgacacacacacaaacacacagacatatacacacacaccccaacacagacacacacacacagagtcctggacccagacacacagcgagacccagaaagaagcagatgcagcaccaaagagactcagacccgtgccccgttcctgatgccctcgctccccagggtggggcagccttgtccacgggggaaggtggggcaggggatgtgaaggcccctctccctgaggccacactctgttctcagatggggcccacaggaaggccttccgggagtctgtgcgacctggctgggagtacattggccggaagatggtaggtcccccacatcccagggtccctcccatcccgaacccttctctgctctctgctgttccagatgttggcaagtaacagagagcttctcacagctctggggcctctggcttgagcttcagtgccttcagcttctttactggcccctcctgtatcctcctgggacatcaagtttgcccgggccctgctcacttgggaaataggtcgcattagtggagtgtgcttcagtggagcctccagcacctccttcccagaaacaaagcagtaaagggggaatggcaggcaacgtgcggaggagagggggagcttcaagcgacccggcagcccccatggtgcccttcactcctctctaccctcctgcctcggtacttccttcacagaggagtgtggagacctgcaggcactgctcttgtgtttgcataaagaggacacgttgggtttggctagtggtaaaaaataattattattattaaatttaaaaatgataataataaaagaagaacatgaaggctgggaaaggtgctggggctctgaccagcccaggttccagctcgtcctgtcccctctcccaccctcacctgccccacctccttctgccccggactgccccaggatgtggctgacttcgagtgggtgatgtggttcacctcctttcgcaacgtcatcatctttgccctctccggacatgtgctgtttgctaaactctgcacgatggttgccccaaaggtgagctggacctgggccacccagcctctccctgccagctcctctttcaccacaagggttgtgggaaccccctcctggggtcacgcccccatttatatggcgaaactgaagccttctccctgcccacagctccgctcctggatgtatgctgtgtacggggccttggctgtgatgggcacaatgggcccttggtacctgctgctgctgcttggtcactgtgtgggcctctatgtggcctcgcttttgggccagccctggctctgtcttggccttggcttggccagcctggcctccttcaagatggaccccctaatctcttggcaggtgtgaactggtgcaggggtagagggtgtagggataagatcccaaacctctcacttcatccaaagtccttgcaccccaagtatccccaagtattcccttcactttccacctgtcttcaagcctttgggtatgtcctggccacaaggtgagcacctgcatcacaggaggaactaccagatcatcccctgctcctcgcattgctgggatagagcagtggccaaagttaactggctctggaagagaggaagggacaggaccaggctgggcccctgtgggaagctagggagtggggaataggttttccagagacaggaggcaccctagtgagctggtggcctgttctttccccctccagagcgggtttgtaacaggcacttttgatcttcaagaggtgctgtttcatgggggcagcagcttcacagtgctgcgttgcaccagctttgcactggagagctgtgcccaccctgaccgccactactccttagctgacctgctcaagtacaacttctacctgcccttcttcttcttcgggcccatcatgacctttgatcgcttccatgctcaggtgaggggacaccctgtgggcttctagaacagggctgaatctcccttttcagattggggtttccatctcagatagaattccccaagcaggctgtatccccatcctcaggcatgattccaggatgaagccgtgtctcccctccctcctcagaccccaggatggggccacctttcccctccagcagggaccccagggtggagacatgtctcttttctcagacaggactcccaggccatgaatgttcccttcccactcaaatggggctcccaggacagaactgggtctcctatggctggctgtgaatcctcctcagactccagggtgacctctgtctccaccctcaggcaggactcctggataaagccatggctcctcctgccccaagtggttggtgagcccccctcagacagggctccccaggcagggcttgcctcttccctcagacccttcgcatccccccaggtgagccaggtggagccagtgagacgcgagggtgagctgtggcacatccgagcccaggcaggcctaagcgtggtggccatcatggccgtcgacatcttctttcacttcttctacatcctcactatccccagcgacctcaagttcgccaaccgcctcccagacagtgccctcggtgggtccacagaagagaaatgggggcagggctgccaccccaggaaaacagaccctctgcacccccacggtgccacagtcaggggagctgaggcacgcagggcacagcacctgagggcgtgggagcaggggcttattctttctaatgcatgggtcttggcattagcttcatcctgtggggccagagcagcatcccacagaccccacccacttcaccaggcatgactgatttccacaatatgggggggtctccgtggggcgggcagagcctggtgtctccccaaggaagtggtgggacagggtcttcatgggggcaggccccaggcgattggaccccaggcagtgacagtgccctgcccccagctggcctagcctattcaaacctggtgtatgactgggtgaaggcggccgtcctctttggtgttgtcaacactgtggcatgcctcgaccacctggacccaccccagcctcccaagtgcatcaccgcactctacgtctttgcggaaacgtgagtgctggccaggacgggggaggctcaccccctgggaccacaccttcccctagcctcttcccccatgcctggggagctctgcgcctgatggcaacatgcccatctgctttcctcttacaggcactttgaccgtggcatcaacgactggctttgcaagtgagtaggagtggggtgggggtggtcacagccatcctgccaggtgtctgagcagggcagtgccaagatgggtccacattttaaaagatcacgcctgggccaggggaagcaaagagggcagtgaggaggtattggcagaggtctgggtgaaagatatagaagttaggatttaagtgagggccctcgaggtggagagaggtggtgggagagggtcacacagtcagcagcctgaacaggacgtggccatgaactgtgggtgttgggaaggagaaggagatgacgctcaaattgctatctgcagcctgggaggatggagggcagtttccagagagggcttcagtttaagaaatgtatagtcgcaatctaggagacatccctgtggaggttcagggaggtggttgggtctgagggtctgggtttctgagggtccagaggactgatggaactcagagcatcctgagtgtgggcaggtggtttttaggctttgggagtgggtaagtcctcaggagagggagtggtgtgagaagaggagagacggggatggccgagattcagcctgcaagagctctgcttggaaggaaaaggagccagcagaaaggactggaaagagtagttggaggggcaggagaagaatcaaggtcatgtgccaccctggaagccaagggaagaccatccaggcatggtggggacagcttggtcagatgccactgagcctcaaggaagctggagaccgaggattagtgctggtgacatggaggttttcagcctttcatgggcaaggcaggagcaggtaaggagggaaagtcaactgaggagtagagaagtgtgtgatgactcctggaagaagcctgggactgcagggggaagacaggagtggctgagggagaagagggatgtgttaaagataggagagaatgggacatgctaagaagaattattcaacagagaagctggggatgcaggatacaggggtgattgatggagtgaggtccctgaagaggaaggaggtgagggtgtctagttccaggcggaggcctggcttcagtgggaggaggaggaagagaagccagtgtggatgcagaggaaggcaggttaatgtagacaagtaagggattccacctgaaggcttcagccttgtccatgaagcaggaggcacggccatcagctgagaaagccaggacagggacgtggagagaggcaacatatatgcttacccccacaacccagcctggatccccccactcatactatctctccactcatacttgtggggagataagaatacagtggcccttgcagagcacgggagaagcagctgactagagaaatcttggcactgagtacccaggtggtattggaggtggtgggcttatgaactccagcatgtgaagatgtgagatttcccccatggggcttagctgcctgggtgtagctgaggagaaagtaagtgattgggctctcccagatggatgacaaggaagaagtcaggaataagggtttttagattatttatagtcatgactcattggatataagcctgctaaggacggtggtgaaggtgggagggtcacaagatcaatgggattgaagaactgaagctggggggccaggaggtcaagaggagttgggcaaagaatgggaattagaaaggagtgaactttcaagtggtgacaaagttggggcatggccatgggtgtgggtggctgaggtggagtggagaaaaagccattggaaatgaggaggtcgaggaatggagaggctggttattcctgggtcttccacagaacttatttaacaaatatttattgagcacctatgtgccaggcattgttctaggcactggggatacagcagtgaacatggcaaagaccctgaactcatggagcttacagtctagtggggagaaacagaccataaacaggtaaacaaacataaataagataattttagagagtggtaagtgttatgaagaaaataaaattgcaatgggatagaagttgacaacagggtagaagcttctttagtcggggtctaggcaggcttctctgaggagatgatatttgaattgagatttgagtgataaggagatgtggagcagagaataccaggtagagggaacaacaagggcaaaggccttgagacacaaaccaactgtgtgggtgtaaaggtaagaaaggccagtgaggccagcatgatgaactgggggagcatggtggctgatttggtcaggaagggaacagaaaccagaccacttgggatcttctagccagagtaaagagactgagtttattcctattgtaatggggagctattcagagaggttaatcatggaagtgatgtgacctgagctacactcttaaaagatgcctctggctgctgtgtggagaatgaaccatgggggcaaaagcagaaacaagaagaccacttaagaggctcttgcaataatttatgtgagaagagtgatcatcttgactagggtggtggtggtagaggaggtgagtggtggtcaggactgagaggagccaacagaatttgctggcttgcttggatgtgggtgatgaggcaaactgagaatccaagatggcaccaaggcttataccctgagcaactgaatggatggtggtgccattcactgagatgaggacggagctgggtttgagcagggataggggaatctgtcaatcaagtgacatggctagtagcaattgcatatacaaatcaggagagactgggctaaagacacagatttaggggtcatcgtcatagagctagtacttgaaatcttgggtctggatgagatcatttgggaagtaaacgaacagagatagagaagctataatgtcccaggctgagcctgccacaatttgaagttggttggaggaggagctgctacgtgaggtcaggaatgttgaatgcacccagggtgacagtgttgaggaggacgccctgttgtgtgtcctctcccatctcatccctgccctttcccacactcccagtggcccttctcccatctttcctgcagatatgtgtataaccacattggtggggagcattccgccgtgatcccagagctggcagccacagtggccacatttgccatcaccacactgtggcttgggccttgtgacattgtctacctgtggtcattccttaactgctttggcctcaactttgagctctggatgcaaaaactggcagagtgggggcccctagcacgaattgaggtgagcagggaagacctggggctgggactggctgggtcatagagggcgggggggcactgctgctttctggagttgtccaaacacctggcccctaatccagaactttctcaccaccaccctcttagttgtcagagcaatggctcactctgtaggaatctgcccctccctcccttctatgaggaatggagcacctgggccttgccatgttggtcaggccttgtcctctctctggacctgtttccccatgtttaacaaggagggagagctgacctggggctctccgagacccagacatagccccaagacctgactggccaggtgggtaaggctgctgacccaccatgtcctctttcctttggcctcttgtcccgctgcccatgctttcctggaccggataggcctctctgtcagtgcagatgtcccgtagggtccgggccctgtttggagccatgaacttctgggccatcatcatgtacaaccttgtgagcctgaacagcctcaaattcacagagctggttgcccggcgcctgctactcacaggtgagggacaggggtgtggggatacagaaggtgccaggcatcagcctcaaggaccgtgaccttccaaaatgcctcctatctccctcatcacccctgggactcagaagggaggcccatcaagcggggagaggggtgggaagacaaaagtcgctgaggatgcagtgctgctcctgagcatctatgactccctccccacacagggttcccccagaccacgctgtccatcctgtttgtcacctactgtggcgtccagctggtaaaggagcgtgagcgaaccttggcactggaggaggagcagaagcaggacaaagagaagccggagtaggagggagcgggtagagggatgggctctgctcagctattcttgggccagatggggcctgaccgatagaataaaagacttttctacaacag

SEQ ID NO: 577 - DNA, 802 bp, Homo sapiens
actttgagcaacaaccaaacaaaaaaagtctgaaaattgaaaagggactcagatttgagagaattgtccccactccccaccatatctttcctagtggcccttgtggcatttgggaagctggccccagggccaagtgctggtcttagctcagtcagcttcctgtccctcacgtgggctggccttgccaggtgccctcccctgccacccccctcagacacagtggagctggcctcaggctgtccaaccacagatccatgggacttccctagccctccacccctcttgccatttccgcacaccacactccctgcagaccctgctgtgtgtgggtcacccagggaaggcctcacttctgagtgtgaatccagcctttctgggcctctgggggtcagggtgtctgtggctctctaatagcctctgtttatgagcaaggctcttgtcatggagtgaatcaccggatgccccctgccaccccagtgagggccagggccagcggtatgcccattttacaactgaggatctgaggccctaagaagtgggtcacaccagctcagggtcaagtaaattggctgaacctgtgttcttaactctggggtcaaaccaccctgtctgctcccttgagccattttcttggagcctcgtgagggccccagtgtgggtgcacggggttgtcgcccctgcagggcagtcagtgccaggagcttacagggctgatccaactacttggcttcctcatgtgccaggtccttcttctcccaactgcgtacagtggcaacatcttccctatgggctgtggtgacat

SEQ ID NO: 578 - DNA, 6150 bp, Homo sapiens
gacaccagatggagagcagagaccatcgaccttggcagcccaacagcagaacactgaagccccaagtcttcaacacacctgctcactgactcttggagcactgatgcagaccctgagctgcttgctcagaaggcactttattcttcctaaagaaggagacatatctgcactgtacactgcacttgatggggatgctcccatcggaaagacgagaaggctgagtcctgtggggaactttgccagcacactcagctaggctggggcagggccagcacacggcctgggataccgccctgtggttctggttcatggatcaagacaacctagggggatatggcaacactggagaagcctctagtttctcacccttgcccaaaagtccaggactaagcagcacttccctttccttggctgacgcagcccctgaggcaccataactggatccaggtagactctggcctctcctagcctcttttctggagcccccacaaggccaggccagtgagggtcgcaggatgggaggggtgcttagttcagtctgcctgagctggtcacatcttagtcaggcacagcacattgagccgcactggtaggaaggtggcacctgctgcataggcgatctcccgcaggacaccctcccatttcttctcctcctcgttatacctggggatgagagagagtggggacaaggatggagagcttggtcagctgagtccagagtggaacgcagcagagaggggtggctgagggcacttggcccatctctagggagatctgctcctgaaaatccccaggctctgggaaaggagaccccccacaagacccaccccaaggaacacccaccccacactccaggaagggtctttctccccaggaaagatcacctctcaaggggtgttcccatattcctcaaagttcccctccaggaaggtctacactgcccacaccaccccatcaatgtcctctccttgagaatttccatgctccatttctactaagtctcacgtctcagcctccggcagcactgctccccaggggctgcctgcagcagtgcagatggctgcaggttcaggaaggagatgccccagaggctaaagtttccttctcccacccccacaaaggaccagccatagagagcaatggttctgaaaggccagggctccaactgtttcccagccctagtggcagccctccctccagaccaagcacccggaaggcaggagagaagaaaatccggctgctatttgggccctgtttctgtgagtctatgacctaagcttgggtctgctcccatctgcaacactgttgctgctccacagtggggcatggtgtcatctgtgcaagcccagactttcccaacaaactggtgagaaacggccaagcagggtatgttggctattcctccctacaggactccctagaagagggatccgctttgcccccagaggagcttgcccagtgccttggtaccccaccatggtgctatggggtgtcagccttgctcatgatgcccccttgcctccccagggtgggactcacctccagatgtcattgagctctgtgggaaccagctctccagactccgtctccagtgtggcaaagccaccaatggcatagagggtacccaccaggctgaccaggctgagtgagctacgctcctgtgggaaggcctcgaagggtgcccacctgggggtgtgtgagaaggtgcatcattgggatgcctcggcaagcccagtgactgtccctgccacccagcacccacagctccaactgcaaccctttgcaatccaagtcccaggcacccatgcccccaaccccattccccttccctgtccctctggtcttcccttccttccccattctcttgctcctccactttcctttccttgtcctcttgccattctatccaacctgtccagcaaagtccaccatggatctccccactgcccctactcctctcctgaactaactccaccctccaactcacaaccccagcccctagcaggcccccagccttgccctggacgcagtccttttgcccctcagcggcccctgcagccccacccaccttgcacacctgctctatccttcttctcccttcacagcccagttgttctcaatgtatcttcgctaccctggctcctgccttgggccttagtcccatcctccaaaactgaccttcctgaggtccacagtcactgcacacgcactgaggtcctacagcacacagccctgctgacgtgactttcctcacccatctcttcggcctcaccttcgtggcctccttcctggataatgcagctgcctccaccatcagggcttggacctcagctcctcccatttacactctctctcctgagggagcttggcccctccgtgtgctactgacccccagatctctccctccagctcagccctctctctcccgggtggggtccttttggacacccccaggtacttcaagtccacatgtcctaactggaccctcactttccctacccaatcccaatgattatccagtaaatggcctcccaccctcactcagaagcatgtacttctccccctctcacccccacatccaatcaatagctaagccctgtttctcccacctcctagactcttgctactcaaagtgtggttcatggcccagcagcgtcagcatctcctgggggtgcgttagaaatgcagacttacaggctttcagccctccgcataccgagaatcagaatctgcactttaaggcgatccccaggagatttgcatgcccatcacagtgtaagaagccctggcctgtctttgtccggtgcatcccctcaaccccatctccgctgtgcccccagctccaggcctttatcacccctgaccttcctgacccctgggaaatccctaatctgctctctatatcagttgccatgaagtactttagtagaacacagatgagatacagtccctctcctgctggcccccgctccagccccagcaccgccatcccaactccatcacccacccacctccacccagctggagcaacaccttccctcctataggccttgagttttttctccaaactgcctcagcaccacctttccttagtctggggcaacctcctcccaccaccctcaccccttttgcgagctgagtccaactgtctctcagttcagttttctcttttctgatgtcccaggcagggcagcttctgtcttgttcactgctatatcccttgcaccaggccattgcctggtatgagtccctgaatgaggaacctggcatcccctcccccagccctgggagccccctcctgcagaccaggctggccataacccttgccccgcctccccacctcactgctgatcaggagagaaagcctatttctatactgatgtccaaagtcaacactggagacccaagacagggactgcagctcctgctggggctgacagaagcccaaagccatgcagttgtccttggcggaagggacaagctttcatacttgttgtctgtgatgctgtacacttcggcagaactggtcagccctgtgtcggtgaccccagctgccacgataatgcggccatcatggacagtggccccaaagagtgagcgggcggtctgcatgggtgccagctccttccactcaaacttcttggggtcatagacgcacatcttgttcaggcacttcctgtggggtggagggtggggatgggtggagagaagcaggagcccagccacgcctccctgcaatcacctgccggggcagccaggacaaacccctgacagcctctgggagattctacctctgctccacagactcactccaggcccagcctcacctgtcactgcctttgccgccaattacgtagacaaggtccatgtgggagagcactgtgtggccatacaccacgtaaggcagcgggtccgattcaccccatttgaatgacctggaggagacgggagtgggggtgggggagggcacccatccaggctcggctcagtccctgtctctgcacccatccgcccatccacctaacacatattcgagatgcgtcagatccattgctggaacttccgaggcctctcagttctttgatcccaccctgccccccaacctccccgcccttacccaagcccaccttcactctaagcacaaggctctagctccaaatcccaccccaggccctagaccagctgcggcctccatgccccactcacccccacggagctcagccccaccccagccatgctcacagcctgtcgtagcacatgaccgagtccaggcagcgctcgccgtccttgatctctctgccaccgaccacgtagatggagttgagagcttctcccaggccaaagaggcagcggggcgagggcagcggtggcatccccagccactctgagtccagatggtcaaactgcaggccaggtgtccagtcagctaccgccccccactcccccagcctcagcccagccccactcagtcccactgccccagatcacggaggaggtcgggaacccaggtagggccaatacagcctggaggtgccctgagaaacagtgcccctcctaccatcaggctgagagcagatgagcgtcccccacacccaggcaggctcctggcaaccaccattatagcaggcggtagggcaccacagcacagaaatgagggggagctctgtgagggaggtccagctatggccttgctttcccaggctgaacaactcccaactgaggcctgcctgccccctcctctccaccccatcccactgttcaggaaacttccaaatacggccctgccttttcgccctgtaaaatctacagtccacagccttgtccacctccacagctttataattaagatattaatactaggggttcatctttttggaaagttttctgagggctgagcaccttgctgatgagcactttataagcatcatttaaccttccaacaaccttatcatgcaggaaggagaatatccccagttacaaacagaggcccagagagaataaacaatgtgcccacactgctgagctagtagctggtgaagctgccctcatcccccagtgcaaccgtaaggcctgtgagcttaaccctggcaccaagcgcctgtcacccctcttgctgatcaggcctccctgagcacaccactcaccaggctcagccccagttctatcccttgcttaccgttccttggccggaaacactgccatcttccccttcacatctccaaatcccaccccactggcaaggctcaaacttatatggccagtctccaggaaactgtctctgccctttgagatctcacagtcacaccccaactcagacctggcactccactctgctgatacctcctgggcctcagtttcctcatctgtacaatgggaggaccatacaggattgttcctttgtctgggacactgctgtgagctccgggcctggccttcacgcagaggccctgcccaggatcctcacaccgaccttgctgctccttactgtgccccaccccaacccctgtgcagggccagggcctccaacatatgccaacttggggctaccacacccctgaaattaagataccaaagttatgctgctttttggcagctgcctattgactgtcttcaaccttcaagtaggtggctatcagtcaacctccccagtctacatctcaccctagacccagtggcattcacttgtgtagacacaagccccttctgggccccaagactgtccacagtgcctagagcccagcattagctggcggctcccaaggctggtcaggcacctgcaggaagtatgcgctcatggggtcctctttgttgtcttcgttgtagaagaggcctccagccacgaagacctggttctccttggtaaccaggctgacgtggttcttggggacctggttggagagggaagcacagtagcactcgttggctgctggatcgtaggccacagcgccctcctcactgatcatgaagatgagatcctgcaggaacatgccgaagcgcagggtgtcattgaggatcccaggaaggatacgttcggcctcctcatcctcctctgctttggctttgcttgtgcccttatcagcctccttggccccggctccatccttccccttctttttcttccgcagcgtggtgatgcggccctcgtgtgca

SEQ ID NO: 579 - DNA, 1672 bp, Homo sapiens
gacaccagatggagagcagagaccatcgaccttggcagcccaacagcagaacactgaagccccaagtcttcaacacacctgctcactgactcttggagcactgatgcagaccctgagctgcttgctcagaaggcactttattcttcctaaagaaggagacatatctgcactgtacactgcacttgatggggatgctcccatcggacagacgagaaggctgagtcctgtggggaactttgccagcacactcagctaggctggggcagggccagcacacggcctgggataccgccctgtggttctggttcatggatcaagacaacctagggggatatggcaacactggagaagcctctagtttctcacccttgcccaaaagtccaggactaagcagcacttccctttccttggctgacgcagcccctgaggcaccataactggatccaggtagactctggcctctcctagcctcttttctggagcccccacaaggccaggccagtgagggtcgcaggatgggaggggtgcttagttcagtctgcctgagctggtcacatcttagtcaggcgcagcacattgagccgcactggtaggaaggtggcacctgctgcataggcgatctcccgcaggacaccctcccatttcttctcctcctcgttatacctggggatgagagagagtggggacaaggatggagagcttggtcagctgagtccagagtggaacgcagcagagaggggtggctgagggcacttggcccatctctagggagatctgctcctgaaaatccccaggctctgggaaaggagaccccccacaagacccaccccaaggaacacccaccccacactccaggaagggtctttctccccaggaaagatcacctctcaaggggtgttcccatattcctcaaagttcccctccaggaaggtctacactgcccacaccaccccatcaatgtcctctccttgagaatttccatgctccatttctactaagtctcacgtctcagcctccggcagcactgctcccacaggggctgcctgcagcagtgcagatggctgcaggttcaggaaggagatgccccagaggctaaagtttccttctcccacccccacaaaggaccagccatagagagcaatggttctgaaaggccagggctccaactgtttcccagccctagtggcagccctccctccagaccaagcacccggaaggcaggagagaagaaaatccggctgctatttgggccctgtttctgtgagtctatgacctaagcttgggtctgctcccatctgcaacactgttgctgctccacagtggggcatggtgtcatctgtgcaagcccagactttcccaacaaactggtgagaaacggccaagcagggtatgttggctattcctccctacaggactccctagaagagggatccgctttgcccccagaggagcttgcccagtgccttggtaccccaccatggtgctatggggtgtcagccttgctcatgatgcccccttgcctccccagggtgggactcacctccagatgtcattgagctctgtgggaaccagctctccagactccgtctccagtgtggcaaagccacaatggcatagagggtacccaccaggctgaccaggctgagtgagctacgctcctgtgggaaggcct

SEQ ID NO: 580 - DNA, 802 bp, Homo sapiens; identical to SEQ ID NO: 577

SEQ ID NO: 581 - DNA, 22008 bp, Homo sapiens
gcggttccaagtgtggagaaagcggctctgggtctaggtagtgtgcggagaggggcgcggggtggaattgctgcgggaagtgggaaactggaagtgggaaactggaagtggaatctggtgctccggaaagagacgttcccaacttctactttctccccagattgagggatactccccctttccaccatgggcaagaagggcaaagttggcaagagccgacgagacaagttttatcacttggcgaaggagacgggtgagtccggattcgctcagtctgcgagcgagcgagcgatctctgcccggttcgcctgctctttgcgaccattatgtacctctcctgcagaaggggtggtcggttgcgaggccggagaaatcctactagtgaagcagtttgcgcacttggttgttttgtccaggttaccgttcccgatctgctttcaagctgatccagctcaatcgccgctttcagttcctgcagaaagcccgagccttgctggacctgtgtgctgcgccagggggatggttcgtaacactcgccacaggttgctcctggtggccgctttctgggttctgagctgggatggcttccagtttcactgcgggaggggaacccgaatcccggtcctcttgggggccgtttcctttcttgattgcagagaaagggcttggaatacgtgcctatgatatgctttggccagtacacgtaacaccagggatgagagatcagttgccaagagggggaaaaggatggctctaggtttttaaatttctgttccttttataggctgcaggtagctgccaagtttatgcctgtatccagccttattgtgggtgagtaacggacagctctccttggtgttttaaggggtgggtgtataaggtattttgtcctgtatttctctcctccctgcttgaagcaaccttttagaatactctgacctgatttcttccaggagtggacctggttccaatcaagcctctccccaatgtggtgactctccagcaggacatcacaacagaacgttgtaggcaggtaataggagtctctctcttccttccccctttatacggaaacatctacatccctgaaatcctctaaaggcaagtttttcctttttaccgtgctttgagcacgttcttgcctgacatctgtacgacaagacctatggcattcgtagtgtccactccaggctttatttagagtcagggataaaggtgtttggaattgggagaagggcagagatctttagtgaagtcttctcctgtgaattcagtgtcagactgtaatctccatgaaggtagagacatactgtttttgtttactattgtatctcctgtgcctggtactgcatttggcccatgatgggcactcagcaaatgactagatggacaaatggctgaaccagggccattccagtgtttctgtttccatagttccttttcttctctttaggccctgaggaaggagctgaagacctggaaggttgatgttgtgctcaatgatggggcccccaacgttggggctagctgggtccatgatgcttactcacaaggtacagggagtgtggtgcttggagatcaggtgatggtggaggtgggcgcatgccctcctgggctgcagagtgcgtcaactaattgtctctatcctacagcccatttgacactgatggctctacgtttggcttgtgactttttggcccgtggtggcagcttcatcacaaaggttttccgttctcgtgactatcagcctctgctatggatctttcagcagctgttccgccgtgtccaggccaccaagccccaagcctctcgccatgaatctgcagagatctttgtagtctgccaaggtgggcatcatttcctttctcttgatccaggctcccaactcccaaagcacactttttaatatatcctgtcatttttaggattcctggcccctgacaaggttgacagtaaattctttgaccccaaatttgcctttaaggaggttgaagttcaggctaagaccgttactgaattggttactaagaagaagccaaaggtgtgttttggggaatggggtcactcttgggtcctggaactctagggaggttgggcctggtgggtcctacaggtaccttagaagggcctgaccaagcttctctcttttccttcctaaggctgaaggctatgctgagggtgacctcactctctatcaccgtacctcagtcactgacttcctccgagctgccaaccctgttgacttcctctccaaggccagcgaagtgagtctccagccttgagggacatgaggtagccccagaaacatggcctgaggatctcccctgacacctttccatcctcccaaacagatcatggtagatgatgaagagttggcacagcatccagctaccactgaggacatacgggtgtgctgtcaggacatcagagtgttggggcgcaaggagctcaggtatggagtggggtaggcacgggggccaggagccctggaggcagggaaaggccatgatgttggacctctgggaagaggatattgctgtgctaaaggtttgggatgggggcctgagccttttgatttatgtagccgaagcccgaaaggtgggtagtgagcctaaaacagaagggggcggggacaaagagggagatggcaagatcagtaatagtatctctggggcaggtcgctactaaactggagaacaaaacttcggcgatatgtggccaagaagctgaaagaacaagcaaaggcactggacatcaggtgaggagagaacgcagcgaggcaggtgtggactgggtgtccaggggaaaagtctgggaaaataacccaactcttgggactgttttgccagcctcagctctggagaggaagatgaaggtgatgaggaggactcaacagctggaaccacaaagcagccctctaaggaggaggaggaagaggaggaggaggaacaactgaaccagaccttggcagaaatgaaggcccaggaggtggcggaattgaagaggtgaaaggagctggggtagagcttggagttccccaacgcagggactgtgtgaagatgggagaagaaaatgcaaggcatggatagaaactttggagctgggccggttttactccctcaatccaccccctcaggaagaaaaagaagctgttgcgtgagcagagaaagcagcgggagcgtgtggagctgaagatggatctgcctggggtttccattgcagacgagggggagactggcatgttctccttgagcaccatccggggtcaccaggtgaggcggcattgggggtgcaggtttaggagacagaaggatctgtttgggtgtttggaggtggggggtgttgaatgtctttttaggttgccgaacgataggctgtggttgctgtcttcaccacagggtgccttggtgagtataaggccacaaagaaacataaaccaaaaaggatgagttaggtagatagatgagtgtgatagatttattttttttttttttgagacggagtcttgctctgttgcccaggctggagtgcagtggcacgatctcggcccactgcaagctccaccttccaggttcacaccattctcctgcctcagcctcccgagtagctgggacaacaggcgcctaccaccacgcctggctaattttttgtatttttagtagagacggggtttcaccgtgttagccaggatggtctcgacctcctgacctcgtgatctgcccacctcggcctcccaaagtgctgggattacaggcgtgagccaccgcgcccggctgatagatttattcttgaagaactagaacatcagaaaagaacttaggttatagtagatgctgccaggttacttgagtttcaagcacagatgaatagaggatctccctcagaggggagcagcattctttagttcattgagaccaagtgagcactcgcattagggtacttccactgaatactgaagaacatgtttttcctgacaaaatcagggtcacaaacaaaatgaacttttgtggcttatgtgtgggagtgtcataatcaggtcatctttgttgtacaggagggcagtagagcatggtggccctagagcagacacaggctcaggtttccttcccagctctaccacctggagctttgtgaagtgactgagctgactaccacttatccttgctgcctcagtttcctcatctgtaaaacaataatagaacctacctactagagtttttggtgaggaataaaaaaagataggtgtaatccctcatatgtgataaacactcaagaaatagtagttggagtttttcctttgagacaagatcttgttttgtcacccaggctggagttcagtggtgccatcatgactcactgcagcctcaaactcctggcatcaagcaatcctcctgcctcagcctcccaaaatgctgagattacaggtgtgagccaccatacccagcctagtatctttaccatgaggaaaataaaaggttctgacaattggtttaagtggaacagttttgttggatgtatgttggctgggccccttttattcagtggaaacaaactgtgtagacggtattctcaggagatgattgagatgctgtctgagaataatttttaaaggaaaaccagtgttgtagaatatgttaagatttggtgctatgtgggctgtaggtaccttccttaagacctatttgtgataccactgagacaagacagctgagtgggatagatcagtaacccagcctagaacgggatgttgtaaacaggccattcactaccctggatctgagctttcccatctgtgaaaggataatggatttgccagtgttctttctagtgttgctgagcatagactgaggtgagggacacagaaaaaaaaacagtatatttccttttaaatagtttacctttgtttctgttacacttcagttattagaggaagtaacacaaggggatatgagtgcagcagacacatttctgtccgatctgccaagggatgatatctatgtgtcagatgttgaggacgacggtgatgacacatctctggatagtgacctggatccagaggagctggcaggagtcaggggacatcagggtctaagggaccaaaagcggtaaggggcacgtgtgcaccaaagggaatgctgccactctgaggaagtgttagggtgggtactaccagagcctgagtagggcagcaagggctccaggcaatctgggtctctgagccccctactttcctttgggtctacagtatgcgacttactgaagtgcaagatgataaagaggaggaggaggaggagaatccactgctggtaccactggaggaaaaggcagtactgcaggaagaacaagccaacctgtggttctcaaaggtaaggagaggccgggggcaagactgcggggagatgagtcttccttgggagaagggcagctgatgttctcctatcacagggcagctttgctgggatcgaggacgatgccgatgaggccctggagatcagtcaggcccagctgttatttgagaaccggcggaagggacggcagcagcagcagaagcagcagctgccacagacacccccttcctgtttgaagactgagataatgtctcccctgtaccaagatgaagcccctaagggaacagaggcttcttcggggacagaagctgccactggccttgaaggggaagaaaaggatggcatctcagacagtgatagcagtactagcagtgaggaagaagagaggtgagtagttgcagctgagagaagggatggaaaggaagcggtggcttgaaccatttctctaaattgggggttcttaatcttggctgcacatggggagggttaaaaatactgtactgacgatcctgatttaactggtctggggtacagcctgcatggcaggatttttgcaaattccgtgggagtgcggtctgagtagtacagagtggtggaatcactcagagtcctcccctcttcacagctgggaacccctccgtggtaagaagcgaagccgtgggcctaagtcagatgatgacgggtttgagatagtgcctattgaggacccaggtgagagctctgtatgcagtggaatgagaaaagaccactggaagtctcagtattgggaattgagctttgacctttctccttccctctctagcgaaacatcggatactggaccccgaaggccttgctctaggtgctgttattgcctcttccaaaaaggccaagagagacctcatagataactccttcaaccggtaaaggggccataaactcatcaagagtgacccagggtctggtgggtaaatgggtaattttttgtttttgagatggagtctcgctctgttgcccaggctggagtgcaatggcacgatcttggctcactgcagcctgattctccttgaatcgcttgagtcagccttctgagtagctgggattacaggtgccaaccaccacgcccagctaatttttgtatttttagtagagatggggtttcaccatgttggccaggctggtcaaactcctgacctcaggtgatctgcccacctcagcctcccaaagtgcagggattacaggcgtgagccaccgtgcccagtctggtaatttctttagaaagcctggaatgttggatattagacagatgtcctttccactcaggtacacatttaatgaggatgagggggagcttccggagtggtttgtgcaagaggaaaagcagcaccggatacgacagttgcctgttggtaagaaggaggtggagcattaccggaaacgctggcgggaaatcaatgcacgtcccatcaagaaggtggctgaggctaaggctagaaagaaaaggagggtaagtgatggggcctccagagattgggtggggtgggggtggggggatggggaagaggtcacctgacaggttcctttgcagatgctgaagaggctggagcagaccaggaagaaggcagaagccgtggtgaacacagtggacatctcagaacgagagaaagtggcacagctgcgaaggtaatgggaggacaccacaaaggtacacagggctaaaagtgcagcagaaagcaagcctctaacctcttctcttcccccctgtagtctctacaagaaggctgggcttggcaaggagaaacgccatgtcacctacgttgtagccaaaaaaggtgtgggccgcaaagtgcgccggccagctggagtcagaggtcatttcaaggtggtggactcaaggatgaagaaggaccaaagagcacagcaacgtaaggaacaaaagaaaaaacacaaacggaagtaagcagagctgccaggctcccaggagagcatggggactaggaggaagggtgtggcatggctcagtctggcccccttgattaccggcctagcccctgctcacatcacagctgtctgaagaacagtgaggtggagtgcctagaactcccgtggtggtcctgagcagagaggaggatgtcctcctgcctgcctgaaggtctcccatgaaaacactgctgaactgtgttgacactcatgaccctttttttaaaccgttaaagggaagttcggtgttggagcgatactcaatgtagtcagtctacacctggacgtgtgggccacttaagccctccccacccccatcctattcctgaataaaaccaggataatggaagagttgtcttttctgacagttttaataagcacttccctatctgtccctacactgtgtgcggcactattcttaatatgtaccaattcatagacagaaatgacaaacgatccacaggtcccggtagtaaaacatttactagagagcaagcagaaaggaatgcacatcttaaagaaaccttcacaaagtcacaaaagtcaaagtttgtatatttcttttcctttttataaacgataaacaaaaatcatcaaaatcatttcagcaaaagacttttctatcattggggcaagttaaaaaaaatacaatgagatagaagacactttaaaagctgttgttgggtttcttgtttaattttaaatttagcaataccatctcaaacctggagcaatcctggaacagttaccaggatcaccttttcccttcaatccttgtggcttctgggaatcttcagagcctgggtctgaaaggtgtttcctacatgtctcagggctggatgcaaacctggctggggacctgagcatcaactcccatttagaatcagacatctcccttccctgcaaatgtctacaactaccaaattgctccccaacagttagctcaatggattgaatttgcagaagccaactcctaaaatggggactgcctggccatacaactaagaaaaagaagtcaatttatagatgcttataaggtgacaccttagtaaaaaatataagctacatacaatataaacctagagtgagttttgtgccctagaagaccctttatcccaagataacctcaacttacccacatgacaactcacctagagccaaaagaagcttcccagctctcactgcttccaaggaccaaaacagcttcccaagaaaacatccgaaaattccttctgatgaaggggtaatgtctccaagctccagctctccactaagggcagggggtccttacactttggaccccaacccagccctgagacacctagttaccaaaatctttctaaaaattaaggacaactgatttcacgctttagcacatcccctctaactgtcccatcgacttttcttgcgtttaggcggctctgggacagcaaagccgtcagctgtcttatctgtcttgctgtccaccttgtccatcttgctgctgtccactttgggttccatcttgggctccatcttgctctcacgattaaaagcttctttcctgctttccccattccgaccatcatttgcaccccggttctccccatgccggcctgcgcttcctccatgtctgttctccccgtgccgatggccatcagtatgacggctgctgctttctggatggcggtatccatctccatggcgaccaccatctccgtgacgtggactatcgctatgccgattgccagtctctccgtgactgtgacggctgctgccccggttctcagtatatctctctcttttcccgttgctgcccccagtcccttctcggctgttattccctgaagctgtgttgttgactccttgggctccggcagacgggtaggtcacaggggcaccactgatgttgccagtattgccaaagcctgggatgcccttggcggcactggtgacggggctgtcaggactgttatggccctgttgtgctgagttagttggaacagaattcaagctccctgcactagtccacccacttgccccagcagcagaacttccagccttctgattacttaaactggctgcaacaaagtgactcttgtactgtgactgaaagagaaagagacatcaggagtaggtaagatagcaagttcaagaaacttgaatatacaacttggcaaatgatgaggtttacagaaactctgtgctatcctggcactgtgagtttagtgtcctgatggccccacagtatggtcccttttgttcttgtgctataaaggaaaacttgtggatctctgtggagagatggacccccagtgttctgaaatgtacttttatagcctgattggctagaataaagcatctatgtatttagcacatttatctgcattcaaaaccaaaaagttctgaaaacttaaaaaaaattttcatactgcaatttaagtttgacagcaaaacctgccttgaactcattctatcgattcaccttagtgtgactatcagtaaattttgcttcagaagtgagttggaggtgggtgcctgggaggtgggcaacacttcaggctgttgggaagggagggaacacacaccctgctgcaggacaacaatcccaggccccaagtgtgactcaaagtagaccagcacaaggggttctctagatcaacttgcatttccaactaagctactgttaggtttatattcaaaatccaagcagcgtgaagaccctaaatctagcatcaagcctaggcgcccagctacaaccaggaaaactaagcccctctgtcactgcccaagagttactgctgaaagtgcttttaatgaaatgcttatttcagacctggaaagctgctttcattgccgttagtcgatctcccatagctcctgtggaaggcttgtaggcctcataattgctcattacattgttatttcctcgatcctaaaaaaataaacacatctatgagaatgaaaaaataagcaggaaagctcactgctatagactaggcctcattatgaaaacccttgaagtgggagctacaaaggaactggatacttttagaaagctgctactgctttgtgagaaaagacacagtgacaatcatttaaaaatgcttatgccctcaacccagaaattctatttctggaaattaaccctattaaacagaaatgcaatcagattatgcccaaagttgatcatgtatttacataaacacttccaattaattaagtaaaaattacgttaaagatgaaaaggccctgaatagcatattgtgtgactgctcaggccctgaatcaagaccatgaagggtctgaatttcggcttgaacacttgtcactgtaaccttaggtgcctcagcattgttatctgtactaacttccattcagttattttgaagattaactgagccaaaacatctgattgcttggaatggtcctggcacatataaagtgctcaataaatattacctattattatgcatcatcatcattattattataatgtgggaacagagtatgtaattacaaagatgccaagtttaatgctccagaaaagtatactggcagctttcttccctggcttggaatcaaggtgacagaaaacaggcagttaagaaaggccaccaaaagggtacatttgttacctggtttgtgagaaaaactagctcccgacttggaaattcctgatccgttcctgagtttaatgacaagatatggctagactttacagtgaccctttggcaacatttacctagcagcaggctttaggccagtgttgaagggcttataaaaccagactgctgggccccaactccagagtttctgattcacaaggtctggggttggggatgagtttgcatgtgctgctggtccagggaccacagtgtgagatcactgctaatctagaataatttcctgagcaagcctagtcaaccaagtacacaaagatgcttcttcaatagaaagttaccataagaatgagcactgcattgactcaaatcagattaaatacaaattcccttctagacagggctttaaactcactgaggctttcctgggtagatgagaatattcctaatgactttcaggacatgagaccaactataaaggcactactgtagtagtctagactcaccatgttctcagagcccaggccaggccgctccctgtagcctaggcctcctccaccaatgttcagcttttttcctttccctcctttgaatcgagatttccgaaaccaggcattctgcattgaacaaaattcaaggttaagtcaagggagggagaaaagaacagaagaagagaacgaggacaaagaggaaattaagtgggaagggggaacttttgcttaattttcagccagcactacgctaagggaggaattttcacaggaaccacagattggtttctctttggtagcataatccaccaaatttgaaaagtggctgagatccttatctaaggcttcctacagtgctccctccctcaaggctctcctggaagggaagttgttcaggtaagcttcaaacccagaggagtaactttggctacttctaacttccttgaggaaaatgagcttatattttatttctcaaaccatgtattattggacgtaaacatttggaacttaaacaactggtatgttcagaagcaaaggaaaaatgctatgtgaagtgaggcttatcagaactgactatagggacagactcccagaaaggatggtagccacacaactgaaaattttatttacccgcagagcgtaaaagttttcattgaacttgaccattgccactcaacatatttactcacattctcttaagaatgcagggcggtggctcacgcctatgaatcccagcactctggaggccgaggtgggcggatcacttgaggccaggagtcaagaccagcctgaccaacatggtgaaaccccgtccctactaaaaatacaaaaattagccaggcatggtggcacatgcctctaatcccagctgcttgggaggctgaggcaggagaactgtttgaaccggagacgcagaggttgcagtgagctgagactgcgccactgcactccagcctgggtgatagagtgtgactccatctcagaaaaaagaaaaaaaaaaaaaaaaaaaaaaagcaaatgtctctgggaaggttaaagttttatctgacaatcacatattaccagcaaaataaagtgcttgagaggtagggcagcaggcttggacaaagtcctgagcacagaaagcctgaggtacaaaaagaaatggaagaaaatgccaaagtcaaaatgtgtcctgttttaaaagtttatttaggactagctctctgtgctcaggagcaggggaggaaacattattctcttctctcctgcagtgcaggtcctttactcctaggaccagaaacttgggcactgccacattgcagctgggttgtaccagttgtgtgagctggcctaggcatttgacaaactcttaacagtttctgctctcagaaagtgttccgaacccatttgtaatttggggacagcatggattcagatgactccaggtttgatttgttagaatgcctcacttagctttagattggagcacacctggaagagggcaatcagtgtggtcagaggtctgagatctctgcaaggaacagttaagaggcaccatacaggctgggcacggtggctcacgcctgtaatcctagcactttgggaggttgaggccgaggcgggcggatcacctgaggtcaggagttcgagaccagcccgaccaacatggcaaaaccccatctctactaaaattacaaaaattggccaggcgtggtggtgggcgcctgtaatcacaactgcttgggaggctaaggcaggagaattgcttgaacccaggaggcagaggttgcagtgagccgagatcgtgccattgcactgcagcctgggcgatagagtgagattctgtctcaaaaaaaaaaggtgggggggcactatactatacacatattgttttaaaggcatcacacatttttagcctcccagaagaaaaattttgtgggggaagagcagtaaggagaatagtaaccatctttgagattaaatttactcctaagtgtgctatggggtagaaattacagcgacagattttagcacaaaggaatagcttttcaaaacagatgctgttgaaagaagaagaccagataagactagatgaattttagtatctcacaattcctatctgtacctcataagccccacatcctcctagccacccaactttcttgtcaagtttttatgttatctgttccaggactgctaaaatgtcttggtcttataaccaggagcaattgaaagtgtgcccagcccctcacctgcattgccagatctaggagttccttagaaacgtgttgattggctccttccaagttccggaccaggtcaccagcaaaattgctgtccttgggagtgagtagggtataggccacacctttctcacccgctcttcctgtgcggccaatcctatgcgtgtgggtatcaatgtctcgtgccacatcatagttaatgacagtcttaattgaaggaatgtccagaccacgggctgaaataaaaagcaaccaaattcttttattcttcatctgtagtcagaagatcaaagtaaccagaaatgctagtgctaataagccacatttcctttatctaggcaaagcgcatgggtttggtgagctgagatacaggcatgttaagtcaccaccacagattctatgatgttaggccttctagtgtaagggacttttattttttagagacggagtcttgctctgttgccagacgggagtgcagtgccatgatctcggctcactgcaacctccgactccctggttcaagcaattctcctgcctcagctttccaagtagctgggattataggcacgcgccaccacacccagctaatttttgtatttttagtagagacggggtttcactatgttggccaggatggtctcgatctcctgacctcaggtgatccgcccgcctccacctcccaaaatgctgggattacaggtgtgagccaccgtgcccgactgggacttttatcttttgcatcagtaatctgccatgccctcttctcttgcactgggaatatatatttaaaatgtgtcatgaagctgagaagttctctcctttctaggaaaaaatatcagtgtttaagggtagttattaaaacttgacagaacaaatccagaaattatattccaaaaactgttctcatcctgagttaagttgcccaactaagctgtgtatagtagatcaatgtaagggtaaggtatctactatattcagacatacaataagggcattcactgccttttttcccagagtgacttctagctgcagggattctttgattagagagaaatactaagtgaaaagtggtatctagagctccagactgtgatccctgtgctgaactgctgcttccttgggggtttgggaggggatggccagccaggccaacagtctttccatcagcctgctcagatattataggtcttatgtagtaagacagagtacccttatagcctaggaacttaatgttgttgaaaaattcatactctacctgcaacatctgtggccaccaggactgggatgtcctttttcttaaagtctgaaatgaccttgtttctctcactctgatccatatccccatggagcagcccaagattatgaccctcctgtttaaggttattcgctagctcttcagcattggcttttttagtaacaaagaggaggacactccctgaagaggtaaattctaccagacgccgggtaagccagttccatttactaggtccagaatggagaatctccacaatctgtgtcacatcttcatttgcctgagaaggaagaaatgaaacagatgattgtgacattggagccacagggcacctgaacaaggactaggcattatatttctacctgcatcgagaagaccttgaacaatcccagttctccttgggccttcagcaagtcaagtgcagctcaaaactcacctctcctttccaatcaccttgctctccacctggtgtacatacctaatttgtatgccccactactttgtagagctttccttaacaataaccatggcaagcaactgaaggattctctaagcagccataactgaattccaagtcccaattcagagtaatttttcacatagcgcatatgtacaggtaagaaatgaaacctgattttttccaggccttccaggtcaccctttccctcctgcgtaggcccctaccacaataattaaaacgtcagttccaacctaatacgctgatgcttccaggcacatctttttgtctctttgaagcctttttaaaacaattgtaagttttgagacattcaataaaacaaaaaaaacacaaaatgaacaaaatcaactcatacccatcacctagcttcaatgattcccaacattttgccagtcttgttacgtctatccccacaacttgcaaaatacccaatctcaagcatgttgcatctataaacataacatcttttttttttatctcaatagtgagaaattaattctgtgttccataatatgagaaataaacccattaaggtcccatccagccctgcttagggttacctctccaatatctccctgcaccactcgaatagggtcgatcaggatgtctctggccaacttttcaatcttcttccgaaaagttgcactaaataagagagctaaaaggtaagataaattctgttagagaaacaatatgatatctttatgcatacccattaagcttctttggcattcaggattattcagtttttttacataagctcacctgaactttaaatttagtttagaaactgattcactagggaaagatttgctcttattctatttttattacatttttagttaagacaagttgtcagtatggttcagaaaaagactcttgatttcaaatcagcagatctgtactgtacactgcttctacccactgataaaactgtataatttagggcagtttatttaatttctgatccttggttttatcatctataaaaaggaacaagttatatctagtgctaagatcctgtccagctcagataaactcattacctcccttattatggttctcaccaacagacacaagatcatttttacttccataactctgagtgcttataaaataaataagtgccctttttagtacaaatttggtttaacaaaggtgcttcatacatactctgcctgtcaggacgaacatgacttgctatggatcgaacttggtactctgcaagaaacagaacaataaaattattataacctgaaatacagtttgggaagcctggaaaaagccatattagtaaaagtcttcataagaagttgtaagaattaagaaaattagaaaccccaggccaggcacagtggctcatgcctgtaatcctagcactttcggaggccgaagcaggcggatcacttgaggtcaggagttcgcagcctggtcaacacagctatctctactaaaaataccaaaaaaaaaaaaaaaaaaaaatagccaggctgtggggtaggtgcctatcaccccaactactcaggaggctgaggcagaagaatcgcttgaaactggaaggaggaagttgcagtgagatcgcaccgctgcactgcagcctgggcaacaaaagcaaaactctgtctcaagaaaaaagaagctcctaaacatatcattcagcataaaagtgaaaaattttccctccatccaactgggctaggtctagcagtgttccaatcagtaaagacagctacgaggataggaaagcaaagggcctcgaatgatctgacattcatctacccaagaacacagaccttaacctctatgatcaaaggcatatggataaaaatgaagacagagaaaatattccccttatatacaaaggcactttgaaatttcctcaacccaataaaacctaacatacttttccagagaaaactcctaaaaatgttcatcttagctatatttctatagtctaaccccatccaggagtatttttagcttctctcatgctgaaaaaacagtctagaaagacatggaaaaaaaactagtatcatgaggatggggacagaagaaactggtattcaaggcataccaaatcccatgtcaaacattcgatctgcttcatcaaacacaaggtaagagactctttgaagattggtagctttctttttcacatgatctatcagtcgaccctataagatcaacaaaatgaacagtaagtataattaaaggcattcacagggactttctaagcagttgcactcctggcaaaagtgctaattctctagtctcagactgtaatagatactggtccaacagccacataccttatgcactacttagctcaaaggaacagaaattttgaaaactcaatcggcatcttcatttacactgtgatttaaattctgtgggaaagtggccagaagcagtttttgaggcattctaaagtgacctgatttaaagcataatgacaggtttcaatgtttaaactacactcttctaggctattctgaccatatgtatctttctgattcttgatgaacttggcaatcattttgtgggagagtataagaaaaactatttgacatagaggggaatttgtagctactagcctatatgtcacagagactctcactgaactgctaatttagccaccaatcaaaattaaaaccacagcctgccgttcatcagtatattttcaaccctgcttttaccacactttaggggaaattctctgcaaaactaatcatgttttccataccgagggaggctgagaagccatttaaacacaaggcatacttactggggtacacacaacaatctctgccccctcctgaagggccttggcctgctcccacatactccctcctccatatacggccactgatcgaagattatatgcttttccaaaccgcttacattctgcatggatctacaaagttgtgaataatatattaacaaactgtgacactaacaaatacctgtcacaacccaaacgaagttctgaaaaacagaatgtgatgtcataaaaaatcgaaacctagaacatactttaaaaccacgattttattcataaaggtataaatgaatggaataccattattgcatctcaacagattatctaaaatcttttattcattttacccccttctcttcctgatcctgtcactgcttttctaccaagataaaatgaactcatcctacagaaaaactgtcagcttataatacaaacaatccccatatcacaataggcttttcctcttaaaaaaagtagttctggccgggcacagtggctcacacctgtaatcccagcactgtgggaggccaaggcaagcagatcacttgaggtcaggagtttgagaccagcctggccaacatggtgaaaccccgtctctactaaaaataaaaaaattagccaggtgtggtggcgtgtgcccgtgatcccagcctctcggctgaggcaggagaattgcttgaaactgggaggtggaggttgcagtgagctgagatcacaccactgcactccagcctgggcaaaagagtgagactctgtctcaaaaaaagcaaataaataaaaataaataaaaacagtagtttttaggggaaaatatgtatttggttatatagaaaatatttaacacataatactttccaaaagtttcctggtagcacaacactgtgaatatacttaatgccactgaactgtacattaaaaatggttaagataatcaattttgtgtgtatcttatcacaattaaaaaaaaaagtttcctggtcattctacctcacttgactggctggtcccttgctagtccacatatggaaggaggcattctatagaaagcacatacctgctggcaaagctccctggtaggacacacaatcactgcaattggtccatcacctggttccaactccttctggtccattatatgaatcaacatgggccaaatgaaggctgcagttttcccactacctgttttggcaataccaatcatgtctctaccacttaatgccacaggcacaccctggagaaaaagtaaaatataaccactctaaaatttcaattctaaagatgtactgaagcaaatcctggggaatgataaatgactactaacatttttatttgcaatggaacaaaacatacctggtgctatgcatactggttgtgaaatagaaatatcaatatccaacattctcattaacttcttgatttataggaaatgacatcattctcattacgtggatatcagccaccacttacagaacagaaacaactccattttgtttaaaatacagaaatgaaaaatcaaggccgggcagtggctcacgcctgtaatcccagcactttgggaggccgaggtgggcaggttccctgagctcaggagctcgagaccagcctgggcaacacggtgaaaccctatctcaactaaaatacaaaaaattagccaggtgtgctggcgtgcgcctgtaatcccacctacttgggaggccgaggcaggagaattgcttgaacctgggaggcagagattgcagtgagccaagatcgcgccactgcactccagcttggacaacagagtgagactctgtccccaaaaaaaacaaaaacaaaaacaaaacagaaaaattgcaatttataatgaagggttgctaaaattttaaaaattttccccccttaagaaggtacagactatctcattcatatacagaaaatgagaatgttctgcataagaataaataaatcccatatataaatgggaaaaagaagctaaaactttcagtaatgaatgagaattttcaagtgacgaacgaaggaattctagtcattgacagtgctaaatttgtctatatacgaacctttttggttaggtttaggcctaataaattattttcttcatatcatattttcaacatacgtatcagatacaaaagaatatttgtcagccatttagtgacttcttaagagtgataaatacctctatccttatcaacaaggttctacactaaacactgttttactgctgtgatttgtttttaaattaatatagtcatgaaagactaccctactttatttttctttcattatgttttacttacctggcactgtattggagtgggctgtgtgtattcagatttccgaatctggtgcataagttgttcgtcaaacccaaaatgagcaaagctacttcctggtctaggaggtgcagcaccagagacctagagatagagacaactccccagaatgacttgtacttcaacattaacagcatttgaagttcaacaatacttacctggatctagcattttagctggagtatgaagtaaaaatacaagtctgtaagccaaaatcatacaatgaaaaggaaaaacctcaaatggtaacaaatataaacctcatattaaaaactccatgataaatattcccaagataattgtcatacaattttaaatgattaaaaatttcttaactcaaaattaattttctcataacaaataaaacggaaaaaaaattgttcaatgaattgggaagccataactgttcttttgccattttgcattaagtattaaccagatggtagaaaaaaattaatgtatcttactcttgaaatgaaaattccaagtgggctccaaataagacaagtctacacatgctggctaccaagatataatctactgcctccattttcagttatgcttgatgaattaaagtctcacttagtgatggtccagccactgtcaagccctgttcaaactgcacctaggtgaagaatggggcttataatctccattttgtcccccaaagtggtaacctttcaatgcttctctggtgatgttgatatttccaatcaggatttcaggggttttacttaaaatttttcttgggtcactggggagatgagtaacctcttggaaaacagacaagtgtacacacacaaatacacacccctcctggaaaacaggagtttaaacatcgtgtagcaactgataaggtgcacacaggcgagaaagttgtctatattagagtagatagcatagcatattttttctgtgtgtttcatttaccatctatcagcaccttaaaccaatgtagccaatgtgcagcccaaaactttctggtaggcagtttaaaccattctgaaattagtacatgcatatttttaaaaggtattagtttattctaatttttaaaataaagcatactatatgtaatttgacagacaagtttatcttcatttcaaaatattctaagatatcatctgttaacatctattccttttgtttcctcttcctttagatggggactcccacccttcatcactagcccatccagcacagaacatataaaactgactgaaatatgaaacaagaaaatgatcctatcctaaaacagcatctagaagactaaaacaatcaaattaagagacatgaacagaagggatataataattactctggcaaagacagttcagagaccattagaaaagaaattcaaggttattagtttagataaccaataatactaaatctggactaattaacattaatattaagaatattgagcttaatgatgcttacccgaagattgagcttatgccggagatctattaactgctgtggagtgaggttggttatctcttcatgctcattgtaaaagtttttttcaaatggtg

SEQ ID NO: 582 - DNA, 15500 bp, Homo sapiens
caaacctccggaggccggggacggaaggcgggcccgcagcagatcctggatccggaatctcccgggcaggagcggaatctgtcccgaaccgggtctgtgaggaactcgcgaacttggattaggaaatcccggagcccggatcgacaaatcccggaacccggaattaagatcgccaagtcccggatcgcggagcacagagcacggagtggactcgacgcggagcccggagtccggatcgcggcaccgcgggacgggacggagcgatgtcgggccgaggcgcgggcgggttcccgctgcccccgctaagccctggcggcggcgccgtggctgcggccctgggagcgccgcctccccccgcgggacccggcatgctgcccggaccggcgctccggggaccgggtccggcaggaggcgtggggggccccggggccgccgccttccgccccatgggccccgcgggccccgcggcgcagtaccaggtgagcaaggaggacgcgagcggacgggggcgagaggcgctgcgagggcgcccgggccggcggctgaaggggcctcgagtgagggccctggggaatgcatgaggaactccgggagacggtggagggcgggccgggaccctcgggctgcggcgggtcgcggtggagaagtgggaaggggaagcaggttctgcagcggagggctggaagcagctgggaggcctgggggcttccgcggcacagggattccgagtgactgggagatggaggagtttggggagccagtgaattgtggcgggtgggttgagaagtctagggtaggagggctggaaagtgatgagaaagtttgggaaagggccctcgctgagaaaccggggttaccctgcatcggccttggtcccagtccaagtctgccctgttttttctgattgggaactggcggagctctagcgtgtctgagatggctcccggctgctaataaggaggaaggagcctggcttcccacgggcacgggacgctgaggctagggccaggggattccagcttgtgcacgggcggactttactcctgaggcagggccaggcgccttcgctgggaggactccagcttagaccagagacggtggtggcctggcctgaggggaggcccagcccagtcacaggccggctctcttctgggctttctgcctcctgtcatcgtgtccgggagttgattagtctggacgtgcagagtggagccctgctggtctggggccggaggagtctgcgagagttgcttcaaagagtgctgtcctgacccctttggggttttgagagctgctcagattgcagcttcaaaagcccttgcaaagcagcgacttctgctcagtgtgtgaggacctcagcctgaccctgccagtgctctagtctgctgttcaggttgccccagagggcttggaaactgtgcccatctgccttgtcaccctctctgcatttttatttggccttcaggttctaactccaccacgtccgaagccatgtgcccaagcatttgacactggcttcttgctcatctacgggtttgctgtgggcttcctctgttttcgactcatgtctccaggcagaggtccttagggatcctcgtggagtatacacagcctacctgccccactgggccctcacttctaaggagatggcttaactagggacagtgactggatttttttttccttcttactcctcattcttcctcctttctcaagagaaaagagagtctgggtatgggcagagacagacctggtcccagggattccagctggggctcatctctcccaccttgctgtccccgttggggattcatgggcccagggtgttgctgagggctccctgcatcattcattgtagcccttgggcctgcccactgagacctggcctgggcaccatctgtgggcctttggccttggaaggacctggaacagacaagccgctccagtttccttggcatgcaagccataggaaatgtgcccttgggacagcccctgagaggatggattccacatgttttggtggggggtggccttgggcctgtggcaaggccaagctggctggctggttaggcctgggctgctagctgtgcggaagtaggagatggccctgagtctgggtttcccatcccactagctttcctcctcctggcaggagaggtagatgggaaggagaacccagccagctaactttggctgagtttgaagaggatcctatttgccttctttccaagtccagttgtatgactgccaggagaagggacttgagatctgggaaacaaaggggttcctgtctgttagggctcatgagatgcacttgaaaagtgagaatttgaggcccaagctgagcaaatagttgaaagaagggaagtgatgacctcccttcctccagagggtggttctagctgtggatcacagttaacagaggaacctaaaaaaagaaaaagaaaagaaaaaaacctccagggcaggatatggtgggctcacacctgtaatcctagcactttgggaggcccagacagaaggattacttgagaccaggagttcaagaccagcctaagcaacatagtgagaccatcatctcttaaaaaaaaaaaaaaaaatttagccaagcatggtggtgtgcgcttatggtcccagctactcaggatgctgtggcaggaggattgcttgagtccaggagttcaaggctgcattgagctatgatcctgccactgcactccagcctgggcaacaaaataacaaaaacctcagattgctgggttcactccagagagttcaaaaagttcaaaaaaaaaattttttttttctgatacggagtctcactctgtcgcccaggctggagtgcagtgacatgatctcagctcactgcaacctccgcctcccaggttcaaacaatcctctgcctcaagcctcctgagtagctgggattacaggcgcccaccaccacgcccggctaatttttttgtatttttagtagagacgaggtttcaccatcttggccaggatggtctcgaactcctgaccttgtgatccacccgcctcggcctcccaaagtgctgggattataggcgtgagccactgcacccggcctcaaaatcctttttactcatgggagagtgggtggtatgttccccaactgaggccctcaggcccaggttccaggagcatcagggccacatttggggcagggcaaagcacgctcaccggagccctggattcctcatctggggttcaggggattgatccaggcctacctggtcctgctgcaggcagggagttagggaggctcagagtgctggactgcttttttttttttctttaactcctgagttgtttttttttgtttgttttgttttgttttgttttttgaagtgggaggagttgctagcgcctataagccctatggagcttggcaaggctcagctgggacttgaactataagcagccttcccctggggccctgagtgagccaggggctctgggcccaggaaacctggagcagatgtctgggtggagcctattccagaccctgcctatgaggccttgtcttgggacttcctgttaccggagcacctgcccaggagggatgggtggtgctgcaggttttgtgaacactgcagcagggagcttcctggggaccacagggccctcgctcacctctgcaggacccactgcttcagttcttccctgtctttgtctcaggcactaggaaaaactagtctgggatgtctgggcctgggcttacagctgtagccacacttagtttttttctataatctcaggccagagaaagaacaatctttaaggcagagaaagaggctgtcttttgcctttcaacagctctgattaatctcttcctgatgcagagagactttggcaggactcccaaagccccagagccccccactttgaactttttattctcccaaacacttccgtcccaccctgctcctcctctccccatcctcacgtctgtgggtcatgtttctttccatctccgcatctggtcaagaatctgaccctctgtgttgggaacatgggtttagtgcgggatgaagaggttggggaagaatctcatctccatgatgctggggtgggggagggtcctttgatttggtacaagtctccaccctgccgggcttggttggctggttgtgctcgttgcataatctgggccctggggccagccctgtgaagctgccagggacagtgtgtgcaaggcagagctgccaaacaggccttgcaggcagcagccatggggaggcgggtgggggtggaggtgactcccagatgggctccacagaaatgtcagggagcaaggcctcaggtgggaaatccttctgcaggcatctaaagaagctatttctgtctcccactttcctgctgctcagcctgggcctctatccttgcctcccaggataatcttagcccccttctccagcttgggattgccagggctacacggagccagagccagtcctggctgccaggtggtgcctggaccactggcagagtccaggtgctagctgctctctttcccacaggccacccaggagccatagcttcccttctggggtcttctgtcataggggtagtagttgggcagtagggaggtaagaggagggtccagttctgggctgtgggtgggggctatgtgataccagactacagggtacagggtccctgtaccctgcccgaggccacccccaccagctggtacacgttccaagccatcctgttgcagccctgctcacctggggtgctgctgcctaccagacccctttctccctcggccacagaggatggggattggggctctgcgccattggcctactcatactatagtacactcctctgcctggcagtgacactgcccctgtgcctctcagccatgcttcttcttcatgatgggagaaagagaaggagggcagggcttggcaggactgtctgagagaatagggaccagcttgcccagggaatagggcacagcatgctggggctggaaggtagcaatgggccctgaaaagctccccaaggcccttccctctgcaggcaggaccctcctcccagcccaggttctggcaggcctcattcgctggcatggctgccagggcggttgcagggggcagggcaggtgtggtttacactctgtgctcaggcgcccactcccctttgttcctggggctccagcagggctctggtgtgctgctcaggccctacctggctgacgagagggatggagggcatgggctatgggtcccggagggccttgcccctgacctatgcacccccgttggctcacttcccccagcgacctggcatgtcaccagggaaccggatgcccatggctggcttgcaggtgggaccccctgctggctccccatttggtgcagcagctccgcttcgacctggcatgccacccaccatgatggatccattccgaaaacgcctgcttgtgccccaggcgcagcctcccatgcctgcccagcgccgggggtaagagcatcctgcttctctcactctgcctaactcagctctggtggtagcagagggtttccttctatcttaagagctttggtgactgaggatgactccaggctctcctgggggagagggtcctggagactggaggggcgttatgggagtgagtgtccttttttggaccattgacctcttaagtgggtttctgtcctccccaggttaaagaggaggaagatggcagataaggttctacctcagcgagtaagtgttaagaggacacctgggaggcctgcccagtggccaccttggggtgggtgtccatctctctcaaagctgggctgcagcaggaagggaggaaagagccaggctttggctgaagcaagctgatgagcttctgctaccttccttcagatccgggagcttgttccagagtctcaggcgtacatggatctcttggcttttgagcggaagctggaccagaccattgctcgcaagcggatggagatccaggaggccatcaaaaagcctctgacagtatgtgtggccctgaccacctctagccttcccaggtttccttgccttccacccccttgttttccaggggccaagcaagttgggctagagccgggtttttcacatgcaggatgcagcccactagtagagtacgaactcagttgaatgtgttggggccagtatgttttaaatgaatatatgacagtagaaaatcttaaaatacttcacagtagtacttaccatagtagtaaatggattctttcatgacatttttgtttctgataaatagatatgcagaccttgggtcataattgaaaatgtaaatcttatgggtggtggtcaaaagtttgaaaaccactagactaggggataaaggtagttcctttctccttccccttccccatccatagagaaattttcttttttttttttttttttttttctgagatggagtctcgctctttcacctaagctggagtgcagtgttgcgatctcggctcactgcaaccttcgcatcccaggttcaagtaattcttcttgcctcagcctcccgagtaactaggattacagatgcctgtcaccacgcccggctaatttttgtatttttagtatcgccatgttacccaggctggtctcgaactcctgactgcctcggcctcccaaagtgctgagattacaggcgtgagccactgcacccagccgagaagcttttcttaataataatgtagaacagtcccgagtggtgaagcctttccaggggactaggatattttggagccgtgatgggtgtttgggtttcatgtaagatgtgagccagagactggctgcgtgttactccatcatgccgtagcaccagtcccactgtgctggcattgttggtgatgcatctctttccccataaaatggtgagttccggccaggtgcggtggctcacacctgtaatctcagcactttaggaggccgaagtgggcagatcacctgaggtcaggagtttgagaccagcatggccaacatgttgaaataccatctttacaaaaacacaaaaaattagctgggcatggtggtgcgcacctgtagtcccagctacatgggagactgaggcaagagaatcgcttgaacctgggagtcagaggttgcaagtgagctgagatcgcgccactgcactccagcctgggtgacagagtgagaccatgtctaaaaaaaaaaaaggctgggactgggacttactacttctgattcccagtacctgacaaggtgcctggctggctcatggtgctcagtactgattgttgaatggttcatatgagaagatgcggtagcactgtgtcccagcatcttggtccacctccagttgtgattgcctttctctctttagcaaaagcgaaagcttcggatctacatttccaatacgttcagtcccagcaaggcggaaggcgatagtgcaggaactgcagggacccctgggggaaccccagcaggggacaaggtggcttcctgggaactccgagtggaaggaaaactgctggatgatgtgagttggggagggaggttctggagggaaggaggcctgtgtgggtttaagactgagaccaaggagtttgatactagcctgagcagcagagccagaccccatctctacaaaaaatttaaaaattagctgggtgcggtggcatgcacctgtagtcccagctactcataaggctgatgcaggaggatggcttgagcccaggaggtcgagcttcagtgagttatgatcacaccactgcacttcagcctgggtgacagagtgagattgtgtctcagaaaaaaaaagactgggccagacacttgggcgctcccagagaagtcctgccatagggaggggggcgctgctccaagcccgttggaggttgatttgtgtggttattacagtgttcctgcagatggcagtcgagtgtctcgaggaagtccctcgtgggctgcaagagggcaccatttccctgcctccagtctgcccagagtcctgcttccatccttcagggcccaggaatcttcagtatccggagctccagggctgaaatggggcttctctttcttgggatttagcatagcttgagatttgagagctcagcagcaccatctcacacccctttccatccccagcctagcaaacagaagaggaagttttcttcattctttaagagcctcgtcattgagctggacaaggagctgtacgggcctgacaatcacctggtggaggtgagagtgggcctggggcaaaagcaggctgatgtgcaggtttggcagggaaatggcctcagggcccttgggaggccctgtgttcacgcccacccccttggtgataagccatgcttccctccctgccagtggcaccggatgcccaccacccaggagacagatggcttccaagtaaaacggcctggagacctcaacgtcaagtgcaccctcctgctcatgctggatcatcaggtgacagagaccctggggtcatttctgggcccacagggacccctcaggaggggagctggttcctagaaacccttcctgtccctgccctattttcccactgttctactataagaacccgttctgactcccctccatccaactccagcctccccagtacaaattggacccccgattggcaaggctgctgggagtgcacacgcagacgagggccgccatcatgcaggccctgtggctttacatcaagcacaaccagctgcaggatgggcacgagcgggagtacatcaactgcaaccgttacttccgccaggttagccagatgccagcccccgttttctcagcccttgctttgccttgcctgctgggctactccttggccacagcctgcagactgctgccctcactggtcctggaatggtccactccactgtgcccacaagccaacgctgagcctttcgtatttcctccagatcttcagttgtggccgactccgtttctccgagattcccatgaagctggcagggttgctgcagcatccagaccccattgtcatcaaccatgtcattaggtaaatgcaaggagggggacaggaaggctcttctaagagcagattcacccttggcttgaactaaagccaaagaaagcatcaggtttctttttccctgagtgtgtgcagagaatgggccccagatttggcccaggtgggcaggatgaagtcagctatgtgccttccctccccatgtgctgcctgcagtgtcgaccctaacgaccagaagaagacagcctgttacgacatcgatgtggaggtggacgacccactgaaggcccaaatgagcaattttctggcctctaccaccaatcagcaggagatcgcctcccttgatgtcaaggtgggccctctggctccacagcttcctctggggcccaggattggggtgggctggctctgtccagcatttccatacatgtagcacctggaggacgggatgggaactctggctcagttgcttgcatgtaagctttgggggcacagtctgacacaggtaccctctccagatccatgagaccattgagtccatcaaccagctgaagacccagagagatttcatgctcagttttagcaccgacccccaggacttcatccaggaatggctccgttcccagcgccgagacctcaaggtgtagtcctctttcccgaggggactcctatgtaaagctctgggtgatttttacccacagcagttcccagggtggattagcccaggggtggggattatgctatggctttcctcctggctctttgcagatcatcactgatgtgattggaaatcctgaggaggagagacgagctgctttctaccaccagccctgggcccaggaagcagtaggcaggcacatctttgccaaggtgaggctctgccctgttttccctcctttggccgtgagtagcaaaggcctgagccacttggtttctcccttctccaggtgcagcagcgaaggcaggaactggaacaggtgctgggaattcgcctgacctaactgctcagggatctttcttcccagccctggagcctggagggagaccaccctctgggtccttgctggggccgcagacacgtaggctggggtgaggagtgtctgctgtcaccctctactctccagctttagtcttataaatgtagtgataggattccttgttgcttggtccccaaagccttatactttttgcattggctttaattgggttcagcagatgcctcctctgcccccctgcaggcaggcccaagtaggactgctggaggctgtgctttgacattgtaagacatttccgaaccaaaggctgctgggtttgcatgtttacagactccccctggggcgagggtcagagctggctctggggagctgggctaggaagaggaggtgcagcccagactcttcctagcctttctaaaccaaagttctttgccattcctacaagcccagccttgctgctggttttttcctttcctttgggtatttgcactattttgggagcaagttttctatgtgggagccactttttttgtacaggggtaagttgggggttttcagggagcctgttaggtgcctccttcttttctttcctcaatctatgcaagcggctctggccgccatcatctcctgggatgccagagggctgcctctccagcggcttgggccggggaggggacactccagttctctagcatggcctgaggtatggggtatgtgcatgtggaggccagggtaaggtgaatggggaggctgggaggactggtgttgccctttggagcttggtgaggagggtgggcctagggcttggcgagtgccacatctggcaggtttggaaatttccaaataaatccttttgtctattggtggtgcctggacctggtccttgaacagcacagccctcattaacagactggagtcctagaggacttggcccacagagctttattggagagatacacacaaaggctgtccactcacttccataatttcttgatggacatgtttttctcactgtccttctgcatgacctaggggtgggagagagaatgaacattaagttacgaacacacacatgccctagcccactgccccagagccaccactggcaaaggcacaaagatggaggcctataccttggctactgccatctcaaagtcctcctgagtgacatggactcgccgttctcgcagggcatacatgccagcttctgtgcacacgccctgaacaggaaaaggaaattgaggccccactgctgtgcccctcatctgtggcccttgagcccagagcttcctgcctctgccctgttttcagtgggtactccaattaccttcacttcagcccctgatgctcctggcatgagctcagcaatttttctcaggttgatcccccgggtcaggttcatcttccgagaatgaatcttcaaaatgtccagccgggcctggagatggcaaggaaaagcctgagccccacaccccacccccacagccagagccactttgcacagtgtccatcacaaacctcctcattggggggtgggaattcaatttttctgtcaatgcgccctgggcgaagcagtgccgagtccaggatatcaatcctattagtagccatgataacctgagcagagaaagcaagtggggatcagctaaacctcttcctcagcctgcgtggcacccaggccttccctgggcccatcccaaggatgctaccaccttaccttgatgttcttggtggcctcaaagccgtcgagctggttgagcaactccagcatcgtgcgctgcacttcactgtcccctccagaacccccctccagccgcgaggagccgatggagtcgatttcgtccatgaagatgatagatggagcatgttcccgtgccatgacaaacagctccctcaccattcttgcccctgtgtggaggccgagctggtgttagggagcttattagcttattagctctctaaccccctacccctacctcttgcttctcacattgctagccatggttaccttcccctatgaatttctgtaccagttcagagccagagacacgaataaaggtacagtccgtatgatgagccacagcccgggccaacagtgtcttcccagtgcctggaggtccatacagcagcactccctacaggggaacagcaggactcagggcagaaagctacacccctcatttcattcagtgaacatttaccgagtgctgggtcccttgctagatgttagggatacaaaaaaaaaaaaggaacatcaaggtcccttctatccaaaccacctcaccgccctaggaacacttccccagccactcttttcagggggagggccagcccaagcaagatgcagcctatcccggtgcctccccaacccctgcagtagggctggctggggcaggaggagtaagtacagcttggccctctcagagaagccctgctcctcaccttgggctgagcaatgcccagtgcttcgaagagctcaggatgcttaacaggcagctcgatcacttctttgatctccttgatctgtttgtccagtccaccaatcatctcataagttgaatctggtactttctccaccatcatcagtgacactaatgggtctaccttgttgggcaggatcttgtgcagagtgtagctgtcattccttagagccacccggcaattgggtgtcacctgggtgaagggggcgagtttcagaagtggtacagtaagagctgaccccaccaccaccaccacctcacctgctacactcacatcattgatgtcaatgtttttgtccacgtctacaacaaatttaccttcaggatgtacctaaagaaacaagggctcatgaccttccttgacagccaccaaatcactaatcctacccaggaagacctatgagaatcccacaataccttgacagaacacagaaccctgtctcccgaggctacacacaaaggggtgggaatgcagtggagaccgagctggtccctggggtcatgctgcttttaccttgaccaacactttcttcttatccatggcccggactacttcccccacataggagccctgctcctgcagcagctgtagctcctcccgcaataggcgaactagatggcaaacagacacagtggtcacctagctactcctttggagtctccaggacccaattctacgtgcatgagctaagcatcactcttattaaaggaaggccaaaggtcaaaattcatgtatttaaggaggctacaatagggctcaggaaaaagagatgcatgtgaaactactagatgatgacagggagaaaacagtaagcactgctgtgaagacacagtgcagggagataaggacagacctcagacaaactgcccacatgcggcttcccatctttctccactcacctttagcatttagttcgttcctctgtgcctgcagcctccggaggttttggctcttatcattcacaatcagctgtggcagacaagagacaaattccattattcaagggcaggagacaggaggaggtaggatcttggccaagacctcacaggtctgaatgagctgagggaagggcacagggcacctgcatgttgtttcagattctccagtatgatcctaatgaccctgccctgtccttcaagagtccctctggaccttacagcagccatcaaagaaggctgcttgtccaatactggtccaggagtaacagaatctaatggagaaaagttacagctggctcatgtaacaccaaatttcttgcaggaaggcaacaacacctggtggaaagattgttaggtgagaaacctgagttctagcccagccgctgtcaatcaaaagcaaagtaaaggtaagacaatctatttttaaaaatctagatctgttaccaaacggcacatgggtatagcatcagctaccctgcttcaagactactaaggtgaacgaataaaaacacatgaaaaagcattcaaaaatggtaaactaaacataatacctgcaaatgcacttggaattcagaattgtcttttgtggctttcccccatccaatttatattacagttgacacttgaacaacgcagggggttagggtgaaattgaaaatccatggacctgtccaaagttaaactactaacagcctaccgtaacagtataacgtaacactaacagactactgtttatgttgtctgtaaggcttactactggaagccataccttactgctggaagccttactggtaacacaaacatttgattaacaacataaacggtcctttttctatggtttagcgctttaggctagggctctgggttgcccaatttctttcattcagtctctatggaattagcattgtccagatccctcaatgatgcccttcctcacattctcacttcaccctcacccaacctcttggtgataaatttcaactcctgagcttatgtttcccttttataagaatccttttcattcgggcttcttccaaaagggttgacctttggctagaggtacctttactattaagatttgactcgaagatgtgtaacaaactgtgaacactaagaccctcaaagagatgggactggaggagaacaagagattgcttacttctgatacatacaccctactagctaagaaacaaacaagaaaggagaagcagcagcttcttccactgcactcccaaaggaattagatggatttgtggaagtccgtttccatcccccatcatcacccttcctagctccctctggagtccgtcctcacctggagttcttcaatcttggacagataatattggcggagtccgctgcctgccttcccctcctccagctccatctgaagacacagagtgagtcttaaacgacaggttaaacatccgagggggtaaagccacttgcagggcactttgaataaggcttgacaccaggtagctttgcgtagtagaaaaagtttggacttcggaggctcaggatctgggttctaatccctccctcccttggaaccctccattttcccaggactaaaataaaagaatgggaacgccgcctacctcatacgacttttaggaggaccgagaggcgatatgatatagacggggggcgctttgcactgcgtgaagtgctctacaagcccgaggtgtcagtactgacgaaggagccagcggaacggagccaaaggactggcgtcccgtctcctgcgacccgtgggccggccattcccgcgcccatcgcttccctcactcactccgcttctaccgcgtcttcctctcccagccttgccctgactcaccgagggcggcgctgacacagcagatccggtcgcaggcagcgtccagcatggactggtccaggcacctccgacccacccgacgctcctgccccggcccgctctccactcagatcacgctcgctccgcacccagccccgtaacctgccgggccgccactgcacccgccatacctgctctggtccgtcaagcgccatcttctctcttcagcagagaccgccggcatccgagccgtcttggcgcgcaagcgc

SEQ ID NO: 583 - DNA, 9321 bp, Homo sapiens
gctcccggagccctgcctgttccctgtccatccaggccagcagctgaaggagcctcacctgcctcccttctctgagtagcacggatttgaggtaagaaatcccccagaacccccattcccagtgcagcctgtggcagagatcggtccagtgtctcctccgactgccttagtgcccgctaaacgtttggggaggggagagctcggtgccaaactgctctcgtgtggggcaagtgctgagttaggctccttgggggactttacctcactgggccctgcttcctgggttctgtccttgcccttcagcttccaaacagggaagagcaggtgactactgagaggtgaggatggtggctctgggctaggtggccctgggaaaggtgggggatccccagtgcctggaggcagacccttctgaggatggtcacacgccttgtgcagcatcttggccaccccacagggctgaaggagaaggaacctggctgggagcttagttcatgtctgggttttccctccatgtccaggagaagcagcgaagatgtccagcgagcctccccctccttatcctgggggccccacagccccacttctggaagagaaaagtggagccccgcccaccccaggtagggggtcactgttcctgaggctccatattgcagccccctgccgccatggcatggttgggactctctaagtggtgatgcccactccagggttacccctgggccccatctgtgtcccaaaacagtggcctctggtcgagctcatcgtgcagaggctccagctcagtctcctctttctgcctctctctgtccaggccgttcctccccagctgtgatgcagccccctccaggcatgccactgccccctgcggacattggccccccaccctatgagccgccgggtcacccaatgccccagcctggcttcatcccaccacacatgagtgcagatggcacctacatgcctccgggtgagtggggaagggatctgaggggagcatggggaactcctggctgctgtctggcctgcgctggctgtcctcagtacaggtgggcatctgctgtagggcagggactccaacacgcccaaccagcccttgcctagggctcaggctgtgtgtggacagggactgtggacgtgggaaggtgggactgctcttattcaggctggtcaggaagggctggtccttggcacaccaggacctgacatgggtggggaggggcgccttgtgtgcaggagaggggtgggtgacccgcaaggctttccctctcttggtcatgggcttgaggctgagtgccctgtccttgcatgctggagacagacagaggagcagagggaccgggccatgtgcctggctctctgccacatctgtcatgggccccaaggggtggggaccaggaagggctgggagaatgtggccccacttgacttagggccccagctgtaaggcctcccactggcccgttaggagggcggtaggaggtctgaggcgtagccttgcacgctgggcgctgtggaccgtggggctttgcgccaatctctttgtctggtgcaggtggcaggccagtgacctctcgcctccatcttctgtgccattccaggtttctaccctcctccaggcccccacccacccatgggctactaccccccagggccctacacgccagggccctaccctggccctgggggccacacagccacagtcctggtcccttcaggagctgccaccacggtgacagtgctgcagggagagatctttgagggagcgcctgtgcagacggtgtgtccccactgccagcaggccatcaccaccaagatctcctacgagattggcttgatgaatttcgtgctgggtttcttctgttgcttcatggggtaggtggtgtgggcactggtagggtgggggctgcaccagggtcaactggctgcctctgcctcctccgcagcaggcctcagcctgttcttccctgtctctgattcagatgtgatctgggctgctgcctgatcccctgcctcatcaatgacttcaaggatgtgacgcacacatgccccagctgcaaagcctacatctacacgtacaagcgcctgtgctaacggagctgggactcgggactcccccgcctgtcagtctggccccctgtgctttgctccctgtgctcagtggtcactttcccgctcccacttggggctgggagccgtgccaccatcccctagaagtcctgtcctcttcaccctgccctacctgagccgctgactcttctggcaaaaattctgttgggatttaaggccaagggtcagtgggtggcagggggctgacaatgagcttgtgtgttgttggtctgcttggtgtgtgtgatcgggaagataagctgggaggggtctcctgctggggtcctgatgcctctgtttccaaacaaggtacaggttcagtccagactctttccccctgggaccaacagcagccagagcagttagccagttagtccccaggcctgtggccacaggcgtttctgacctgctgggccgagaatgggtaagttgtctggagtcaggtgggcccacgtaggacagggtcacaaagcctgggtttgtttctgggtactttgcgcctctggggtgctagaggtggggcatggtggctggaagtaaaactgccaactctggccctcagaactctcaggtatagaagcccaggatgtctaataccctgtcccagtgcccgagagctgcctggtgtcaggtagagaggacactgtacctgggtgaatgatcagaccctggtagctaagaaggaacttgtccctttgagtcagtgtgcagaccccctttcaggccatgcctctgtgaaccctgtattgctggggccggaaggagcccctgagcctagccccttcccgtctgccctgtgtcctcactgcgtgtgggtatgacctctgcctggtggctggtgtatcccaactgggcaagagatggcagagggtcccccttgtgggtgcgcttggatgtgcagagccttctccatggattttcttccctgtaagtgccgggcccctcaccccagctgacaggctgttgctgtgcctgctcacacctgctcctgcaggcacactgggctagggacgaggaaggagcagccacaagtggtagaactgccttggtggacaccagcctcgccctgtctttatttcctgaatggtttgtgaacttgctcacctggaccactgtatcctgccactgtccttcctggtctcgcactgccactgcatggcctcctgtcactgtgaatcgtggcccagtctcagtttgtagtttctcattaaattggccctttcactcccccgccctgggcctctgctctcttgcctggcttccttcttttttgagggaaagagggtggggctgcaggcagtctactggcaggacgggaggctgagtcctcagggtctcacaccctcagtgctgatgccatgccaactgcctgggacaacaccaacacgtaaggacctaattaaaccaaaccagagtcgggtgtagaccagccctgggatttccagctgtgactgggccagggcacacgttggtctcggcagtggctgtaaggtcaccttccttcctctgatgctggtttcaaccatctatatatggcatccacgcatgggatctgcaagctggagccctcctacccgcaggcttgagcacagcatcatccagccctggggaggcgcacccttaagcaacacagactgggctgaggctgacaggcagaagactaacagagcgcagtctgcacacgcaggttctgggcgacctctggccctggccatctctgcactaactcatctgaattatgaaggtggcagtcttggtcagtagtttaaagagtttccctactttttaaccctttttgaaataaaacttttacaggtagtagattcctattaataaaattatttaagttcatgtttctcttttagagaatgaattgtttaaatacaaatatgtgcttttttaaaacccttatttttaaatatatatatatattttaaaaaaaccttttaagtaggaaacctctaaggtatttctgagctaaaaaatagcagtgctggatacactttaaagatctttgcaagacggttagagtgactttgctttggagactagaggtgctggagagtagacccagagcaggaggtggctgctgggagccatgatggacgatgtccactccccacacagacataacatgcccttgcttctgagggactctcctatggggaggtggcttgacccacccggtgccaggaggcagggaaggaggtagcttgcaaagcccactttattgagtgctggagcatttacacagcgcggaggaggagataagctggggctgagcaaaccgcacccaaggggttagagggattctgggtgagagggatgagctcccaaggcctctgaggcttccacccacacccaccctcactcccagggtccaagagaggcccagaagttgtacagcagcatccagcaaggccccctcgcacagcttggacttacaggccactcacctccaacaggggagatagtcacccatgtactgcaaaaacagggactaccggaagcagcctagggcccagaagtgtggaagcctggagtagagctgggtcgggggccaggcttgctgcactgtgccgactgctcccagggtgacggcctgtgcccagtgcggaatatggcccatagagaggatgctgtcaggcagaggctctagcatctggcttttattggttgcctttcttaaacccagcattttttaaaaagtcacctgaggtggtagtttagtcagggctggagaaaggggtaggccagtggtcagtcgggaggagggtaccggtgtggcatgatgggtgcttcacatgtagtaccaggccaagagtccagcagctagggccacaccagcggccaggatgaactggaggctgggcttcctcagcacagccatagctgttcggaagggacagctgctgccctccagggcacctgtgtggcagcaccaataggagacatggcatcagtggagtctcctgctacacctgccccaggaggggagctcaggacacacagacctacctttgtcttgttcagcagcgtagaaagggcatttacgcatgtctcctttcccatcgtgtacagggaacccatcctccaaggtctctctggccagtgtggagccggcctggtccagttcattgaatatctgcaggagcagaggatcgactgagccatctttgggctgcccatactttttttttttttttaaatgtcttttgagatgaggtctctgttgcccaggctagagtgcagtgttatgaacatggctaactcactgcagcctcaaactcctaggctcaagtggtcctcccaccttatcctcctacgtgtgtgtaccaccatacctggctaatttttaaattttgtggggagatggtgtctcaccttggttgcccaggctggtcttcaactcctggggtcaagtaatgcccctgcctcagcctcccaaagtgctgggattacaggcatgagctactgcgcctggctacactctccttttagaggacgccctccagagagagtgagctggagcaggtgagcttgctcaggtgtgccaactacacagcaagcagcactggtgggcggcagctgcactgcctgatggtcttccctccctagcaagagctctggggaggtgtggatattggtaccccaagaaggctgccaaatgctgggtctcccctgggaactgaccagagatgtagccttctctgaggtggctcaagccactgaaactaccacagcacagacaggagggcatgagtacatccccatttctaggtgctggttatttttttatcaagaagcaacagaaaacctggaacatgggagaatgagactgtggcagggcatactcatcctgagtgccctgggaggcctcagtggaagctgacaggacctggggacagagtaagcttccccaggttcagcctcatctaaaggctacttgtaaacagagcttatttactctccttggtggcactggctctctattaacttataaagcagggcttctcagagcaaaacttgaaaagaaaattaaccattcttcaagaccagcatcctgcaatgagggaggaagccagctccattcttccagacccctctatgtgcgagaggactcacccttcccaaaacactacccactggcatctatcacaccaggcctccatgctgggaaccacccactgggcccacaagctctggtggccaatctggtggccaccttcctctcggcaccctgcagctcatctgtcctaatgccatgtgtgccttcatgggccactatggatctgctaccactgtcaaagtttccctcttcagccctagcagctggcagcccccaatagtacctgcatgttatactcaaaagccttgttggcctcctccacgatcctctctttggtcttcatgttcaggtccagggcgttcatcctggcccggtagagctgcttgaactgctgggcattgtccacattctcaaacaggtagaactgggtcccttcccctgtgctggggagtttcagtgctcgctgggccaccttcttcagcacctggccccccgagagatcccccatgtagcgggtgtatgcatgggccaccagtagctccggctcgttctgccctatgtagtggatccgctccacgtacttctgggcagccttggggcactgcacctgctcctcccagttttcaccaaagaaatactccatgtccttggtcagcgcctccttccggtgcagctccatggggaagtacaaaggggcaaaggctggatggtccttgttgcgctccatttcctcctcgagggctgagtatgtgaagtaaagtgccgtggtggccagctgtggaggtgacaggaggaggccagctatgcctgagcacaccacatccgagcagctggatgcagaggctcaagtgacaacccccaaccccaaagacccaatcctatggtccatttttatgtagtgaattatttaacacacaaggaagcttttgtttcttaaaggaatggcatggtgaagtctttggaacacgcatacttttgcttccttcacaccactatgttattctatctaagccatgagaaccaattttttttttttttggcggggtaaagagtctcgctctgtcacccaggctggagtacagtgggacgatctcggctcactgtaacctccgcctcccaggttcaagtgactctcccacctcagcctcccaagtagctgggagtacaggcacgcgccaccacacccggctaatttttgtattcttagtagagacagggtttcaccatgttggccaggctggtctcaaactcctggcctcaagtgatccacctgcctcggcctcccaaagtgctgggattacagacatgagccactgtacccagccgagagccagagcttaacgtcaagaaggaatggagtgtggagaaaagcccagcttttccctcagagtggctccaggggcacttttctcatgggaccaaggcccccaccccaaccccatatgacagtctggaacccaatgcggggcacaaaccttaaacagctccttcttaatgttgcctttcaagaagtccttgacaaactgggtgttttctgcccggtcgtgtgcttccttggtcccttccttcaggagctccgagaggtcagccattctgtggagagatgggaggtgtttgtgtgtcaattagcccttcccagctttccagaaaggaccatagagagaagattgagtccacaccccaaggtgaccacctgttgtactggaggctggggcttctcagacacttcactccaacacaaatagcagcaacttgtcagggaacacaggacaagcagacatgacattctgctccaaggactcaggacacaagggataactgtggcctgctccttgagagtagtacccacgtccatgtgtctgtgttgggaaccacccaaatgagcaatgctttgcttctgtggccacctagtggtcgaagagacacacatctgtattcccttcagtatttgctggcttctctaagaacagcctgccttggaacgtgtcttctggaattcacacacctcagtaaggctgtgaccatgggtctcctcagatggccctactgccttcctcccaccttggacccacagcttctttgagactatatgtgactaggaccaagcacggaaggatgcaaaggagacaaccgagaggctagggccaggacgctgggtttgtgctgcttaacgaaattacacagttgtaaaggtgtgtggatggatggacaaggtagaaaacatgtgatcctaaagatggtggtacttgggcaggggcttacatgtgtccacacaatccatctacaagagtgagaaaaatttggccttatcatggtctggcttctgctgtcttctttaggagattagctcgttatcatccatgtgctgagaatcaatttattattagcaattatttcaagggataaaaaaaaaacttggccaatgacagggctatgagaggctaatgatgcagaacagggcctggaagctcaggtttagcatgagctgtccctatacagagtaaggaaaggctgccctgcagtcttttatgtggtaaaagactgaacagagccagctttgcctgcgtttaccctttctcagcccagatgaggaaacgcacaagtttttaaaaagaaaaaaggataactaccatcaaatcctatcagcactcccaggagcacctgccctgcctccttggatgagacaatggaccagtggggagagttctaagcagccgaagctgtatgcggtccctgcagggccaagcaggcacccaggggtccagagctcatggcccatggccactccccagtgctgccaacagacaaaaccaggtgtgctgagcacgacaggtgctgggcccacctgattcagtgcagccagcccccatcgctcacctcatttggttctccttttctagggccccagagttctttttttctgactcgtctaccccctctgaggtttccacttccgctgacattgctgctgggtgtggttcttgctgctctcgctcctctggtcctgcagagacacaaggagctggtgatgtggcacccacggcagtcacttccccaaatacctgtcggttctgctttcctcagagcgaatgtaaccaaggtgacacccacacaccccaggattgttttctttaaaataaagc

SEQ ID NO: 584 - DNA, 1236 bp, Homo sapiens
taaaaataagttttattgacataatttacgtaccattcaattcacccatttaaagtgtacaattcagtggtttttagttattcacagaatcgttcaactgttgctacaatcggtttcagagcatcttcgttaccccagaaggagattccatgttccccatttcccctctcccccagacctaaacagctactaatgtactttccgtttctatgggtttgcctattggggacatttcatataagtgaaatcatacagtatgtggccttttgtgtctggcttctctcaccaagcatgttttcagagttcatgctgtagggtgtcagtgcttccttcctttttatagccgaatcgtcttccattgtctgggcagcctacggttttgtttatccactttgttgatggacatttgggttgtttccactttttggctattatgattcatgctgctgtgaacatttgtgtacaaatttctgtgtagacaggttttcatttcttttgggcagataactaggggtggaattgctgggtcatctggtaactctaggtttaaccttttgaggaactgccagactgttcctcaaaaggggaacaggggctggcagttcttcaaaaggtttgcaggggctgtcccctaccagcagtgtatgagggttccagtttttctacataatgcctattactgtctttttaaattttagccatcctagtagataggaaatggtctccttgtggttttggttttcatttcccttatgaaaagacgctcagtagtttttcatgtgcttttggccatttgtcttttgagaagtctttgttcaaatccttttaaaaattgggttgtctttctgttattgagttgagttctttgtatttcttaatacaagtcctttatcagatctatgaattataaaatgtgatggtatcctttgaagcacaagagtttttcattctgatgacatccactttaagttttctttcttttgttgctttgcttttggtgtcatatctaagaaaccactgcctaatcgaaggtcataaagattgatgcctgcattttcttctaacagctttttgatctctttcagttttcaaacttccatggtactttatagttgaacccaagagcttggacttggttcctctggccctgcccctgatttgttaaactttatattcaaacttatgtgccctccatcccctgcaggtgctgggctgtctgggaaacactcctttccc

SEQ ID NO: 585 - DNA, 626 bp, Homo sapiens
tccactttctgaagtttcagttatggtcaacagtggtccaaaaatattaaatggaaaacttcagaaataaacagttcataagttttaaattacatgctttctgagtagcatgatgaaatcttgtttcaacctgcttgggacatgaattatccctttgtccatcatatgcacgttgtatatgttactcacccgatagtcacttagcagctgtcttgattattaggttgactctcgtggtattgcagtgcttgtgttcagttcaataaagttaaggttcaataaagttaaaataaaggttcaataaagttaacctttattttacgtaatgaccctagggcacaagaatagtgatgatggcatattgtcatgattttttttattatttaatatcttattgtgcctaatttacaaattagactttctcataggtgtgtatatttaggaaaaaacatagtacgtgtaaggttcagtactatctgcggtttcaggcatccactggggttctgggaacatattccctgtggataaagggggactactatagtgaatttctattttcccttgtatatgcagtttcttttgaatgcctcagtccttgatgtttggctcctaaaaaaaaaggaaaa

SEQ ID NO: 586 - DNA, 516 bp, Homo sapiens
cagtatactttgagagcttcataatagttgtatgagatagattctaccagcgtaagtgttctctgggtatacagactcattcttggtgctttctactctactgtcatccaagaatcctctaacttaatcatggattcttcgtatctcacaacacatcttgtctttccatttactcgttttattttagatcctttatggaattatagttttctttatgtagagcctatacatttatagttttgttattctttgttacttatagcttttttgtttgctattgaaacgtgaccttccattataagtcgcatattatctgcatataaaaagtgattgacttcacatactttgtaaatggcagccttaagtgaatttactggtttttttggacagcattttagtattttttccgaagatggccatagtatctgcagttaatgatgactttctcacctcttctgaaatatttgtacctttatcttcttgtgcagttggattggctagtgcttccagtattaa

SEQ ID NO: 587 - DNA, 176 bp, Homo sapiens
tttgtttaacagatctaccatcgggtctttttcagggacaatttgttagtttattttctttcttttagtgggccatatttttctgtttctttgtataccttgtgacttttttgttgaaaactggatgcttaaatttaatttaatgtggtaattctggaaattaggtagtatccctt

SEQ ID NO: 588 - DNA, 102 bp, Homo sapiens
gaggttgcagtgagctgagatcacgccactgcactccagcctgggtgacagagcaagactccatctcaaaaaaaaaaaaaaaaaaaaaaaaaactaataatc

SEQ ID NO: 589 - DNA, 1044 bp, Homo sapiens
ctgccgtgtgcacggccgtctggtctctctcccacacgtgtgcgcaacctgtcatggagatgtgagggccttgtgtgtgcttccgtgtgtgactgtgtgactgcgggtccagacccccgcctggcggtgatgtgggcccttaaatcactcttcctgctcaccccctccccagtgattcggttttactttgcagcactgtggatccgggcagctgggcggcttctcgggggtgggggatcccccaccccgcccacaagtctggccccagggttctcggaggcagggggtctctgttagtgcgctccctccagctgcaggcacatagcccgagctcacagctggcctgagtcgacgccggctggggtgaaagctccaagtgggcctctggccttcccgctgctctgggtccagagtgtctggagcatgtggcacagaccagggcccctcgtcctccgaggagggtgggacatcctctctgtctcacgcccctgggtggagattctggctggcctcctctccctgtttgccaaggtcaaagtgggccaagggtgcaggtgcttagcctggttccctctcccgggccccgaggttctgtgggtcgggcagattggagacaggactcgtgtaagggctctgctggggtgaaggatggagacagagaaaatcaagatcctttcacaagttaattctacgtctgctgagccccagcccccgacacatcaccctgaggaggtgctaggcttctctgggccccctgtgccccatccacatgttgcagagtaaatctggccccttggacctggggtccgagatggacgcctggctgcccctcctggactgcgggtgacagctggcgagacactgcggggcttgggtgcggggagatggagtggggctgagctgcatttttccagccaccccacatcccacagaaggggagtcatggtcagtgccttgagctggaaagacgggcaatgcttccggcccacaccaaccaagaaaaccaccaggggctcattcatcctctcaaagaggctaagaaaa

SEQ ID NO: 590 - DNA, 207 bp, Homo sapiens
ggttcaagtgattctcctccctcaacctcccgagtacctgggattacaggcacctgccaccacacccggctaatttttgtatttttagtagagacggggtttcaccatgttggtcaggctggtctcgaactcctgacctcaggtgatccacccgcctcggcctcccaaagtgctgggattacaggtgtgagccactgtgcctggcca

SEQ ID NO: 591 - DNA, 2635 bp, Homo sapiens
accctctgaggtagcattaatgaactggaaccctctgccaggtcctctcctccccatgacttccctgagagatgtctgtagctgatttcctgccagcatgtgaatggggatgggtacgtctgttctaggaagagcacaatgtcttacccatttttagaagataggaatttgctggacacttggacaccagagctggaggcacttggtaaacctcagactttccatgatcccttgtgttctggaggccaggaaagaacagagcaaagaggtcagggccttggccgttattggagattgactctaggacttctcaccacccctccccctcctctaatccatctaggttaatacttgacatttggaattatgaagttgtgtgccccatgatggggagtggactttgagatgagacactggcctgcattataagggacctgtcatttccactggattttagtttgtgtggcttaaagagaatgcctttccagttaggtatgctcgtggctttgaatataaatgggaacagtctaacgctagctattttgctcctttccttctgattcccagctggtggaaatcggtgctgcgtactcagcaaccttacatagggcaggtatggtctcatgagctgggagcaagacaggttttctttcttgaaatgaggtccccccacttccctttgtctttgctgctttgctgctttctttccattgtctttgctgctttccttcctttgatctgtagacactcagagaactgcctggccagaccctatagaggtacaattaggtcactctagggcatctgaccatgggtggcagtttccacaaaattcacttgttctgtgggttgaaggaaatatcaaaccagctggcaagttctaggcctcttgtcttcttggtatcttctagtcaaatttacagtatatcccttctgatttaatatttgcaggaaactgatgcatggagatgctgacatcccacgtgttaattctggggcaccctgatcctattctctaggatggcattgccctttctgagccatcaatccaagtcctttccccgtttttctatgtggttggtatataattcagtgagacactctttcttgctcctgtacttgaatgtaggagtgtattgcagtggccctgaagatcccagtagagtctggggagggttgattaggacagagtgatttccaccctgcccctcctcaagcagaggagctttcttcaacctttttctctttgaagaaattgagactcagggaagaagtattgtcgcagatgtgatgcggtgagtcactggtttttaaacctctgttttggcgatgggctgggtagggatgagttaaggtttattcccctaaatctgtattacactctaagtcaacattgtgtccttaggctgggcgcagtggctcacgcctgtaattccagccctttgggaggctgaggcgggtggatcacaaggtcaggagatcaagaccatcctggctaacacggtgaaaccccatctctgctaaaaacacacacacacacaaaattagccgggtgtggtggcaggtgcctgtagtcccagctactcgggaggctgaggcaggagaatggcgtgaacccgggaggcagagcttgcagtgagctgagatcacgccaccgcactccagcctgggcaacagagcgagactccgtctcaaaaaaaaacaaaacaaaaaaacaaaaaaaaccattgtgtccttaaattgaatatccttgatagaaaagggtagggccttagcgtactggctctatggaatacgtactctctgtctttcagtagaattcagcagtcattgttcacctgctttttgccagatgttgagctaattgctattggagtaggatggtaaagattggtcttggtatgcttggttgagaaggcacaactttttacacatgtgggcctgcaaatatctatgcagatttttttgagactttaaaaagcatgtttaaaagattatttcttctaatagagactccaaaagtactcaattactgtcttatcctctgggatcctagttcctattacttgtgcttgatttccctctgctgattagataagttaccttgaaagaggcaaagaaagccaaatgggaattgacttgtttttcttcctgtcattaaaaaaaaatggaaataatttcaaatttatagaagttatacaaataaaattatacaaagaatatttgtaatcctttttatccagaacctcctattgttcgtgttcattttaccccatttgctttatcatttgcacattctctctccatgtatcaatacataattgttttctgaatcattaagaggagagataattggcccaggcacggaggctcacacctgtgacctgagtactttgggaggctgaggcaggaggattgcttgagcccaggagttcaagaccagcctgggcaacagagtgagatcctgcctctaccaaaaaaaaaaaaaaaaaattagtcagacatggtggcatgccgctagctactttggaggctgaagtgggaggttgagactgcagtgagctgtaattgtgcacctgcgctctagcctgggttacagagggagacccttgctcaaaaaaaaaaaaaaaaaaaa

SEQ ID NO: 592 - DNA, 2636 bp, Homo sapiens
accctctgaggtagcattaatgaactggaaccctctgccaggtcctctcctccccatgacttccctgagagatgtctgtagctgatttcctgccagcatgtgaatggggatgggtacgtctgttctaggaagagcacaatgtcttacccatttttagaagataggaatttgctggacacttggacaccagagctggaggcacttggtaaacctcagactttccatgatcccttgtgttctggaggccaggaaagaacagagcaaagaggtcagggccttggccgttattggagattgactctaggacttctcaccacccctccccctcctctaatccatctaggttaatacttgacatttggaattatgaagttgtgtgccccatgatggggagtggactttgagatgagacactggcctgcattataagggacctgtcatttccactggattttagtttgtgtggcttaaagagaatgcctttccagttaggtatgctcgtggctttgaatataaatgggaacagtctaacgctagctattttgctcctttccttctgattcccagctggtggaaatcggtgctgcgtactcagcaaccttacatagggcaggtatggtctcatgagctgggagcaagacaggttttctttcttgaaatgaggtccccccacttgcctttgtctttgctgctttgctgctttctttccattgtctttgctgctttccttcctttgatctgtagacactcagagaactgcctggccagaccctatagaggtacaattaggtcactctagggcatctgaccatgggtggcagtttccacaaaattcacttgttctgtgggttgaaggaaatatcaaaccagctggcaagttctaggcctcttgtcttcttggtatcttctagtcaaatttacagtatatcccttctgatttaatatttgcaggaaactgatgcatggagatgctgacatcccacgtgttaattctggggcaccctgatcctattctctaggatggcattgcccctttctgagccatcaatccaagtcctttccccgtttttctatgtggttggtatataattcagtgagacactctttcttgctcctgtacttgaatgtaggagtgtattgcagtggccctgaagatcccagtagagtctggggagggttgattaggacagagtgatttccaccctgcccctcctcaagcagaggagctttcttcaacctttttctctttgaagaaattgagactcagggaagaagtattgtcgcagatgtgatgcggtgagtcactggtttttaaacctctgttttggcgatgggctgggtagggatgagttaaggtttattcccctaaatctgtattacactctaagtcaacattgtgtccttaggctgggcgcagtggctcacgcctgtaattccagccctttgggaggctgaggcgggtggatcacaaggtcaggagatcaagaccatcctggctaacacggtgaaaccccatctctgctaaaaacacacacacacacaaaattagccgggtgtggtggcaggtgcctgtagtcccagctactcgggaggctgaggcaggagaatggcgtgaacccgggaggcagagcttgcagtgagctgagatcacgccaccgcactccagcctgggcaacagagcgagactccgtctcaaaaaaaaacaaaacaaaaaaacaaaaaaaaccattgtgtccttaaattgaatatccttgatagaaaagggtagggccttagcgtactggctctatggaatacgtactctctgtctttcagtagaattcagcagtcattgttcacctgctttttgccagatgttgagctaattgctattggagtaggatggtaaagattggtcttggtatgcttggttgagaaggcacaactttttacacatgtgggcctgcaaatatctatgcagatttttttgagactttaaaaagcatgtttaaaagattatttcttctaatagagactccaaaagtactcaattactgtcttatcctctgggatcctagttcctattacttgtgcttgatttccctctgctgattagataagttaccttgaaagaggcaaagaaagccaaatgggaattgacttgtttttcttcctgtcattaaaaaaaaatggaaataatttcaaatttatagaagttatacaaataaaattatacaaagaatatttgtaatcctttttatccagaacctcctattgttcgtgttcattttaccccatttgctttatcatttgcacattctctctccatgtatcaatacataattgttttctgaatcattaagaggagagataattggcccaggcacggaggctcacacctgtgacctgagtactttgggaggctgaggcaggaggattgcttgagcccaggagttcaagaccagcctgggcaacagagtgagatcctgcctctaccaaaaaaaaaaaaaaaaaattagtcagacatggtggcatgccgctagctactttggaggctgaagtgggaggttgagactgcagtgagctgtaattgtgcacctgcgctctagcctgggttacagagggagacccttgctcaaaaaaaaaaaaaaaaaaaa

SEQ ID NO: 593 - DNA, 7793 bp, Homo sapiens
gctggggtggtcgttttgaatggatgaggatgacggatcaggaatagagccagcctgggcccatttgtcctgtcactgtctgtgttacatgaggttccttcttctctcactttttccccactctgctactgaaacaggaatctttctcaaatgagtgttttgtatttcttgcccattcgtatagagaagggttgcctggcgcaatttgatcagggcaggagagggatactatgggatgttctagtcgaagtgtatgtatctgcctgttgcttatgattcacagtattcctgctggaagggttcatttttctgaggcttgaggagaagttgcttgtccaggattctgttcttccttgggtccttggattctcacgctgctgtcgtttttcctgttcagtcctaatccagacctctgtggtctgtcacatagcaccctcctccctctctgtgagtctcctgcttggctctgtcatattcctctttttttccttttctagaaagaaaagtcaaaatcgaacagttcagcagcccgagaacctaatggctttccttctgatgcctcagccaattcctctctccttcttgaattccagggtgagttgcatctctgtgtcttccttgcaggagaatgaaaacttggatgaatgcattaataagaagaattggccaggtgcagtgactcacacctgtaacctcagcactttgggagtctgaggcgggcagatcacctgaggtcaggagttcaagacgagcctggccaatatggtgaaacccagtctctactaaaaatacaaaaagttagctgagcgtggtggcgcgtgcctgtaatcccagctactcgggggtctgagacaggagaatcgcttaaacccaggaggtggaggttgcggtgagccgagattgcgccactgcactccagcctgggctgcagagtgagactccgtctcaaaaaaaaaaaaaaagaattctgtgtatcaattcagtgcctgctgtttcgctggtattttgcgaggcacttgacctaaatcttttcatttaaacttcacgataactctgcaagataggtaatggtattctcattttccagttaaggaaactgaggctcagagaggttaagttacgtgtctaaagttacataacttgtaagtgacagactccatgtcaggtcctggttgtccgaatcagaagcttttttttagattgtacttcattttttattttttattttttgtagagacagagtctggctatgttgtccaggctggttgtgaactcctggcctcaagcagtcccccagccttgacctcccaaggtacaagcatgagccactgcacctggcctagactgtatgttttatcatagtcgcttagagtaggctacccaaagccgaagcttctgcttacccactgttaggacatgttctgcctcctaaaccaatcccgccggatcatcaccgtagtcatgatactgccttttacacctacctgctaggtactgtctacgaagcacttttactttactttctcatttttacccatgtatcagcctgtgatataaaccaggcagttattatcatccctatttaaggaaactgatgctcagggaggaacagtgttttgtctaagctcaaaagtgacagttttattcatttggtgacaaaatgctacttccattttagtgtgggtattaaaggtctttataggagtcaagactagcatgagtttatgactttctcttcaaaaccagattggagctaacccagcgtgtagttattccttccccacctctttcccaggccccaccaaggtcaaccatgtgctgttggaaagggaacaccaacgtgtgttcagtagtcagaaggctctgggagacatatgaggctccatttcctcagtctggccaccatctcctccttttcatttagtaaacacttaatgaactcccactgtatgcaggtaccgtgcgttgcactggggagtcaaggacaagtgagccacagagcctgtccacagaggctcatgggaggaagcacgtgtgcgaaatgataaatgcaggcgtgcacaggctatcacaggagagtaagagagggtgggcatttccacctatgcgagccagggaggtagggctccgcggaagaagtgatgtcggggctgtgttgggaggtctgaggctttccaggacaagagaaggcagcctagccaaggaacagctgggcagaagcacccatgcatgacgaagctcttgggttagggtccagtctgcctggagctgaggatgcttgtaggagaacagtaggcactgaggccagagatcagaaaggacttcctatgttgcgataaggccagctcctgcctctcctaagaagtactgggtatggctgggcgtggtggctcatgcctgtaatcccagcactttgggaggctgaggcaggtggattacctgaggtcaggagttcgagaccagcctgaccaacatggtgaaaccccgtctctaataaaaatacaaaattacccaggcgtggtggcgcaagcctgtaatcccagctactcaagaggctgaggcaggagaatcagttgaacccaggaggcagaggttgtggtgagctgagatagcaccattgcactccagcctgggcaacaagagcgaaactcggtctcaaaaaaaaaaaaaaaaaaagtactgggtatgacatttctcccttaggcagcagtggagcgtcgaagggtttagaaaggtctctctggcagtggtttgcagttcagtttaaggtacgtgagactggaggcagggcagtgaggtatgtggctgttgcaggaggccaggctggagatgatgaggcttgaactgaagcagtaggagaggaaggaatgagcacaaatgataccagagcaggagggggaaacactttggtgactggctactgtaggtgcagcggaggaatgcattggtgactcttactttttttctttttttttaattttaatttttattttttgagacggagtctcgccatgtcacccaggctacagtgcaatggcacgatctcagctcactgcaacctccacctcccgggttcaagcgattttcctgcctcagcctcccaagtaactgggattacaggcgcgtgctatcatgcccggctaatttttgtattttcagtagagacggggtttcaccatgttggccaggctggtctcaaacttctgacctcaagtgatccgcccaccttggcctcccaaagtgctgggattacaggcgtgagccactgcactcggcctggtaactcttttttttttttttttttttttttttgagacagagtctcgctctgttgctcaggctggagtgcaatggcgcgatctcggctcactgcaagctctgccttctaggttcatgccattcttctgcctcagcctcctgagtagctggaactacaggtgcccaccaccacagccggctaattttttgtaattttagtagagacggggtttcaccgtgttagccaggatggtctcgatgtcctgaccttgtgatctgcccacctcggcctcccaaagtgctgggattacaggcgtgagccaccgtgcctggcctcggcctggtaactcttaagttttgcaccttgatggtgactttaagccttcaggcagaactcccaggtgctaatccgtcagtccggcagccgaagcctgagctcaccaccttcagacaccaccagcctccttcagatgcccaaggatgcctgacaaatgtcattttctacacatcttatgatgtgagaaggattgagaagtactgaccagagacacagctacatccctcccttccacaagctgcaatcagtggataataaagaagagtttaataagcatatcctgaccttcctaaagtgtaatgttgcataaacataaagattctggctgcctctggtgcttagaatctatgtcgtgtaggccgggcacaatgattattatactcagttgtatccttggctgcctaaagtgatgccaggcccttggctctgtccagagttcctcttgaggaaaatgaccacgctcagctgctgcctttgttctgtttggttttcagacgaaaacagcaaccagagttccgtgtctgacgtctatcagcttaaggtggacagcagcaccaactcaagccccagcccccagcagagtgagtccctgagcccagcacacacctccgacttccgcacggatgactcccagcccccaacgctgggccaggagatcctggagggtgagtcgtggttggccgaggatgagtttcctagaagggccttgctttctgctcttgttgtgtctcgtctttagagtaacaggctcgagagagcacctcagagccaggcagcaccaagccctttctcgatagcttaggaatgattatagtttcccctttcacagagggaagggagaaaacaagcattagagttgcgtgccaggctgtgtggaaggaacttgagtatttgacgcctgctataattctctcaaaaatcctgtgaggtggcagctattgtcttcttttacagatgaggaaaatggacattcaaagcttagaaaggttaaattgggctgggcatggtggctcacacctgtaatcccagcactttgggaggtcgaggtgagcgggtcacttgaggccaggagttcaagaccagcctgaccaacatggcaaaaccgtctctactaaaaacataaaaaatttagttgggcgtggtggcatgtgcctgtaatcccagctactccggaggctgaggcagaagaatcacttgaacccaagaagcagaggttacagtgagctgagatcacaccagtgtattcttgcctgggcaacagagtgagactccatctcaaaaaaaaaagacctggcgcggtggctcacacctgtaatcccagcactttgggaggccgaagtgggtggatcacctgaggtcaagagttagagaccagcctgaccaacatggtgaaaccccatctctactaaaaatacaaaaattagccaggcatggtggcgcaagcctgtaatcccagctactcgggaggctgaggcaggagaatcacttaaacccaggaggcagaggttgcagtgagccaagatcgcaccagggcactccagcctggcgacagagctagacttcatctcaaaaaaaaacagagaaaggttaaatcgcttgtctgagatcacatagccagtctagtaactgttggaatgaatgtcactttaagtccttctattttcagcatttatgctgtctgcattacatgctaaatttttttcttttctttttttttttttttttttttttaaagagatagggtcttgctctgttgcccaggctagaatgcagtggctgaatcctagctcactgcagtcttgaactcctggggtcaagtgatcctcttgcctcagactccgtagtagtaggactgtaagcctttgccaccatgcctggctttcttttaattttctgtagaaatggagtctcactatgttgcccaggctggtcttgaactcctgggcttcaagtgatcctcccacctcagcctccagagtagctgggattataggtgtgagccaccatgcccgacccaggtttcttgttataatatggatatatagatgtgtcttaggcccttgttaccttctcctgtgctgtgacctgttaacagccaactacaaaatggaacttgtttctccatgggaaatgccaattgtagttaatatttattgtgttcttactatttggcatgtgctgttcttagctcctgtgttttattacttcatctcgtcctcatagcaactctcagaaaactgggagattgagttagagttgtgatgtttgggctagaggatgacaagatgagctgctttgtcggttccagatatctccagcccagcagagatggccctctgcagtctagccgtattttgcccttccaccattcttggctgtgacctggtccagctgggccctgaatgaatgtttgcttctcaggccagtattctcccctcctcaccaagccacctccacacagctctaaggaagctcccccaggtccaggcctcaggggagccctgccctcaggccgaccctactgccttttcagagccctccctgccctcctcggaagttgctgatgaacctcctaccctcaccaaggaagaaccagttccactagagacacaggtaagcaatcactttgagttttccagttttttgtttttttggtttaaggcagggtctcgctgttgcccagactagagtgcagtggtgcgatcctggctcactacaacctccactgcctcctgggttcaagcaattctcctgtttcagcctcctgagtagctgggattacaggcgcccactaccacacctggctaatttttgtatttttagtagagatggggtttcactatgttggccaggctagtctcgaactcctgagcccaagtgatccacccatctcagcctcccaatgtgctgggattataggtgtgagccactgtgcccggccaggcttcccagtttctaagtcaaaaaaccaggaaagactgtggatgtggggttggatctgcagcgccggaaatgagtcccagggttgtaggcaggggaggatgtttgatcatctgctggaaggagcagagtggacatcccattataattcgggtgggtgggaaggttctggttgggaggggtggccctggcattccatgctctgcctgctcctaggtcgttgaggaagaggaagactcaggtgccccgcccctgaagcgcttctgtgtggaccaacccacagtgccgcagacggcgtcagaaagctagcaccatcccggccctccgcctcctggccctgcctctatttattgcattctggttctggccgcgccgcgttgctggggtaagggcaagcactggggtcaagagcctgcacacatgagccttccgggctggaaggctggcgtaggacttggggctgtagcatcatcttcctgaccctggcacctgtgtctacttgctcccgagaagaggagcgctcatgtcttttttgcaccccaagttggctggagcatcggccaccccaagattcatctgtgacctccaggcagcagtctctgctccagaatctctggacggagctgctggcagcttctgcgagaagagagagatgtggaaggcaccttctagaagagagcgtgcctcaggttacttgaacttgaacggagactgtagactcccggactttcccctaggactgggggccctgtaggctgctgttggaggactgggtagagacattggagggaagggaagggcttttctccacacaagggcagagagtccgtctagatttcttgctgtcctgccagctctgcccatgcctgaggtggtcctacctctcacgggcaccctagctgctgacagccctttgtggccgccgtccccatcccctgccctcagcacacacatctgcacacacgcagctttgttctcacctctacctgtcattccagcatccctgcctcttgtcacaaactgccccagcaagaatttgaggttctgacaacagtacccatcccccacagtaccccttcagctcagtttctagaaagctcccttttctttgaaatctgcatgttgaattgaactttgtgattttattttttgtttcaaaaaagtttaagaaaatggaaatgggcaacagtgagtgaagacatattttagcactgaatagaatatttttaaaattaaactatttgaaatatgtcctgtt

SEQ ID NO: 594 - DNA, 141 bp, Homo sapiens
gagatggagtctcgctctgtcacccaggctcgagtgcagtggcacgatcttggctcactgcaagctctgcctcctgggttcacgccattctcctgcctcagcctcccaagtagctgggactacaggcacccgccaccacgc

SEQ ID NO: 595 - DNA, 215 bp, Homo sapiens
atctcggctcaccgcaagctccgccacccgggttcacaccattctcctgcctcagcctcccgagtagctgggactacaggcgcctgccaccacgcccagctaattttttgtatttttagtagagacggggtttcactgtgttagccaggatggtctcgatctcctgacctcatgatctgcccgcctcggcctcccaaagtgctgtgattacaggc

SEQ ID NO: 596 - DNA, 1756 bp, Homo sapiens
gcggccgcgagcccggagcctgcccgcgcgcccccggaacccgcgcccccggccgaggccaccggggccccggcgccgtcccgcccctgcgcccccgagccggcggcctcgcccgcggggccggaggagcctggagagcccgcggggctgggggagctcggggagcctgcgggaccgggggagcccgaagggccaggggatcccgcggcggcgccagcggaggcggaggagcaggcggtggaggcgaggcaggaagaggagcaggacttggatggtgagaaggggccatcatcggaagggcctgaggaggaggacggagaaggcttctccttcaaatacagccccgggaagctgaggggaaaccagtacgagaagatgatgaccaaagaggagctggaggaggagcagagaactgaagaataacgaagttatccttagcgtcctcctaaaggcttttccttttggcatcttaaaagcttgagagataaaatggaaaccccagagaggagtctgggcaggcgcccagggtgcatgctgcctccataaatctgctgagctctagaccctcaatcaggacttgtcccttggctagcaggatcctgagaacacctttggccctgccctgtgtagagatgttcatgtctgttcctgtgggtcactttgttaagctgaagagttttaagagttagagctcagaccctggactgggatttttcttaccactcaaacttgctatccacacaccctgcacaccttagataaaacgaacattttaaaagcagagttcactttcactccagtcccccctcttttgccctcactgaagccaaaccacagaagactttgaggaatgagagacaaatgaggtagagctcacctgtgctcaccagctccgtcagggtggtcagccgacccttttccctgggaaccccacttctctctctggctggcttggttgtcgggggtgagatgccatattgattacagggcagcaaagaaccagtaccaggaatttacttgaccattccccttatttttcatctagaggaatctcggattcagccctttcattgctaagacaccttttcactgaggttcttaccagctcagccaaatctccactctgctatagcagaagcaataatgtttgctttaaaaagatttcttgacctatgccttttcttagaaagtttgatagattagttagaacttcagatcatcagatcagtctcaaatgcgtttcttggaattttatatttgacaatatttatactataccaaactcatttgcagttcttaggtttgttggttaaaacatttttttaaagcagtaagtttatagaaaatgttttcatttaatggaaggctggggaatgtccagcatcaacccctatggcatgcattcccagtggccttctcatctgggcctggaacctttggttcagggcttaggggagaacaggccacatggcaacagccacacagtcattgccttcaacacagagccacgtgtccccaaacagcaatagtcatgcccttgtccaggctgggatctaattgatacaataggtcgttgactccctcctagtagagctatctaggtttgtctggaaagtttccgaccctggcttataggcaccacacctcatgtactcctcatggcttggatctctgtattcagcctttgttcagtccaataaactttgagtagatgatctcaaaaaaaaaaaaaaaaaaaaattcattaacaaaataa

SEQ ID NO: 597 - DNA, 359 bp, Homo sapiens
aagatgtatactataaaccctaaagcaaaaaataaactaacaaaacaagttatagctagaaattcaacaaaggggatataatggaatcattacaatatccaattaatctcaaaggagtcagagaaaggaaaaaaatgacaaaagaacaaatgagaaaattattaagcaaacagcaaaatgaaagatttaaacttaacgacattcaataattttgtgaaatgtaaattacttaaatatctgaattaaaaagctgagactatgactggattttaaaaaaaaaaagcaaaacacaacatctcaaaatctaactacacgctgcctacaagaaacttatttcaaataggttaaataaagatcca

SEQ ID NO: 598 - DNA, 3014 bp, Homo sapiens
ccgatgcccaggatgccctcaggccctgtctcatgatgactcccacttccacgagcggcacaagtgcatcaacttcttcgtgaaggtgtacggctacatgcccctcctgtacacgcagttcagggtggattctgtgctcttcaagacacgcctgccccatgacaagaccaagtgcttcaagttcatctaggggcagcgcacggtctggggaagaggatgagcagagggaggaagatggctcccaaggttcctaggcattgcaggaccttgggcacatctgctggtgggtggcccagagcctctgctggaaggggcagcaggaggagtggaaggaaaccgctgcctttatcttgaagtcagccacactgggcctggagccctgggcggagtccccggggttccccacacagggcactgactgatagcttacactgaggactgtggcgactctgcagagtcactcacaccgttcgtacgcccaggacagctggttcgtggtttttacattcaataacaactattatgattatttaaaaagagaaagtttcagatttgccattcaaggcttatttatatatatgtgtgtgtatataaatacatgcacacacttgcatacatatatatttttggctgggggagtgtgagttttgcctttctaagggagggaccgcgcaggctcctttgttctgtattctggcggagatgggtcctggccttgtgtcactggcttatccttaaagatcatctcccatcctccccagcgccatctgtgtgcagcaaccagaaagggatgaacttggccctcttgcgggcctggacaaggtctcttccttaccctttctgttgccagtcagcaacctgtaactcacattctcttcccagtgaatccctgggagcgcctgaccctggtgggctgttcagcttcctgctgctggggccagcgatttttgaggatttatctttaggccaggcttgcctccgtacttatccctgctctcccatttctctcttgtttgagagagaatgaggaagcaaagagtgagaaagaataggggctgaagacgccactcccagatggctctttctatcctgctcttctgttgaaacacacgtgctgtgggcctcaggcgtttctgaagtgctctttcttggattggacaggagatcagcagcgtgcacatctgctgtggtctgaagtggtttgcaggtcagcctcctctccctagtgtagagcaagccagtgtccttcgaggaacccacccggctggccgggaagttttacagcaaggcgcctgccttgggataattccttggtgaaattcaccttccccccgcctctgtctggagccccatcctgtgttatctgtggtttttggacccctaatgtcagcttggctgtaggactccccgaggtttggtatgtgctagaacaatgggaggctgtgatttgctgtgtaagctcacatccagccttggaatctaacgggcattcacaacccgagttaccactttccactccctgcttaggattctgttccctgggctgaaactgaaataagctaattttttgggtcatggtggcagtaggggaacctaggagggtgtgagtggcatttgtcagggatttagcccatgacgtgtttcttgaaccctactttctggaagtggagttgactctggaagttttctagcaactgaacaaaagctcaggtttgtcctggtcatgcacatgccttaagccagttccgtcttccctagaccttggcatcctgtgcttctatttcttggaatacgttctcctctgacctgcctgtaccacgtgggtcctcttcaagtactgttttgaagctgggctcttttgtgtagctcccacccacctgtagggctagctcggcttaagggaactctccccattggcaaaccggacccggccgccgccaggactgtgtttccaaaggttccccgcccccaaccccagcatcagcctgtagctcccctgctgaggcagtgtggttatgttcccagcagtgggggtcagacgcccttcctcagaactttctagttgccctctacctgactcctgacttgtattccttttagcagtagccttcttccctcggggagccaaagagtgtggtgtgtggcgctatattgtggctgctatttcatctggtttcttttaatgtgaggaactcacatactgacttcagtgggactcggtgagccggggccgtctgtgtggtgggaccccctttagcgggactcagtgagctggggccgtctgtgtggtggagccagggcctctccctttagtggagccaggttgtcgggccccgaatgtcactggtggatctaagaagggctgagtggtctgacaccaaaacatgccgcagggagggctgtggtgccggtgcttccaacaaggacagccctccttgaccctgaaaggaacactggcttgaaggactgcagacaggctctgaggggcacgccctcctcagcgagaggcagcaaggtggccacagtgtcactggtcaggtgcttctcaccacgggaaagccgccgacctgtgactcgcttgagatgggaaagcggcgccacagaccccgggtctccttggctgtctgtgggccgcccctggccaccttgtcctggctcgcagggtgcaggagcgcctcgttctctgggtggccggcttgctgctccggtttgggctgtcttaccataacaccgtcccagggctctgcaggccactgtgagcgctggctccctgggcagtgctcctccgtgtggactgtgcctcaggccagggctcaccagctggggtcctgtccggaaggatgggatctttctgggagctgcgccggacagagtggggagctcctagtttgtggggggaagctttgatatccatgccacgtccatccaccccaccccttttcgtcacgagcacaatggtcttacattggatttttgtaaaaaaataaaaataaatggagactttaactcaagca

SEQ ID NO: 599 - DNA, 3014 bp, Homo sapiens; identical to SEQ ID NO: 598

SEQ ID NO: 600 - DNA, 700 bp, Homo sapiens
ttaagactcttttgattcctgatttagaatgtattataggtgctttataattgattatgtccccagtgagactcttaagcttttttgagtacaagaacaatgccttatatgtattcatcgcccctgccaatattttacacatagtaggtcttgtcctagaggcagaaccaatttggacagcagttttaacaattcagacaccctgtaacatgttgcttctgtaacaatccatggctttggacttaagcccagtgaaagcacattagtggttatgagtttctccctgtaaggtttttcctctttgtctcctttctattttttggtacgcgagcagcctctgtctctctgtagggaagcaacagacagcttcagtgagtacaaatgttatattcacatgtggaacatagccccagagataatcatatgtaccagtgatccgtcagtagatgctattacccgtgtggttcttttatcaaaggaattaagttctcttgatgtgttaataaacagtacttttttggccagctctggagtggatgaataggtgtttggatgtctgtctagattgacagctttagattgcttttttcctgaaatctggtaattccagatttacagtgaattttctcttaagttgtgttttcaagtgatcacaccgaattggtgggcagcaattctttcttttaccaaaaaagtaaaa

SEQ ID NO: 601 - DNA, 700 bp, Homo sapiens; identical to SEQ ID NO: 600

SEQ ID NO: 602 - DNA, 354 bp, Homo sapiens
aagtattctctttttttgagacagagtctcgatcttgtcacccagactggagtgcagtggcattatctgggctcagtgcaacctccacctcccaggttcaagcagttctcctgcctcagcctgccaagtagctgatattacaggtgtgcgccagtacacccggctaattttgtatttttagcagagtcggggtttcaccatattggccaagctggtcttgaactcctgacctgaggtgatctgcccaccttggcctcccaaagtgctggaattacaggcgtgagccaccacacccagctagaagtattctttaaacagatgggtgcagtagcatttacttcatatcttgcacct

SEQ ID NO: 603 - DNA, 338 bp, Homo sapiens
atggaagcttctaggtcttctctattactgaggccatcttctgttacttgtcctcctgaaatcccccacccctagtatattgcaagacccatgggagcaatatggtaagggccatactggttttgctcaccactgttgggtataattctacacggagcctcaggaggacatcgaagttgacccacccgggatgccgaggacactgctgagagaaaattgtgcatattatttctcgttttcattgctgaatttccctagtaatctatttatcaaagtttgactcttccttctcctataattggtgattcttttgcacaaaagaaccccattattccatg

SEQ ID NO: 604 - DNA, 354 bp, Homo sapiens
aagtattctctttttttgagacagagtctcgatcttgtcacccagactggagtgcagtggcattatctgggctcagtgcaacctccacctcccaggttcaagcagttctcctgcctcagcctgccaagtagctgagattacaggtgtgcgccagtacacccggctaattttgtatttttagcagagtcggggtttcaccatattggccaagctggtcttgaactcctgacctgaggtgatctgcccaccttggcctcccaaagtgctggaattacaggcgtgagccaccacacccagctagaagtattctttaaacagatgggtgcagtagcatttacttcatatcttgcacct

SEQ ID NO: 605 - DNA, 1790 bp, Homo sapiens
ggcaaacctaacctgggatctgacgggatgcgttttgccagctcagatctcttctgctactggaaacttgcattatttacagccattaggagctccctggcttccattccactcatgactagctttacctctttgaccccactgtattattgtctagcccagttcagctgaatctttcaacacaaaatatacagggaaccccttcctggggaacttcctttgttattgaggtcttcgctgatggcttcttccatttgatactcagtctcagtcacagtaggattacggaatcttttgccagagtatcaatctacatgggtgctacacattactgaaaaaaattaggaacatggtgctagttaattcaagtcttcatgtaaaacttcttctatcatagtggacattaaaaaaaatctctctgcaaagtgcattgaccctacctctagtagatgaatgttgaacaagtagcctatctaggaagcaagtgactagcatccatgggcatcccacaggttgtagtccagccccgatcttggtggttgggattgatgttgctgccaagtccctccgtttcatgttcaggctctgcctatgttcctggtgtctggtacctgatttttcaggatgctgacatttacttcttgcccacaacaccatataccctaagtcttgccaacatctttgaatgtcttctgctggtctgtctctcctccgttgttcttttactatgtcccaagtgcatgctttgttcagtatctgcctaagtctcaggatactgattttagctttttactaggtcctgacattcccgtagtttcctcttacctttctggacatgccagacaaactctgaccttaggttctgtgaaaactggtacctgcagaattcctcagtgtttgtttatatgaaagttcattgtgcctcttgattgtgggtgagttgaggaaaaggggtaaagcagtgggcagaggttgcaacatttatttggttataggacacctttgctactggagcatcttgtagggtaatgtagttcagaacatgcatggagaaatgctaccatagaagtagtagtgacatttgggacttgaaaaaaatctaagagcaggtataattccctcaacaacagaagaacatcagtgctttagaatgtttgattttgaactttcttgatgttttctctgccgttctgtagtgttattctaattaaaatctttcctctaaactctgctcttttttttccaattgagcaaattcggcatttattgaggccctactacatgtcatatgctgttctagttgctggaaacacaaatgtgaatatggtaggcctgcccttaaacaatgaattacagtgtaaaatgaaccttttataaagctggtcctatatcaatctaattattttgtttttcttcatttcaggcctaagacagctttattttctttccactccaaataatgaagaatccccttagggcaaagaaggaatttctgagcatgttataaaaaaatagaaaataggataagttgcgtgaagatttaatatttctatacatcaaaacctaccataaacaaaattaaaaggcaaatagtaaacttggaagaacatttgtaacataaaagacaaaagtttaatatcataataaaataagcacatagtagcttttagtaaatcattgctgaatgaatgaatacatatatgaattcaaagcaatgaaaaaatcaccccaggaaaagatgtaaacatttgacataggacaagtcaccaaaaaaaaaaaaaaagaaattc

SEQ ID NO: 606 - DNA, 106 bp, Homo sapiens
tttttttgtatttttagtagaaacggggtttcactgtattagccaggatggtctccatctcctgaccttgtgatccacctgcctcggcctcccaaaatgctgggat

SEQ ID NO: 607 - DNA, 410 bp, Homo sapiens
tcatgcagggaatagaacagtgtgttctgtgggcccaaggaatacagagtgaataaataaattgataaatgatatggccaggtgactaagaaccacaaatgtaaatgtctaatacatatttggggaaataatattagcaattaaagacttacaaatagaaccatatgaaataactgttttttacttatgtgattagaaaagctttataaaaaagaggctgtccagtgctttcacaaggtgtgctgaaacaggtagtgctttggagaaagcaatttgatgataggtataggatgtctaaaaattgtttatacaaaccgtgactcagtaattcaacttctggaacttgatcccaagtaaataatcctaaatactgaaaaagcttttccacaaagatagaatatggcattgcc

SEQ ID NO: 608 - DNA, 13191 bp, Homo sapiens
catttcattatctatctcttctgagcctgttgtatctggagcagagctgggcaggaggtggtaagcagaggctctggggcctcctagaccctttgcagagggaaccggagatgtcttccaagtccccaagtctggcaccacctcgtctcaatctcactttcccctccaggtctagcagacttggcctccatccacagggccttcttagcgcatgccctcttcgcacttactcccacttccctccccatccctcgatcctctgtccagaggtcccaagggcctgttcagaccctgaactctgcccagcagcccctcactctgtcctctaccagggcgccttccctggggctcctgctcatcctgcagtgcccctcccctcccaacccctgtgggggtgtcccatcactttccccagcacccacttcccacaggccttccctcctcccctgcctgctgacccggcagctcccgacagcacggccttgtttcccagggaacaatgcatctgtgtcacggacaacaatgtcctttcatgtcaggcgcactggccccggtgcacgccgggacgtggcacaaagggtgctttgtgcagctcagggatgtgagttcctggctttgccatgttggtgctgccgacccggggcctctgtccttgggtcccagttatgcaacagtcagtcgaggctgtggggctggcccaggggctttatctgtctccctctccaacttttgccaagttacccttctgggcttccgccagccaggagcccacactccctcagccctcccacacgctcctctcacctcctagctgggcttcgctgacttgaacctggccgagtttgcgggctcgggctccacggtgcgctgctgcctgctcgagggatatgacacgaagaacactcgccaggacaactccatccttaaggtaccagggatcctgccacctctgccaccctgaccacgggatggggacaaaccaggctgctcatcagaatcctctggaggagggttgttaaaaatacaggccttacctgaataggtagacatcgggaaggggcgagccctggaatcaggaaaccactatcagagggaggcctggctccgctgttggcctcagtttccccatcaagttcagagagggggccctgacagtctccagggtttggcaagcacctgcagtgggttcacgtcatgctgattgcatgccctctcttctcttgtggtcccctgacagcagccccacgagctgtggtatctttgattagtcccagcttcaaatgggagggagttaaggcacagacgttaagtcatttgcctgaagtcacagacagagctggcacctgaccaccagccagttgacttcttggcccagctcctaactcttccccaagtgacacgtggtagcctggcccccagtggattatcagtgaaaatgatggctgctgagggccccgggggcaggtttccagtggacagggcagccccacccccaggcagctgcctcgttggccttttgggaacagaaatgtctgggtgtccgtcaccagcacacctctcttcctctgtttccacacctttcacctggccgggaaaacaggctgtcctaacagcgcctctgcaaggggacccagggagagcctatggtatctggagcagagctgggcaggaggtggtgagcaggggctctggggcctcctagaccctttgcagagggaaccggagatgccagaaagggtccaggctgattgtcttgggagctggagcctttcagcctcagtcaggctgaaaagcacaggcacagtagccctgtgcacctcaggccagatcaagggagcctgggggccaggtagccttgggttcaagggaagctcccccacatcctgtctgcaaggtcttgggagtcacttcccctctctgagtcttggttccctcatcaacagccttgggctagctaggatgctttcatggccgagtgaataagccatagaaagcctcaacctagtggtcaccctttctttttttttttttttttttttgagacagagtctcgctgtcacccaggctggagtgcagtggcacaatctcagctcactgcaagctccacctcccaggttcatgccattctcttgcctcagcctcccgagtagctgggactacaggtgcccgccaccacgcccggctaatttttgtatttttagtagagatggggtttcaccgtgttagccaggatggtctcgagcccctgacctcgtgatctgcccgccttggcctcccaaagtgctgggattacaggcgtgagccacggcacccggccgaaagcctcaacggagtggtcaccctttcataagtggtgacgtcaggatctgtgctcctcttttccacttgctcatctctgcctgtcactccatctcagcctagattttagggcccaaatcttgccacatttgggctgttgttagtttgcaatggcttcatgctttttcatcagactttcaccaaaccctgcccaccacctgctgtgccaggccccatgagccctcttccctctcctgcctgctgggttgagctctgtggtccttacacagggccggggtgagtgtgtggcttcaccatggagaagctcattgtctaggcctgtagctgatggcagtccgctcactctgccaggcgcagggctgagcccaggcctcaccttgctatgccctcccctctggtctgccaggcaggccttggttccatctctgtcctccacacagggaaactgggctcagagaggttagtggctttgccagagcccccaagccaggagggggcagagagacaggattggaatccaagcccttctgaggccagagccgaaaggctgcagggggccctgcgcctgggcaggctgtgggtggtcagggcatagctgattgctcccctcgccacaggtcaccattggtatgttcctgctctctggagatccctgcttcaagacgtgagtgctggcacaggcctagggagcggatgggagcccagtcccgggcactaggggtggaggaacagggactctgggtgtcctctgttttcatctggtcctgaagcagggcaccctagtcacacctgtctgtcttcccaaggccaccatcgactgccaagtccatctccatcccaggccaggattcctccctgcagctgacgtgtaagggtggtgggaccagcagtgggggcagcagcaccaactccctgactgggtcccggccccccaaggctcggcccactattctcagctcaggtacagttcctcatctgtccgcccctcccctgctagcggcccgaggggtttacctccatgtcatgcccaggtccccagggagacgctgactgaggggagagtgatggtgggagggtgtttgcatgctcctgctgggctgatgagacctgatcaccttgtgcgtgctggctgtggtgctgggccctgagatcacagctgtgccttggactgagactgatgtggcctccccatcctcaaggccctgcagtctagcagaagaaacaggcctcaatcaagccatagataaatgcatgtctacctgcaaacaggataaaagctggggaagacaggcccagaaggtgggatccatctggggccagggaaggcttccctgaggatgtagtatctgagctgcattcagggggtgaggcacagtatacctggcagagggacgtgctgggagctcttgctctcccacatactctatgactttgactggccagtttgcgtctctctgtctcagtgttctttggaaaatgggattggtaatagcaattacatcccaggtcactttggggattaactgtccacatgtgggcacctgcccagcacatggtaagcacttagtgggcactctgttttttgtttatgtttttttagacagagtcttgctctgtcgctaggctggagtgcagtggcgcaatctcacctcactgcaacctctgcctcccaggttcaagcatttctcctgcctcagcctcccgagtagctgggactacaggcgagcgccaccatgcccagatataccttttttttttttttttttttgtatttttagtagagactggatttcaccatatcagccaggatggttgccaggatggtctcagtctcctgacctcgtgatctgtctgccttggcttcccaaagtgctgggattacaggcgtgagccaccgcgcccggctgggcactctgtttttattaaattatcactggtactaatgttatgaaaaatgtgaacgagccccaacccccagaggagatggtgtggcaattaggaggagggggtgttgccaggacaggaggctctggcctgcccccaagtgtttgctgggccccctcaaccctaagcagggcccccagaggtatgagccttggactgcctccaggctgattagtgaacaaggtgtcacgtgacaaccctgatttgtcccacagaatcagttagagcacaggcctcatgtggcccagcagatgcttgccgagtgattctgcctctgggaactgagagcagtgagagaccctctgacctcaagggcccagcttccctccactcccttttccactgcagacccagctagctgaggcccagaacagaaagctgggggcttcccagcacaattactctctccagcccctggatggggttccccagaagagagatgtgtctggggactaggccaccccagcgcaggtggtgccttcgtgtgaagtagaagaggcccctcccccaggcagggtgagacttgagtgcccacttgcctctggagctggcctccccccatatgcagagaacctgttggggacttgaaaagccacatagttatggatgggcacacaggccagcctggggtgtcacaggccagcctggggtgtgttgggcgggaaggcaggtggatactcagagccctgggtaggtcccacctagtcccttttgcctcctgctggggagtgccaggaaagtctgttttgaagttgggcttatgggtgacttgggacaggactgtgggcctgtccctttgggccagaccgctcgccctcaccatgtcccttccactccaactccgctgacccaggccccttccagcctcggggcctctgccgatgctgttctctgtgcctggaaagcccttgccctcttgaggccttagctggctccctccagcaatgtgtcctggaggtctgccattaaggccgtctccttggagaagcctcccctgtccccagactgggccagacccccagtaagcactgctccctgctgtgcacctctcactgcggttgtgggtagtggaggcagtttttgttcagcgttcttcttcctcgctgacctgtggtgggcaccccacccaagtgtgccctctgtggaatgaagggacctgggttcggagggtgacctatggctcaggctggttgctgctcctctgaacctgtttttcagtctgttaaatggcgccctgccatgggaggctctgtgagggcacgttgtgaagggcgacagtgagcagcactgggtgacccctgtcacctcaccccctgccccttcctgccttccagggctgccagaggaacccgaccagaacctgtccagccctgaggaggtgttccactctggccactcccgcaactccagctatgccagccagcagtccaagatctccggtgagtggctgcctggccctgcccccgtggcctcctccttcctcgggatcccccattgtgatgctcccctgcgtcgcccctgacaggctacagcacagagcactcgcgctcctccagcctctcagacctgacgcaccgccgcaacacgtccaccagcagcagcgcctctgggggccttggcatgaccgtggagggccctgagggcagtgagcgggagcaccggcccccggagaagccgccgcggccaccccggcccctgcatctgtccgatcgctctttcaggtgaggcctactgcttggtgccccctggagaacagacctctcccggtggtgccttgaacctccgcttctttacctataacacagggaccgtaaggtccccacctcagagggttgggtggtgacgattccactagctgatggccctgaagggtgcagccatgcccggcgtgcagcaggttctgttcatggctgctcttgcggttttgtggatcagacaagagcacgatctgctaggtggccttaggaagctgacttacctgctcattgcctggcatcctcgtctataaaatcggctcatgatggcagctgcaccctattgtgcatgtgaggtttcagtgaagtacagcacggagcgcacagggacattctgagcgccgctgcggctgactggcattattgtcgtcgttctgtgcttgtacctgttactgccctgaccgttgtgacttgtccccccacgacctgacccaggcggaagaaggactcggtggagagccacccgacctgggtggacgacacgcggatcgatgcggatgccatcgtggagaagatcgtgcagagccaggatttcacagatggcagcaacaccgagggtgagccgtgctgggctggtgggggcgaggccacctgctccaagggctggccctgccgcgctcagcctccatcctctcctgtgtccccacagacagcaacctccggctgttcgtgagccgcgatggctctgccacgctgagcggcatccagcttgccaccaggtagggcaggcttagggaggggtcgtcggggcggctggggcttgggggtgagagcagagtccccacagtccactcacctggccttgaacgccaaatcttgtcgccacagtgtgaccctgggcctgtcatgtctctgaacctccctttccccatctgtcaggctgtgtggacaccaccacctcacctgggagcctggggcagtgagggcacggacaggttcggtggtttcccacagttcacaaggtcacctccagcaatgcctggtgcagggctcagcacatggcaggggcctcacacgcatttatttagaaccctcccttctacttcctcccagctccagggactcgggaagaatggtggtggtgatgcctcatgggtttactgaacaaatctttccctagcaccagctaggcactaggccctaagtgaaggcctggttcaatgcaggctgctgcctacacagcatccacagatggcaggggtagatgggaccaaagttgcgggaacgacagtttatagagtgctgcgtcacagacattcatttggagcatgttgactatgtgcctggctctccatgtgctttggctaaccaaatgaatgagcgagtgagcgaatgagcttcccacaggcgggctgctgagggcaggtggggagcccgcctaacatccacatccccagggaagaggcgtggccaggccgctgcgcagaggctaccctctcaagctgctctgctgactcctgctggccacggcctggaatggcagctatcacctcccagtagcctcctgggctgctctcgggtgggggtgagggggcggtgagcaagaaggaaactgaggggctggcttccttatgggtttgtaaacacacccctccctggccccctctgaaaatgaggaagcatcttggggaaagaaaccaatctggttgggagcgagatcacagcagagctacatgctgagccccgagagtccccgactccagggctgggcctgggctcggcagggaaaggagctgaccaggtttcctgacttcccactgccctcttggtcaccctcacatccctctgagcctcagtttcttcacctgtcaagtggggcaggatgcagtgactccctgccgaggtgaccgtgaggatggggtggcacagccagatgtgcccggaagggctctgcaggccccacagactctgatgcttactatctgtgtcactgtgggcaagggacttaccatcgctggggcacggttttagcccctttgcaacacagggctggttaacagtacctgcttgtgaaacacctccagaggcctggtccagtggagcgctcaggaaatggggtatcgagggggacatgctgacctgtctctcacctgcagggtctcttctggggtctacgagccagttgtgattgaaagccattgaggagcaggtgtccgggctggagaagagtcctgctttctctggagtccagacctgtatcattccatgaggaactttccccttcagatcacctctgcgccacatctcatccatgcctcctccatgcactccagtccacactccccgtagcatcattccattgcccctcccatccatgctgggaccctcctggcccaccaaggcccaggcaccactgtgaatattctcctctgaaccactagagggcaggccaggcaggccaggcgggcccgtgcagcttgtgggcaagaaggagctggcaaggaccggcgctgctggagactgacccagccctctggctgaggacatgcagcggctcctaaatgtagagatgcctgtggctgagggggcctctctacctgtgtccccactcactccaggagcactggctttggtcacgtcttagcagcagggccttgctccgttgttcccttgccctggtggtgggggggccagaccacctccggaatcctgccacctgtgactgtctgactgcttagtgcttcagctgtcccttccttgtgtcctgggggacctgctggcggcctcttcctgggagccatgacctcagaccccacccacactccagatcgagacccctgcctccccccggcaaatgtcctcccgctgccttgcagcctgcactttgcacatgctcacccccagcacagtcccactggcccctcacctccccttccctgagctccttcccaaggactcctggtcactgcctgctgtgcagtcagaggcccagggtccagcagcccggcgggaacgggtgctgcctcttcctccagttagctccagctcaggtctgagacccgtgctgagaaaggtctgagcaccgaccgtgccctctgcccagggctgggtcctgagcagctggttttcctgcaggaaggttggagcaagcaaagtccttctctgccctcagggtcagctgcccagactggggcggatgccagagaggcaggtgggctgtggctggactggtccggagctggcttccttaccagaaaagcctcagccttcctctggaagcatcccccgttctgggcaagggggaagggctcctttaaggggtgtgctttcccagtggggagcagtctggccctgccccctactaaagcctctgctctcagcactttcccccaagtccttgtaacttgcttgaaggtgggttctggctgccagccagtccctggacaaactctcctgccccttttaaatttcactcattttgtataaacccagcaggctggtgtttacttagccctgtagcttttttcattttttctttccgtctttcttcttgagttcacggttcaatattgcctcctcgccctggtgaggggaggtgctgcttttctgccccacctgccggctggttccagcagcgctggggcccagctggggggccgggatgggggcttctctctctgggaggggtgcaggtgccctccccaggctgggagggttccttccctagctccccatctgcccccgctggtgagagttgggcttcttggtcttggaactccctggcattgggaacagagcatttccagcatttgttgttgttttactcacctaacccttagaaaatgaatgttagaaggtgcctgccgaggcgggacagagtgttcgctcgcgctggagaaggctctgctcagccctgagagtcccttcctgccccaccgatactggcactttaaaaaggaagctgaccgcacagtgtccagacgaattggcccccagaagatggggagttctgtcctgcccttctgtgtctgcgtgacctcacccagcctaggagggaggtgcattcagggtagatttgcctctcattcaaagttctggggctttgggtggaaaacagccagctttggcgctgttggggagactcctccagaccaggaaccccagaaggagacagagcctgccacatcctcccacgccaggccctgggccagggtgattggactgagaatttggccacaaccaaattgatgctggctggaaccagaggccagaaagcctggccttgtccccatgtgggagccctgtcctcagccctcttgtccccttgagctcagtgaattcccaccaggtgcccacagctcctggacttcaaattctatatattgagagagttggagagtatatcagagatatttttggaaaggagttggtctatgcaatgtcagtttggaatcttcttgaaagtttaatgtttttattaggagatttaaagaaaataaaggtctacaatatctttaggttttttttttttcctgtttaccgcacaaactgaccacatggcatgtctatcaggatggagggtgtccatgttctcctctgtctttagggaggtgataaggagatgggcggaggggtgtttttttctttgactcccctcctttctaacagaatgttgccaccactgcttgagtgggctgtgtttgttcctctgtcccagcttctgttgtagaaaataacattgttaggggaactcaggctagtgtcagcgtcttggtttggggagaaaaaattaaatgtttcggtttttgtttcttttgctgttttgtttttaccttgttactttatcatattgactttagggtcaaaggcaacatcagaagaagtcagatatgtatagtgacattccaggggtggggaaggtgtagggatccagggttctcccggtcttggccacaggcacaatcatcaccttcatcgttccagattcctggggagaaaactgagaagatcgttacctgccagcctcatacggagcaaaagctctgtcctcagggccaagttctaaccactgctctgtagaccttctctgcaatcaagtggcctctaaggagcatgcctgaggacaaataactgcgcctcagtttcctcacctgcagatggggttatcaaataacacgagtgtgcagcctgacctgtaggaggtgtgagtgtgttcccaaactaaagccccaggctgccatcatttacaggcttggcttgccccgggcccctcacccccgtttctgaccatcccaagtctctctgggacaggcaagtcactctggttctttaataagcttggaggtgttgggaagcttcagtggtactggccaggccaggaggaatcaggccaccagggctccatctctatcctgggatagcattcaccccactcctcctcagggctgaccccgactcatggcccctttaaaccctgaaggccgattctgccccttcctctgttatatgcacaactgaggaaggaggtaaaagtgggctcctaggtgagcccaaagtctcctgagagataagggaaaagaattggactgtaggtttaaaaaagttgctcttggccgggcacagtggctcacgcctataatcccagcactttgggaggctgaggcaggaggcagatcacctgaagtcaccctgaccaacatggagaaaccctatctctactaaaaatagaaaaattagctgggcgtggtggtgagtgcctgtaatcgcagctactcaggaggctgaggtaggagaatcgcttgaacccaggaggtggaggttgcaatgagccaaaatcgcgccattgcactccagcctgagtgacagagcgagactccgtctcaaaaaaaaaaaaaaaaaaaaaagttgctcttgtcagctttgggagggcagactccatagttggagatgggcttccaaccaaccaaggagataaatgccagagggagcgaaccatgccaggctcaaagcacatctctccccaaactccccaggtggggacagcaggccaaaggcctccacataacccctcagggaggcctggagtccagatgctgtactccagtatctaaacaatcactcaatcttaaagctgacaggttcaaagctcttactttgggccgagcgcagtggcttacgcctgtaatccaggcactttcggaggctgaggtgggtggatcacctgaggtcaggagtttgagaccaacctagccaacatggtgaaaacccatctctactaaaaatacaaaaattagctgggcgtgttgacacgtgcctgtaatcccagctactcggtaggctgaggcagaagaatcgcttgaacccaggaggcagaggttgcagtgagctgagatcatgccactgcactccagcctgggtgacagagtgagactcccgtcttgggaaaaaaaaaaaaaaacaaaaaaacctctttctttgggccaagcctccactgagtgccagggatacagcagcaacctcagaccctaccctcggggctgacagggctggatcaacaattgcatcagtgaattaaaaggcacaggaggctgggcaccgtggctcacgcctgtaaacttttggaggccgagttgggaggatcgcttgagcccaggagttcgacaccagcctggataacatagaactccgtctcaaaaacaaacaaacaaacaaaaaaaacgttcccgactggcttccctgaggaacgtggcgtcccagtgagaccggatgggtgaggagcagccggcctgtgagtggtgggggaccgcgttcctatctcggagctgaagaagcgtggaagatgatctggcccaacatctctttgttctcagaggaagggccttccaagaccggggaggggcctgtgcgtgggtcccggtccgaaacgtgtctgggctgctgcgagagacagtcggtgaaggaagggaggggacatccgaagggtggcccgggaggccgggcgatggtgaggagggcgcctcctctccaccaaatcctccccatccatgcgggctagggacagaccctcccccgcccaccctaggctggaaagtgaacgttctctgcacctctcccacctacagactaagtagggcacccggtttccgtgtcggcttcaccactgactcggaatgggatctacctttctctgagcctcacttttcccatctgaaaaatggaacttccgatcccgcac

SEQ ID NO: 609 - DNA, 1316 bp, Homo sapiens
cggaaccggatgtggcttgcggctcgggtggctgagcgcgcggggaaatggtgagattggcaccgtgtgccggagataggggcgtctgggggtggggtcccgggtctgctcaggagctggggcatgggcacttggaacggggattgctctcccgcccccactattgtacggacgacaacgcggaggcctagcattctctcccagcctagaaactgatccctagtcagccctctaccatctgttgaatgggaagcttagaccgtgatcgggccgcgacgccccgcttccattagtgcgccgaaatagagggtcacttcgtcagctgagacctcccttttctccaggccacggggacagaccaggtggtgggactcggcctcgtcgccgttagcctgatcatcttcacctactacaccgcctgggtgattctcttggtatgtcattctccccgtccgctgctcaccttccccgagccctggcaccgccagagcaactactatataggctctaggcacggcgctggcttcattgcctgcctcatctcttgaactctccagaacaactctatgaggaagatgccagtggtaccgcattttatagatgagatagctgaggctaggggagaaggatctggcccaagattgcatccttagccgctacacttataactctgtttccggcttgctttgacttttgggggagttctgttccttctgggttagcctgctgactcttaggcatggcaaacgccagtgatatttgtgaaggcctttaggatatttttttcttgtgggaaaacttgttggttattgcttaagaagtgcagtgtgtctggaagtgcagaacttggtatcctttagagaaaaaatattagtgaagaagccctggaggcccaggttgggagtcagtcgaggattcctcaagtaccatttgctaggctgtgaggtgccttagggcaggtctcttgtgccctgttctcttgtccccaccaccaacctatagcaggcaccaaagcaagtgcccggtaaataccaataagaaattaaggaaagaaacaaaccacgacacccaaatgccgtaatcttaaagaaaagcaaatgcagtcccagtcctctgaatgggtcagccccttagatggaggaggtgggacgtttgggcttgggggctcggcaaggcaagcaagacacaccagagctcttccctcgatgccagccattcatcgacagtcagcatgtcatccacaagtatttcctgccccgagcctatgctgtcgccatcccactggctgcaggcctcctgctgctcctgtttgtggg

SEQ ID NO: 610 - DNA, 309 bp, Homo sapiens
ttcttttcttttctttttttttttttttttgagatggagtctcgctgtcgcccaggctggagtgcagtggcgcgatctcggctcactacaagctccgcctcccgggttcacgccattctcctgcctcagcctcctgagtagctgggactacaggtgcccgccacctcgcccggctaattttttttgtatttttagtagagacggggtttcaccgtgttcgccaggatggtctcgatctcctgacctcgtgatccgcctgccttggcctcccaaagtgctgggattacaggcgtgccaccgcgcccggcc

SEQ ID NO: 611 - DNA, 11003 bp, Homo sapiens
gctaggagacctgttctgatgatgtgtgtggtcctcaccacactgccctgcctcaccttttccatagcagtgactgaggtatggaatttttgatttcttctgctacaagattatgagattttataatttcttgttattggaatttgatagagcagcgtgctcaacaaatttcttgacatctatgtaatccaatcttcttccaggttgcaatatatgttatttaaagtactgagatcattgttacctctgtgattgtgaaggaaagtctagtagccaatttttaaaaattaattttgtgtttgtgtgtgagacagtaatgatatttgaacgtttaaaaagtgaaaaatgtgaaagttgatctatatttgtttcttctaccaacctgatgtttttcatgattgtcctcaattgtaaatgaatacaacaagatctaagggaaggaccacttacattttaatacctttgataagatgtccattgataataatttgcatgtgttatttatttgaaaataatactgagtttatgttttgactaaatatagcttcaaaagatcttggatagaaaccagcagggcaggaatatcttaggcagaactttcaggcttgtaagtacttcattatccaagaaggtcagagaagaatgccccactaatcttattgatttgcaaggtgctgtggaagataacttttattttcccaaagcatacttaatttactaaattacttaatttaccttgtgatatttcacttgtatgtgaagcaaatattcattaagtatatattacaggccaggcactgttaggtacagggcataggggacccaggaaatatggccgagtctctcatataattttctgacattagagagaaaaataaacaggcaattagaacaagtatcacaagtgttgtgagacagggcagtaccgagtaatgtatgacattagaaattacatggttgttagaatgcattgtaggtgctgctagaatacatcatagatgctaaattaggacaatgtatgaaggcatagaataattttgggaggttactcacatgtgctttgcttccagtgaactgcaacagggaatatttcaatctagatctgtcttttcccctctcaaagaccttgtaaatcatttggaaggttctcaaaagctgtaaaaatttagtttacaaccttttaagaaacatcactgcggtaaactgatggcatatctggagctcgatagccctttttggctcttttttatgatgtctcttccattgttacatctttttctttcctttcctttttttcttacttaattttcaccgaagtataacacataaacagaaaagtgcacgaaacatacaagtacagtaacaatggaataccacaaagcaaccccctgggtaagcatcgctcaagtcaaggtcaagaaggaaactttggccggctccatgcccacactcctttatttttatttattattttattttatttttgtatcagaaacccattgcttgctcactctttttttatgctcctttcaatgactccctttccctcctttccagaagtcacttctaacttgacttctgatactgcaggctagtttgtctgtttttgaaatttttccaaggagaaatcaaatgatgtctggcttcttttatttaaaatatggttgtgagggtcattcctgtttctgtaaatacctgaagctcattcgttttcagctgtagagtattacattttatgaaaagatcataatttacttatctgttctactcttggtcgccatcttggttgtttccagttttggcaattacagagaatgcggcagtgaacatctgtgaatatgtcttttggtgtgcatgagcaagcatttctgttggttatgtatgcaggagcagaactgatggatcatgagatattgaaatgttaaattgtgagagataaggtcaaacagcttttcaaacagattgtactgatttctatagcatctctatagaactcaccagcagagaaggagcattcaccagcgcttgcgttgtttcttatttttttggagacagagtctttctctgttgcccaggctggagtgcagtggtgcgtgtgatcttggctcactgcaagctccgcctcccaggttcaggcgattctcctgcctcaggctccccatcagctgggattacaggtgcccaccaccactatgggctaatttttgtatttttagtacagacggggtttcactgtgttggccaggctggtctcgaactcctgacctcaggtgatccacccgcctcggcctcccaaaatgctgagattacaggtgtgaggcacccctccaggcatcattgtgtctttttatttcagctcttctggtgggtacgatcctgaatctcactgtacttttaaattacatttctccagtaattaacaatgttgagcatcttttcatcttgcccattttttattgtgttgcttatcttttaaaaacgtatttggaagacttattttcatattcagattatacaagccttttttgattatatgtattgcaaatatctttatgtaacttgtcttcacacttttatatctttttgatgaaaagaagttcttaacttaaaaatagtccagtttattgctttcctttatggatagtgcttgggtcactcacttgtagaagattttgtcattgtgaatctgaatttcaaagtcttaaaatctttcatatatatatatttttgtttgtttgtttgtttgtttgtttgtttttgagatgaagtgttgccctattgcccaggctggactgcagtggtgcaatctctattcactgcaacctccaccttctgggttcaagtgattctcacctctcagcctcctaagtagctgggacgacaggcatgtgccaccacacccggctaatgtttgtatttttaatagagatggggtttcaacatgttggccaggctggtcttgaactcctgacctcaagtgatttacctgccttggacccctgaagtgctgggatttcaggtgtgagtcactgtgcccagcctcctaattatattttgaaagctatattgtttcttcattcttttttagattcacaatacatctggaactgatttttgtatatgttgtacagcagtgagttaatttttttccccacataacattcaatggaccgagcaccattttactaaaaaatccatccttcccacatttctctgctgtgccacctttgttataaatcaagtgtagatatacataattcctatgccaactctacactgtcttagttcttgcagctttatactagttctttatatccagaagagtaaatcttcctagcttattctttttcttccagaatttcctgcctttttaattttcatataaattttattgtcagcctgtccttttccacaaaaagttgcaacagtggttgaagttgcattgaatagtatcatttttccttccttcctccctccctccttccctacctcctttctctctctctctctctctctctctttctctcactctgttgcccaggccagtgcaatggcatgatctcagctcactgcgacctctgcctcctgggttcaagcaattctcctgcctcagtgtcctgagtagctgggaccactggcatgtgccaccatgcctggctaattttttttgtatttttagtaaagatggggtttcaccaagttggccaggctgatctcgaactcctgacctcaggtgatccacctgcctcgtcttcccaaagtgttgggattacaggtgtgaaccactgcaaccagcctacactgtttatttcattctctggcgcattaccctggctaagacctccaggacaatgttgaacagaagtggccatggtggcatctttgtcttattcctgatttcagagggaaaactttcaatatttcatcattaatacaatgctttccatagttttttgttattgtggtttgtttttgtttctgttttttgtggggcagggtcttgctctgtcacccaagctagagtgcagtgtcacagtcactagtcactgcagcctcgacctcctgggctcaagtgatcctcccatctcagcctctcgagtagctcgaaccaaagatgtgtgccaccacacccagctaatttttaaatttttcatagacttgggttctggccttgttgctcaggttggtctcgagctccaggctcaagcaatcctcccacctcagccccgcaaagtgctgggattataggtgtgagccaccacacctggccttgccgtagctttttgtaaacattttaagcagacgaaggaagtgtcccaaagtctagccagaattatctgagttctgtcttcttggaagactctaaatgttcatatttgttcttctagctctttgaggctggattcttagaagctctgctcagcagtagagttggaaggagttaccccttcaatattacagggagcccactactgttttttgcatgtatttaccaaggtctgtctttaactgaaaatatgcttccattgatatgagtccttatgacagctttagaaatgattcaaaaccttgtggcatttaaaacctgatgagttaaaaaccaaccttctagttttttagtaaatgtaattataattaatttagtgctgcattcagactattgaaagcattttgagcaaagaaagcacaataatttaatgcttgtaaatggttttctctaaacaggttcaaaagagcattaatgggtccgctgatgtcttacctgatatgttacctgacctgcccgtatctctggttctgttatccctgatcatggttgatattattgaaaaactcaggatatatcctcttagagggagtcaaaagagtaagtgttcttttaaatgtgaatattttttaaagtttgatatatttttcacatttctgccactgtgttatctgacaacatgtttaatgataccttttcttagggctaacattactgatagaagattgcaaatgaagatatctaaacataattatttttaaacctaccttgatagctagatagctgcttttgtttgctattcgcattttagtagtactgataaattaaaaattatcaaatagttaataccaaaaaccttaatgtttattccagcaagaaattatccaagtaaattattatagatgtatatttttctaggaagtctcttaaagcttatgtttaaatggattaataaaaagcttagtttggagacttttactacaggaattaatatgactgtggtagttgtgtcctagataatcatgtgtttttaattgtgaattataaaaatgccaaagatcacactaataaaaccaagatatggctgggtgcagtggctcacacctgtaatcccagcatttttggaggccaggatgggaagatggcatgagctcaggagtttgagaccagcctgagcaacatagcaagacaccatccctataaaaaaataaaatttaaagaaaactcaacaagatgtgtcacatctcctccaaagtgatgagttgaaactaaatacagattggcccttacaaaaagatattttgttaatggaatattttatttatttagtcgtaaattactccagctttcattaaatttcttgcggtagtatctgtgtttaattggcaatatttgtatgctagttactgtgtggctaagattttgtcatgttgtgcatttgaaatgggtaaggtttgtcaggttgttttctgatggggtgaatggagtcaactgagtgagcctcaggagacagcttcagagtgacggggtcaccactggggctcgtcagtcatttatgggtcagatatcagtaccttccagtcactcttgctgctcagatggaaagcaaaactgaggtggaggccactaggaagttggagaatctgagcctgtcactttgtacttcatcctcgggtgggagatgacggtctgttatggctaacataacacaggtgacatgtaggtggataagatggcagccggggccatctgttgagtggaaagcacacccaagtcacatctgccctccagagtcaagcgtatttgtcttaaactcaggagagttgggaatctccaaatcctttgctacatctctagattccttaaaaatgcaaatctatttttaaatataatttttttttcaatttgagctggggtcttgctatgttgcctaggctgacctagagttcttgagctcaggagatcctcctgcatcagcctcctgagtagctgggattctagctgtgcacggctgcacccagcgttaaattggatggtttctgatgactctgtattttccatattaatataaatttcctgtccaagttaaaaggtctttttaaaaaagaaagacacgtgtatctttttgggaataagttaataacattttatttttgttagtgatgagttgtttttttgttttgttttgttttgtttttgagacggagtcttgctctggaatgcagcggcatgacctctgctcgctgcaacctctgcctcctgggtttaagcaattctcctgcctcagcctcccgagtagctgggattgcaggcatgtgccaccatgcgtggctaatttttgtatttttagtagagacagggtttcatcatgttggccaggctggtctcgaactcctgacctcaggtgatccacccacctgggcctcccaaagtgctgggattacaggtgtgagccaccgtggctggccattagttgggtttttaaaggggaatttccttgcatccataacttcaataatgacactgagaattgaaataagacatctaaagaagaagtagatctgggggagaagactctagcacaatttgtacaactgcttctcacttgaagagcctccttcttgagctgttctccgtccaaatttaggaagattagtgtctggtttgatagttccaccgtttaataaattcacacttaaaaaaactagcagtcacttgaaatgcctttgtaaatatgaatcatacatgcttttaatttgtatgcaaagaccttgaacccaaattgtctcctacactcattttaacatgaaattaatgatataaattatgtaaattttgaatccatgaggttttctcatttattacttggaacatgaattaatatatgaatacattaacatgtaaatcttaaatacataaatctgaacctaagcaaatataccataaatatggtttcactacaggtgatacttgcaagtaaaaaaaattgactagaggcgggggatgaacaagatctagaataatttggctccctttaggaaatgtgggaaaagtgaatatgttctttgctctttccagatagtctgaaatgcatacatgtctgtcagctagcagcagtttggactttatgctagatgaaaccaacataatctacaacgttttgatttatggacactctcacagcatcctaaccatcttcattccaagctacaaaacttttatctttgtgtagcttttctttttccaaaattttaaataagttattctgctgacaaaatatgcttatgcttaaagcagtcttcaccggaccaaggaatcctttctactaacttcgtattaccagtggaaatctctcagtatcaagtaattatcatgcaacagcttctaagtgcatcgtttcatggaggtagagcagtgcatgggagcatttttctgacgcgtggatctctgtagcacggcagtctcacagatgtacgtggtacctaggaatgccaatccccagtcccgtgcagaaataacaagaatacaaaggatagcctgtgggtacaaatgagcgcaccttaatgcttccatttgaattttgctaactgaatcccatgtattaacgctcatttagcattgcaaccatacctgtttctaggacattaccatttttacggagagatagataggttgccagctctcactccaggcccagctccctggcaatcatgaccttgaaccacctagaagcaaagtgagcccccatctaaggtcttgtgattgctgctgctgctctgggcaatttcagctttgtaggcagagtgacccatcttggtggggtacacactggtttgaggctcaacagtaaagaagaggactttcatctcctcttcttcactgtcttttttctgctcccatttaattaattagttaattaattaattttttgagacagagtcttgatcctcctgcctcagcctcccaagtagctgggaatacaggagggcaccaccatgcctggctaatttttgtatttttagtagagatggggtttcaccctgttggccaggctggtcttgaactcctgacctcaagtgatctgcttgccacagcttcccaaagcactgggtttataggcatgagccaccgtgtccacctgctgctgctgttttaaaccagacccacagtgggtctcctgtgcccttatttgttggtccagacccctgactaccttgctgcatctgctttgcactcagcttttcactctcacgtgcaaacccctcagcatgctattttctaccactcctgctcggctctgctctaaatgctgttggtgctgctgttgcttgtgtctgggatattggtggatgttttgctggtgctttagactgacttcctttcttctgctagtgggaatattggcttcctgccaccgagttctagttttctaaagaggtttcaggcagagcactataataactgtttttttcttggaaacaacagccttttagcccttagagtgtatatgtaccaacaaattggctgggcttcagtgatttcaggtagtggccattctactcccctggaaaccaccatttcccctcccacttatagaactcgtggctgaatgtggcagagccagactcctttgaggcagcttttctccatgggggtctcatagatcctcaaatcaggcttagctatattgcctgaacctcaatccttgccatcgttagagtcctctccttgtcactacctagattccttaacccccatcaaaaccagtgggtgcaaacagacctatgaaagtgtccatgattagagagagagttttcagtcctaccttcaagactcatttgaataggacttgcagcccaggccagacatgctgttacaaagtgctacaatagattttaatagctaaagtactatggtgccacagatgaaggaaaacttcattttatctaaggtgatgaaggtaagagaagactaaagggaagatcttgggtttgcaggagtttgtaggtagacatggtaaagaaagctttctacatagaagaaaggttgggcctccaagaactaaggcgtgtatgtagcaaatggccatgtttgggaagtgaaaatgaagcagtgttgttgtctggggtagatacccaaggttcgtcatcttgtgccaagaagattaaggacatggacacacacaaggagtgagtttaggagcggaggtttaatagacaaaagaaagaaaggagagcagctctctctctttcgagacagaggggctcctaaatgggaattccagccatgacagagtgcaccgggttttatagacaggctttaggaggtggtgtctgatttacatagggctcagagattggttggactgggtgtgatgtttacatagcacccagaaaaggctggtcaccccaccgtaatcttattatgcaaatggactttccacttggctggtgccatgttgcctgctcctcactgtacatgcagctggcaaagagaagggaagatggagccaccattttgaccatgcctagtcccaggtggccttttcctattggcacagctgccagcattcacctgtacacgcttccagcttgcttgtctgtgtctgcagctcgattttacaggctgctgtttgttagaaaatgatttgggagtgcttttcattaaaaggaaaaccttaccaaggactcccgtaccctcatatctgcctaaataatttcttcttaactcctatatcaaaattaagcttggttggatttcacaccttgaatcaacaaacctggtgctgggaggcaagtttccttcttaaaactgactactgttcatcaaattgtcatttcagaaacctacaatgttacttcaagagtgactaaaaatttgcatgcagcccggcgtggtggctcacgcctgtaatcccagcactttgtggggctgaggttgggggtgggggggatcacctgaggtcaggagtttgagaccagcctggccaacatggtgaaaccccgtttctactaaaaatataaaaattggttggccgtggtggcatgcgcctgtaataccagctactggggaggctgaggcagaagaatcgcttgaacccaggaggcggagattgcagtgagctgagatggtaccactgcactccagcctgggtgatagaacatacctctgtctcaaaaaaaaaaaaaaaaaaaaaggaaagaaaatttgcatgcgtgtgtgtgttgtatgtgtgtgtttgggagaagggagagcttcatcatgatcaacaatatttttgtgtgtttaagagttgatgttttatgtgagatttcatttgggggaaaaaaaagcttcctctgctaaatgtttaaaaatcattaacctagggcttcattcagcattgtaaccgcacctgtttctaggacactaccatttctatgaagagatagataggttgccaactctctctccaggcccagctccctggcaatcatgactgcaccacctagaggcaaagtgagcccccatctaaggtcttgtgactactgctgctgctctgggcagtttcagctttgtaggcagagtgacccgtcttggtggggtacaaactggcttgaggctcaacacctttgaaaaacagataaaccttttaacatgccatgttgaattttttctttccaatgttgcatttttccaaaagaacacatactcattttaaaaagttataaaatagagataaacaaaaaagaaaagg

SEQ ID NO: 612 - DNA, 279 bp, Homo sapiens
gagacagagtctcgctctgtcgcccaggctggagtgcagtggcacagtcttggctcactgcaagctctgcctcccgggttcacgccgttctcctgcctcagcctcctgagtagctgggactacaggtgctcgccaccacgcccggctaatattttgtatttttagtagagacagggtttcaccatgttagccaggatggtctcgatctcctgacctcgtgatccacctgccttggcctcccaaaatgctgggattacaggcgtgagccaccgtgcccgg

SEQ ID NO: 613 - DNA, 7720 bp, Homo sapiens
agcctaacatggcagaccagagacagcgctcactgtctacctctggggagtcattgtaccacgtccttgggttggacaagaacgcaacctcagatgacattaaaaagtcctatcggtaagtggacaagtgtggcccccacatccccccaggaagacacacatgccccgtgtggtttagtctgcattttaccaagaaccattgcacatactttatcctggccgactcagcgttgaactggtcacagctcggtaacacctttgtatgtgtaatgtactccttatagcttaaagttatggtattcatgttctcttgccaacaaaaaatagcacttagtagaaactgacacactgtccacagttccatagggagtcagggtctgaacctgtttgaggcctcacaggagccgcagagcgctggcatggtcctgtggtctccttgttttagcacagtgatgacagagacccctcactctgttgtggccttctgattgagcttgaagaactgcactcttgggtacagtttcattgagtaacctgtaagagacaccatcactaatccagacaattcagatagtcctcctctcgtgtgctagcatcgtgtagttcataaaacacttcttaaagtgccatcattacgccccgccgtgcttaccgttcacttggcacttgtgcagttagcggctgggacaccagggctggccttggtgccgctgaacttagatgtgccgtggcactcacagcccttggggctccctcctctgaggctgggtcagggtgaggaggtttacctgaaacaaccgcggagcttgcttttgtctctggcccctgcagccctggagagtcggacagtgaggtggcctgggtggacctgccttccactgcacccggcagtgcgtgcgggtgggatggacgcggcggcgggtgcgggtggaacaaagtccagggtagagccaggacatggttttggtttgcaggaagcttgccttgaaatatcaccccgacaagaaccccgacaacccggaggccgcggacaagtttaaggagatcaacaacgcgcacgccatcctcacggacgccacaaaaaggaacatctacgacaagtacggctcgctgggtctctacgtggccgagcagtttggggaagagaacgtgaacacctacttcgtgctgtccagctggtgggccaaggtgagggcgagctgcctgccgtgcgggcacccgagtcactcctgccgtgcgggcacccgagtctctcctgccgtgcgggcacccgagtcactcctgccgtgcgggcacccgagtctctcctgccgtgcgggcacccgagtctctcctgccgtgcgggcgcccgagtcactcctgccgtgcgggcgcccgagtcactcctgccgtgcgggcgcccgagtcactcctgccgtgcgggcacccgagtctctcctgccatgtgggcacccgggtcactccacgcctgcagggttcccagcattgcagagcccatgcgttgatgccagcaactctacactcctgagaaaaggcttctgggcatatggagcctttctcctcacctgtgtgatgggcgaagctctgtcactggcttggtgtcctgcctggaacaagccatagcgtacagattgtcccagggaagagccgtgcggagccgccagggtttcttctgtaaatggctcccagtccttcgtgagacaggaggaaataagcctcgatgttacatccgcatttcttcgtttcctcgttttgttccaaatgtcatatatgaggccagagggttggaatcactgcatggcatttgtgagaagcctgtatttggctttgactggtcggcctcctcactagaatccttataaagtactttttatttagttaatgttagacagagtctcgctctgttgcccagactggagtgctgtggtgagatcctggctcactttaactttgaattcctgggttcaagtgatcctcccacttcagctccagaactgcaggagttgaggcgtgaaccactgtgcccagcctggaggctgctttgttttttttttgagacggagtctcgctctgtttcccaggctggagtgcagtggcgcgatcttggctcactgcaagctccacctcccgggttcacgccattctcctgcctctgcctcccgagtggctgggactacaggtgcccgccaccacgtccagctaattttttgtatttttagtagagacagggtttcaccgtgttagccaggatggtctcgatctcctgacctcgtgatccgccagcctcggcctcctggagtgctgggatgacaggcatgggccaccacgcccgtcttggaggctgcttttctttaagctgcgggtttctttctgtctctcctcctcccttcttcagttctttccttctgcttcctgtctggaaggcagtatccccacctggaacgcaccccctgccttctgctgagggcatttgggagtcctgcgcctccctctccaggggcctcggaggccatgcaacaccaccttcttctccccccaggccctgtttgtcttctgcggcctcctcacgtgctgctactgctgctgctgtctgtgctgctgcttcaactgctgctgcgggaagtgtaagcccaaggcgcctgaaggcgaggagacggagttctacgtgtcccccgaggatctggaggcacagctgcagtctgacgagaggggtgagtgcccgccccagggcccgtgtgtgtgtgtggggcagagccagaatgggccctgaatggtgtcaacctgtcttgtcaaacaggagggcactgacactgtgccgcgagtgtttgtggtggcagctgggactgttgaggtgtgaacgtggaccctgaggtaaagcaggcgcatagagctgtccccgccgtgacctgcggtagccgtagatcccagggactgcgaggcggggcagggcggcaggcagttggggcggggctgagggccgagggctggcggtgacccaaggcgacggaggaaagccgtgtggggtggaggtcagcgagtagcctctcccggtggagagtttgtccaggtgcccgaaagtcgctccacaggaccagcgttgggtgcgcgccaggctgtggccctcgtgcagtgccctgtgtgcttgcttttcagaggccacagacacgccgatcgtcatacagccggcatccgccaccgagaccacccagctcacagccgactcccaccccagctaccacactgacgggttcaactaaatccaggaggagctgtggtcagaggaggagccggcgcctggccacgccaaccttagaatcatgaactgtagtcacagagatgggaaggcagcctcctgcctgccctggccttgctggggcccctcctgcctccacgcccacccagcgtcgacccttgacccacgaagtgcgtagcatgcagtatttaaagcagtgtagctacggtcttctgtttttttcccttttttaatagcatgtatggggttctgttccatgtctgtgttgtggacattccgcggcatgaccgcgtgaactgcacggtggagctgcctcagggctgtcggtcaggttggtccagtgaggggtgactgcagccggtcaggtgggcgaggagaaggggggctgcccctttcctacctgtgcttgaggggccggaggcaggtgctgcctggcagagctgtgttaccgtcttggcctcggggtctggtccacactctgtgctcccagccttgaggctgcagtaggactctgatctcacctgccagaagagaggcggggccgcgtcctcctggcgtcaccggcgtcactgtcattccttggtgtctgtgctgggcatggttggcttgggggtctgtggtttcctgggccttgtggcagggtttctcccgtgggagaatttggtgtggaaagcataggaggccccttccgaggttgacaccgtgtcctccgcggtgtttctcgcctggtcgtctcgtcgtgtggacgctgccgttctggttctcggaggtgtgtccttcgccgtgttggggttatttgtctgtgttcctgcacttttcccgggctctgagctggattgatggggccagtctcccccctcccatcttgaggtcgttctccacattccttccagcacacctgtcctttccatagccctttttggacctttagaaccacagatgataggaccagcccaatgagccacagtcagagagtagattgtgcatgtgtgagcacccagctactggggacgggggctctcccacgacccctcctcctgtgtttgccagagctcccatctgccccactcgcctttgccccgtcatcgatgattcaggcagagccagattcgttaggtccctggaggaaggactgactggaccagagggaccctctggctcaggagggttgggtccctgggaggccggcagccaggccacagaatccacacgtggaccattgtgggtccctgggaggccggcagccaggccacggaatccacacgtggaccattgtgggtcccttgggaggccagcagccagactacggaatccacatgtggaccatgggaagtcagtctcttgcgtgtcctagaccttgtgggtggcgccctgcataggggagcagggggaacgggtctgatgtccctgtgctggctgagggctcagagctgcccgcactccgtagctcatgggatgtgctgggcctgcctttggcgccatgctgcagactccagtgggcctggtttctgcagaatgtccatggtggccgctgcagagttgcagaggtccctgtagagataaagctgaggaggaggctgtgtgtgatggctctggctcggaccaaccagatgagcctcctgaagcccccttccctgcctgcctgctgacccgtggccccagctcactcattgccctcagcagccacccgaggctgtgcagaagggtaggttcaggttgaccaggaagctgccaaaagggacatggatatgaggatacatctggacgtgcttaggaacagggtgctggttgagggcccccagctgacccctactgcagatccgcatgtggaccatgagccggctgccagcactaggtcctgggcagctttgtttgtcccacttttctttgtttcttctcactaaaatgatcacgaagacctttgacaagaggagagatatgcactgtgatattaaattagaaataatttatcaaaatcagacctctcctaaaagaataagaaattcattgtttggcccatcctgaaaggtgaggtggcgagacagtggggtgcctccgtgccgcttcgtgcagcagcaagttcagcctgagatgctggctgtactcagcctttgcaatttttgtagatgtagcttaggacgtgagttatttttccgcagactggccaagagccaggttctaagcttggacctaaggtagaaagctgcccatcgggggccctagctcagccccaccaggccctctgttgggcctgcacacagctctgtggctagaacactccaaggcccttcggtacccatcagagtgggccccttgccaggtggcttttcagttacagagtccagtggaccattttgtagaaccatgcagctccctgcggaaggtggggtagggtgggaaagaggagcaggtctggaggtttgtggaacccagtcccctgcagaatctgtaaaacctaataaatcatggttgtggccattctcacggtggtgattgtgattagacgacccccgggaagcccagacactcggggcctggagttcctccccctgcctgacctagaagcagaaccgttttcagcgctctgccctgttggctttaaggctttgtcttaatttaaggaaaaagatcctcccgggttttatttctctctttcttgagtggactgtttccctataattaaaagaggtggtgagtcctggggcagcttccgcgcctccctgtccacgtgctaacagatcaggacgcccccagcacccctgcctgcttttgctggtggcagtgacgggaccccgactcctcactctcgggccgcagacaatgctgtgagcaagtgtggccatgggcacagaatgtccctttggacgccgctgctgggggctgccaggggccctctggggtcgtgctttgaggcctgtccggttcacgagggggtccgggcagcactgactgcttccgacctgcaggaggcgtaggagcggccctgcgggccctttcacggcagctgctgctgtatagatttgtctccactcagtgacgtgggatttttttgtcttccttttggctttatttttaaactgctttagatattactgctcagtgtttgtgaactttcctagttctctatgttgttagtgcagccagcacccagtggggacctactagaaaaaggaactggcatgcacacgtgcccagcaggaaaagcttcgtcttcacgtcggctgctgccatccagaagaggccctggagcctcacgccgtcgaggctgctctcaggcgttctgttccgggcgaggcttgtgctgcaaggaagggcaccagcatgcaggctgccactggagggtccgggtgctgcgggcagagttcagcgcttgtccaccctcccttagctctgactcagtgcatcctactgtggggacatctcgtgaggggacacgaaatgactgatctcaccctttcccagtattcagagctgtgaacccctgtggcgcaggactggcctgtgtctgttattttggttgtaaatcattctcctgtggaattggcaaaagctacatttttactgtccttaccagcaacagtttgcgtcgtcacatgctgtgagtgtgggctgtggtgtgtccgtgtgtgtacatatgtgtatatgtatatatcacgcagcaggagtgtcattcatgctgctgtcccctggtgaagtgacaagtacaattaaaggtggctctgaaatggcctctggtttcttgggagtcgggcagggacctgcaggaggctttcccagcaggtgcacagaaggaagcgctgagcccactgtgtgcagagggtgtgtgcccagggcactgccacggcccccaccagcattggcctctgctctgcagggtggggtgcccatcctgggggctgtgtgtcatgctcacctgacccaggtgtgtgtcccggtgtgaaatcgaggaggggactggaagcccttccctgccttgaaacatgaaagctgattttctgagcagcagatacggtcagtggcaaagctgcatctgaagggcggcctgggaaggggccctgtgctggccccgggtccgccccagaggagtccacacagcaccacctccagaaggggctgggcccggggtcctgcaggcggcaccttttggtagagtttgtttccctggaaaatggggaaaatgtttcaagccaggtgaggggggaagttaacactgaaatatgtattgtttttaaaaatcaaatgcacacgcatggaagctgcttgtccatgcactggttttgtcactggcgtcctggaatccgaccgtgttggggtgcaggcgctgtcagactccggctgatcctggctcgagcacacacatctaagggccaggctggttccgcatggtgatctccgtcttgtatgtctgaatgttggcctaaaataaagattactgttgtaaaataaatgttttcactgcggacccca

SEQ ID NO: 614 - DNA, 6746 bp, Homo sapiens
agccaggacatggttttggtttgcaggaagcttgccttgaaatatcaccccgacaagaaccccgacaacccggaggccgcggacaagtttaaggagatcaacaacgcgcacgccatcctcacggacgccacaaaaaggaacatctacgacaagtacggctcgctgggtctctacgtggccgagcagtttggggaagagaacgtgaacacctacttcgtgctgtccagctggtgggccaaggtgagggcgagctgcctgccgtgcgggcacccgagtcactcctgccgtgcgggcacccgagtctctcctgccgtgcgggcacccgagtcactcctgccgtgcgggcacccgagtctctcctgccgtgcgggcacccgagtctctcctgccgtgcgggcacccgagtcactcctgccgtgcgggcgcccgagtcactcctgccgtgcgggcacccgagtctctcctgccatgtgggcacccgggtcactccacgcctgcagggttcccagcattgcagagcccatgcgttgatgccagcaactctacactcctgagaaaaggcttctgggcatatggagcctttctcctcacctgtgtgatgggcgaagctctgtcactggcttggtgtcctgcctggaacaagccatagcgtacagattgtcccagggaagagccgtgcggagccgccagggtttcttctgtaaatggctcccagtccttcgtgagacaggaggaaataagcctcgatgttacatccgcatttcttcgtttcctcgttttgttccaaatgtcatatatgaggccagagggttggaatcactgcatggcatttgtgagaagcctgtatttggctttgactggtcggcctcctcactagaatccttataaagtactttttatttagttaatgttagacagagtctcgctctgttgcccagactggagtgctgtggtgagatcctggctcactttaactttgaattcctgggttcaagtgatcctcccacttcagctccagaactgcaggagttgaggcgtgaaccactgtgcccagcctggaggctgctttgttttttttttgagacggagtctcgctctgtttcccaggctggagtgcagtggcgcgatcttggctcactgcaagctccacctcccgggttcacgccattctcctgcctctgcctcccgagtggctgggactacaggtgcccgccaccacgtccagctaattttttgtatttttagtagagacagggtttcaccgtgttagccaggatggtctcgatctcctgacctcgtgatccgccagcctcggcctcctggagtgctgggatgacaggcatgggccaccacgcccgtcttggaggctgcttttctttaagctgcgggtttctttctgtctctcctcctcccttcttcagttctttccttctgcttcctgtctggaaggcagtatccccacctggaacgcaccccctgccttctgctgagggcatttgggagtcctgcgcctccctctccaggggcctcggaggccatgcaacaccaccttcttctccccccaggccctgtttgtcttctgcggcctcctcacgtgctgctactgctgctgctgtctgtgctgctgcttcaactgctgctgcgggaagtgtaagcccaaggcgcctgaaggcgaggagacggagttctacgtgtcccccgaggatctggaggcacagctgcagtctgacgagaggggtgagtgcccgccccagggcccgtgtgtgtgtgtggggcagagccagaatgggccctgaatggtgtcaacctgtcttgtcaaacaggagggcactgacactgtgccgcgagtgtttgtggtggcagctgggactgttgaggtgtgaacgtggaccctgaggtaaagcaggcgcatagagctgtccccgccgtgacctgcggtagccgtagatcccagggactgcgaggcggggcagggcggcaggcagttggggcggggctgagggccgagggctggcggtgacccaaggcgacggaggaaagccgtgtggggtggaggtcagcgagtagcctctcccggtggagagtttgtccaggtgcccgaaagtcgctccacaggaccagcgttgggtgcgcgccaggctgtggccctcgtgcagtgccctgtgtgcttgcttttcagaggccacagacacgccgatcgtcatacagccggcatccgccaccgagaccacccagctcacagccgactcccaccccagctaccacactgacgggttcaactaaatccaggaggagctgtggtcagaggaggagccggcgcctggccacgccaaccttagaatcatgaactgtagtcacagagatgggaaggcagcctcctgcctgccctggccttgctggggcccctcctgcctccacgcccacccagcgtcgacccttgacccacgaagtgcgtagcatgcagtatttaaagcagtgtagctacggtcttctgtttttttcccttttttaatagcatgtatggggttctgttccatgtctgtgttgtggacattccgcggcatgaccgcgtgaactgcacggtggagctgcctcagggctgtcggtcaggttggtccagtgaggggtgactgcagccggtcaggtgggcgaggagaaggggggctgcccctttcctacctgtgcttgaggggccggaggcaggtgctgcctggcagagctgtgttaccgtcttggcctcggggtctggtccacactctgtgctcccagccttgaggctgcagtaggactctgatctcacctgccagaagagaggcggggccgcgtcctcctggcgtcaccggcgtcactgtcattccttggtgtctgtgctgggcatggttggcttgggggtctgtggtttcctgggccttgtggcagggtttctcccgtgggagaatttggtgtggaaagcataggaggccccttccgaggttgacaccgtgtcctccgcggtgtttctcgcctggtcgtctcgtcgtgtggacgctgccgttctggttctcggaggtgtgtccttcgccgtgttggggttatttgtctgtgttcctgcacttttcccgggctctgagctggattgatggggccagtctcccccctcccatcttgaggtcgttctccacattccttccagcacacctgtcctttccatagccctttttggacctttagaaccacagatgataggaccagcccaatgagccacagtcagagagtagattgtgcatgtgtgagcacccagctactggggacgggggctctcccacgacccctcctcctgtgtttgccagagctcccatctgccccactcgcctttgccccgtcatcgatgattcaggcagagccagattcgttaggtccctggaggaaggactgactggaccagagggaccctctggctcaggagggttgggtccctgggaggccggcagccaggccacagaatccacacgtggaccattgtgggtccctgggaggccggcagccaggccacggaatccacacgtggaccattgtgggtcccttgggaggccagcagccagactacggaatccacatgtggaccatgggaagtcagtctcttgcgtgtcctagaccttgtgggtggcgccctgcataggggagcagggggaacgggtctgatgtccctgtgctggctgagggctcagagctgcccgcactccgtagctcatgggatgtgctgggcctgcctttggcgccatgctgcagactccagtgggcctggtttctgcagaatgtccatggtggccgctgcagagttgcagaggtccctgtagagataaagctgaggaggaggctgtgtgtgatggctctggctcggaccaaccagatgagcctcctgaagcccccttccctgcctgcctgctgacccgtggccccagctcactcattgccctcagcagccacccgaggctgtgcagaagggtaggttcaggttgaccaggaagctgccaaaagggacatggatatgaggatacatctggacgtgcttaggaacagggtgctggttgagggcccccagctgacccctactgcagatccgcatgtggaccatgagccggctgccagcactaggtcctgggcagctttgtttgtcccacttttctttgtttcttctcactaaaatgatcacgaagacctttgacaagaggagagatatgcactgtgatattaaattagaaataatttatcaaaatcagacctctcctaaaagaataagaaattcattgtttggcccatcctgaaaggtgaggtggcgagacagtggggtgcctccgtgccgcttcgtgcagcagcaagttcagcctgagatgctggctgtactcagcctttgcaatttttgtagatgtagcttaggacgtgagttatttttccgcagactggccaagagccaggttctaagcttggacctaaggtagaaagctgcccatcgggggccctagctcagccccaccaggccctctgttgggcctgcacacagctctgtggctagaacactccaaggcccttcggtacccatcagagtgggccccttgccaggtggcttttcagttacagagtccagtggaccattttgtagaaccatgcagctccctgcggaaggtggggtagggtgggaaagaggagcaggtctggaggtttgtggaacccagtcccctgcagaatctgtaaaacctaataaatcatggttgtggccattctcacggtggtgattgtgattagacgacccccgggaagcccagacactcggggcctggagttcctccccctgcctgacctagaagcagaaccgttttcagcgctctgccctgttggctttaaggctttgtcttaatttaaggaaaaagatcctcccgggttttatttctctctttcttgagtggactgtttccctataattaaaagaggtggtgagtcctggggcagcttccgcgcctccctgtccacgtgctaacagatcaggacgcccccagcacccctgcctgcttttgctggtggcagtgacgggaccccgactcctcactctcgggccgcagacaatgctgtgagcaagtgtggccatgggcacagaatgtccctttggacgccgctgctgggggctgccaggggccctctggggtcgtgctttgaggcccgtccggttcacgagggggtccgggcagcactgactgcttccgacctgcaggaggcgtaggagcggccctgcgggccctttcacggcagctgctgctgtatagatttgtctccactcagtgacgtgggatttttttgtcttccttttggctttatttttaaactgctttagatattactgctcagtgtttgtgaactttcctagttctctatgttgttagtgcagccagcacccagtggggacctactagaaaaaggaactggcatgcacacgtgcccagcaggaaaagcttcgtcttcacgtcggctgctgccatccagaagaggccctggagcctcacgccgtcgaggctgctctcaggcgttctgttccgggcgaggcttgtgctgcaaggaagggcaccagcatgcaggctgccactggagggtccgggtgctgcgggcagagttcagcgcttgtccaccctcccttagctctgactcagtgcatcctactgtggggacatctcgtgaggggacacgaaatgactgatctcaccctttcccagtattcagagctgtgaacccctgtggcgcaggactggcctgtgtctgttattttggttgtaaatcattctcctgtggaattggcaaaagctacatttttactgtccttaccagcaacagtttgcgtcgtcacatgctgtgagtgtgggctgtggtgtgtccgtgtgtgtacatatgtgtatatgtatatatcacgcagcaggagtgtcattcatgctgctgtcccctggtgaagtgacaagtacaattaaaggtggctctgaaatggcctctggtttcttgggagtcgggcagggacctgcaggaggctttcccagcaggtgcacagaaggaagcgctgagcccactgtgtgcagagggtgtgtgcccagggcactgccacggcccccaccagcattggcctctgctctgcagggtggggtgcccatcctgggggctgtgtgtcatgctcacctgacccaggtgtgtgtcccggtgtgaaatcgaggaggggactggaagcccttccctgccttgaaacatgaaagctgattttctgagcagcagatacggtcagtggcaaagctgcatctgaagggcggcctgggaaggggccctgtgctggccccgggtccgccccagaggagtccacacagcaccacctccagaaggggctgggcccggggtcctgcaggcggcaccttttggtagagtttgtttccctggaaaatggggaaaatgtttcaagccaggtgaggggggaagttaacactgaaatatgtattgtttttaaaaatcaaatgcacacgcatggaagctgcttgtccatgcactggttttgtcactggcgtcctggaatccgaccgtgttggggtgcaggcgctgtcagactccggctgatcctggctcgagcacacacatctaagggccaggctggttccgcatggtgatctccgtcttgtatgtctgaatgttggcctaaaataaagattactgttgtaaaataaatgttttcactgcggacccca

SEQ ID NO: 615 - DNA, 297 bp, Homo sapiens
tttgtttgttttttgagatggagtctcgctctgtcacccaggctggagtgcagtggcgcgatcttggctcactgcaacctccgcctcctgggttcacgccatttaggaaaacgcatgcctcaccctcccgagtagctgggactacaggcacccgccaccacgcccggctaattttttgtatttttagtggagatggggtttcaccgtgttagccaggatggtctcggatctcctgaccttgtgatctgcccacctcggcctcccaaagtgctgggattacaggcgtgagccaccgcg

SEQ ID NO: 616 - DNA, 481 bp, Homo sapiens
tctgttccttatgatttccttgcttgcatttatgttgggtttatcctgttactttgtagcttcctgaggcggagccttaggccttgattaacgtgttgtactagtcagcattctgcagaggaacgttgccattatctgtgtctctttctaaaggagatttgttatgaggaattggcccacgtcattatggagacggaatctcatgctctgccatttgctgaagattgaggaaagcagtgggataataacagtccaaggacaggaggagacacgtggccccgctcaggctggcaggcgagaaggaaaacccaggccaactcctcctcccacccctttctattcgggacccccgtggactgggacgacactcacctgcacagggcagcgcagttggcttcatggagcccccagctcaggtgctgctcttaccaagaaacaccctcccaggcacaccctgaagtcatgtttcatctgggtgccc

SEQ ID NO: 617 - DNA, 89 bp, Homo sapiens
ttttttttttttttgagatggagtctcgctctgtcacccaggctggagtgcagtggcgcgatcttggctcactgcaacctccgcctcct

SEQ ID NO: 618 - DNA, 968 bp, Homo sapiens
tcccctaattcccagagcccctggggagaccatgggctgcaggagagcagatgagactgtggctgggtgtccagagctgctgcctgctccggcaccttcatggaatggcattggcctcaagtcctcgctgcctcttactggctgtgtgaccttgggcaggccaggtagcctcagcttcctagagaatgtatgtaatgggcttggcatacagaatatggcacatagtaggtactcaactattattattctgtatttaatagctaattggctggcatttgctcagcactctgcatacattgggccattgcgaggtctctcgcctgcatcttagtttgctaattaggtgcttatctgggaccttcctggagcaggcattctctgctccattctctcctctgtacgcgtgacagccccaacccttgttcccccagcaggagcaaaaggggttgggtatgatgacctccagctcaatgtctaaggatctctgggtttcagtttccccctcggccagctcctcctgcccctaccagccacctcccaagctggggatttcactggcccacctttgttccctgcagaatcctagagtcctccagcccttccctctctggccttcacactccacatcctcagcccagcacaggagccaattttgcaaagaggtaaagagacctcaccactgctgcaccagtctgtccatttcctagcaggcaactggcacttgtttggttttataaattaaggtttcgattcttggccaggcgcgatgcctcacacctgtaatcccagcactttgggaggccaagggtggtggattacctgaggttaggagttcaagatcagctctgccaacatggtgaaaccccatctctactaaaaatacaaaaattaaccgggcatggtggctcatgcctgtaatcccagctactcaggaggctgaggcacaagaatcatttgaacccaggagg

SEQ ID NO: 619 - DNA, 255 bp, Homo sapiens
ctttgggaggctgaggcaggaggatcacgaggtcaggagatcaagaccatcctggctaacacagtgaaaccctgtctctactaaaaaatacaaaaaattagccgggcgtggttgcgggcgcctgtagtcccagctactcgggaggctgaggcagaagaatggcatgaacctgggaggcagaggttgcagtgagccgagatcacgccactgcactccagcctgggccacagagcaagactctgtctcaaaaaaaaa

SEQ ID NO: 620 - DNA, 51961 bp, Homo sapiens
tttttgttttctgtttttttattttttgtatatatagagtgaacttagcccacccatgttgatagaacaccctcttagatgtcttgttctgtgtgcccaagtacatgccggaatgtggagaagaaatgggttctctctagtaaaccaggtaagtgttttctaattctatgaagagttttcattccattcttggcttctgtgaaggttgtaattttcagtggacttagtcagtgaaagctgagtatctatattaaaattgtttgaaaagattaatgataaaacaaaaagtttcttaaaacttttattcatagtttgtcaagaaataatggaaaaagtagaaatgaacaacagtggtcatgacttttacttgaaataattttttgggacaaagttggatattaaaaaataaaaacccagattttatctatttaaatcaaattgaattaaaagataaaaggccttttaatatagctgtaaaattgaggttttactttttatagacctcacataggcttggaatgaatttttttttttccaagatcagacaagatctggcacatttggggtggtatagccataaacagattttgtttttctcctgtgtttggtagctcctaaccttcctgagaccacaaccttttactttattcagaaacccagcaagttagctgcaaaatgtgaaccatatcatgaccactgtaatgtgaaaatctgtaattaattaatctttactaagataatgttaattgttagagaaaccacatcacacacatgcacacattcttgtacaaacttgtgcttttggggaaggattagagagagcctgagccaataaaaactatttactcaatataattacttttttttttagatttattactaccataatgtgaaatgcagacgtgagatgtttgacaaggatgtagtaatgcttcaggtaatgaattaaaagcattgaacttaaaggttgtggggaatctttgcttcttgttatttccatagaattcagtcacttgtgatcactcccaaatctacaactccagcctagccctgtctcctcagctccaaactcatatggctaacagcctttagatcatttccatctatatttcctagacacacttcatattaaacgtattcagaataactcctcatgtttcctccataccttcttcctgtcttcacttccctaccttggtgaattgttccacagtctacctagttgctaaagtcatatacctgaaagccatcctttcttcattgtcctctggttctttaactaatgtactaatgttaaacctcttagtttaaaccccttaaactaattttcaggactgcgatacttaactgcattgaagttccctgaatttgccatattctcatacatcttaaactctgcgtatttatttcttttgctccctaagttacccaccccttctttttccatttacgtagctaacttattttcctgcttgtctttgtgtttactttagcattacttcctccaggaagccttccctgacacactaaaacttggctacgtgtcccttttgtgaggaccctagcatggtatttaaccctgccgtagcactcacaaccctggactgtgattactgtttactcttcagcaccctacccccaccccaccaaaccatggcagttatatcttgtttctttttttgtcccttttgccttgcatagtgcttgtcacatagtagttgttctctgatactgctgaatggatttagtcattatagaaaaataaagctggctaggcacagaggctcacacctgtaatcccagccttttgggaggctgaggcgtgtggatcacctgacgtcaggagtttgagtccagcctggccaacatggtgaaaccctgtctctactaaagttacaaaaattagcctggcatggtgtcatgcgcctgtagtcccagctacttgggaggccaagacaggagaatcacttaaacttgggaggcggaggttgcaatgagctgagatcactccactggactccaacctgggcgacagagtgagactccgtctcaaaaaataaataaataaaaataaagtcaagaaatgtatatttcaaaaaaatattagttcagaataaaatctaggtttatttataatttatacaaatggaattaaaagagaattgaaactaatatttaaaagctgtcacttcagtcagtataatgcttgccagaaaaaaataggttaggagatcttgataatagtttaatatgatctgtatttttaaaatactagaaggttacttaatataccacatttccaagtccaaacggtgatcagagaaccccaaaataaaattttggcactgaattcataggaatacaattattttaaagcattagaaggaaagagaactcatagtctgtgttactgtgctgggtgggcttaggtttggggcttgtttgtattttgttttaccaatttagattcctttccacacttgcctgctaccacaagtaaggattgaggttaaatgggttttcatcttttattgggattggtgaaccttttaggattggtaaactgctttctcttgggcaagccaaactatctctcactaattgtttcaatagtggcccctttgaccttcctcttttcctttatctcaaacattaaaaaaaaaaaaaagacaggtgtctccatgatggatccaaatcatttcctgatgatcatgctcagccgctttgaactttatcagattttcagtactccagactatggaaaaagatttagttctgagattacccataaggtaagaacgtgttttatgaaaccacaacacattgctaaagaagcatctttccttctttttggatatgttaatcctctgagattatgcaatatgcatattcttatctctgaactttatcttccctcacttgttataggatgttgttcagcagaacaatactctaatagaagaaatgctatacctcattataatgcttgttggtaagtttaaattgtttgaggcatttaataaattacactgacgtttatagtagcaaatagtttggaatttctggcctgtgtttcctttgttttgagaggatgctcagtcttaggggaagagaattggaatatttctctttttctcccctctggttactgtaatattgagagtaatagcaccgtggtgctttggaagaaggagaaaatacaactactgaagcagaataaactggaagactgtattttgcgaggtggtggtagggggagcgggggacaggagaatttagcaatcaaggaataggatatttaagatctatttactcttgatttatatcttaactatgtttctctccatgggtttgtggtacaaaagtatcttcttgacttcagatacaataattccaagctaaaggagacctgtggctaatagatgtggatttcttcccttattacctatattttcagtcctttactactgttttagaccccctgcagtccatagagcagagaatcctggctactgtcaggagatgataccaatgaagaaagtctccgaagttgatattttatttgccactagatagtaggggaaaggaaggctctctctccttgctgccacaaggagaatggggtaaatgcagtttccttgaccacatttaatcccttcccacatttctgatcccattctttcaaaacagcagaaagagctctctccactacctaaagcctgccctcacgttttgggtctgagacacagaagcatggtcaggagctgctctctccctggcttattgcagaacagtcattactttcccattgctcagacagacttagagaaatataacatgctgcatgaattataagtatatatcacgaaagtattgtgattatgttaaatgtatgtatatgtacttttccatttttgacaggagagagatttagtcctggagttggacaggtaaatgctacagatgaaatcaagcgagagattatccatcagttgagtatcaagcctatggctcatagtgaattggtaaagtctttacctgaagatgtaagtacctacatttctaaaaagaaaaccatagaaacttttccctgcctatcagtctagtatctatagatttacttctgtatacctttctcacaattgtaaaatctattgtcatgggatgtgtataattccggtcactcttattatgaataattagaaaaagagaataggagtagaaaacagaatagtaatagaatcttttacaataaagccttgaggaagataaggacactaaacaaaaagtagcccaaacctcagaactaaggtttgtaccccacagaaagaggtcattatagggtctttagtacaaagttgctatgggtgtggataatgctttgtaacctagtatattgaggaagggagtcagaagtgcctactcacctatactgagtagaataaataatgttttcctaagctttttccttcttggcctccagagagtcttcttaatgacgagcccttgtttcattttagtgaatgcaaaataatagtgaaaaggacattcataggttaaattgcaactgtttttccttccaggggtgataagttccccagcaacctatatttcagccatggggtttttcagaaactcaacccttataattgagaagagactttattttcattgaggcttttcaaaatgtttgccctaatttgaaacatagatcaaaaccttcaaccttaattaacatttatttttctgagatttcaacctatcttatctttgttgcatagtaatacttttaaactttgtattataaatatttcaaacatctatagagattaaaaaatgtagtataacaaacccatcaccagcttcaacagaggccagtctggtttcatctatacccaaccactaacctctgtgccccactgtattatttcctagagaatactatatttaccatttcatctataaataggactatatgtatctaaaacagtgattctcaactgaggacaattttgccccccaggggacatctgtgaatgttactactcagggcaggatgtggaatgctactggtatctagtgggtagaggccagggatactgctaaacatcctacaatacccaggacaaccccctacaacatatctgatctgaatgtcagtagtgctgaggttgaaaaactctgatctagaaaatgaggactcttaaaaaccctatctttatgttatcacacttttaaaaacaataatttatatatatatgtttatatatatatatagagagagagagagagagagagatagagtctggcttggtcacccaggctggagtacaatggcatggtcttggcttactataacctctgcctcccgagttcaagcaattctcatgcctcagcctcccaagtagctgggattacaggcgcacgccaccatgcccggctaatttttgtgtttttagtagagatgggggttctctatgttgtccaggctggtctcgaactcctggcctcaagtgatctgcccacctcagcctcccaaagtgctgggattacaggcataagccaccacacctggccgaatgatgaataattccttaatgtcactaaatatctagtcaagataaaaattacttgtactgctttaatgcaggaagtgaatcccaagttgttcaattaggaagcagttataatttagcctaagctttaaggaacaataaaatttcaaaaagcattttttaagtggtttaagattgtcggccgggcacagtggctcacgcctgtaatcccaacactttgggagaccaaggtgggcggatcaggaagtcaggagtttaagaccagcctggccaacacagttaaaccccatcgctactaaaaaaaaaaaaaaaaaaaaaaaaaaaaattagccaggtgtggtggcaggcgcctgtaatcccagctacttggtaggctgaggcaggagaattgcttggacctggaaggtggaggttgcagtgagccaagatcatgccattgcactccagcctgggtaacaatgtgagactctgtctcaaaaaaataaaaaataaagtgattgtaactgtatttcccaaacattttaaagaattatttattcacagaattcctattaatatcttatcgtgaatgagatatgattggggaagtgctgttgtactgaaaatagacaagaaattagtgcaactattttataaaataccagacgtattttacataaacttttttaaatgttttatatactttgtgttttcatttaattcctttagaaagctcttaccttgattctatatggcagtgactttttaaaaatcataaagttttatctattttatgtatttaaaaataatacatcaatttgaataaacatcagcttgccgagtaagtatgtctagttttgtattaatcattgtatttgctatggaatcctcatctgtaaaaatggagataaggtgtatctaccttaggttgttatgagggtcaatgagataaaacacaatgctaagagtgctagtagttattattaacatgaaacacacttgtgtcctgtacctttaggagaacaaggagactggcatggagagtgtaatcgaagcagttgcccatttcaagtgagtttacttcctattatttcacattcttttttacttttccagtacattcatttttcttagagtgttttctttgatgcaactgagaatgaagttgcagctttcagagattgacagacattttcaaattatagctctgaattagatttctcactgacatttcacttttctgatctcaccctgtactcagcaacgtaaagtgacattgtgagggttttcgtcacattcagaataggtgttcatagctgatggtttcaaatagtaaaaattaacctcagcagtgatctaagtaaatgcattgtaatttcttaaaactgttttgtttccatttgaatgtgctgcctaaattgtgggatagcctctcaatgccaccttctccagtgtccacagtcttcccccagtcaataaactggtttatacccttaaagatattaaagcagtttcttaagcctgttttttctttgcttcctaccccaatgacaatgtattcattttttttaacccactataaatttttgaagatagtgtctttattttttgttggttataaagacaatacttgcttttaggaaaaatacaaagaaaaaatattacctgtaatccaaccactcagatgatttctattatgtttagatgtatatctttctaaattttttttctatacttggaacacatatttataacaaaaaatgggttcatttcgtatttactattctataacctttttaaaaattaaataatggaatgtttccatgtatttgtgtctttgggggggcgggttgttggttttattgggtttttttagtttttacataatatactttgtcagtacatataggcatacttcatcctttttcacttcagcctgggtaacaaagcgagactcaagtgcagtggcacggtcttggctcactgcaacctccgcctcctaggtccaagcaattctcctgcctcagcctcccaagtagctgggattacaggcgcccgccaccacacctggctaatttttgtatttttagtagacatggggtttcaccatgttgaccaggctggtctcaaactcctaacttcagatgatccagcccgcctcggcctctcaaagtgctgagattactggcatgagctatggtgccaggccctttttcacttccttgtagtcatgtactgtaatgtatctaacctcttccctataatacatagcttccagattttctcttataaacaaatattgaaaatccttgtacatacagcattaacaaatgtatctttgactgtgaaagtgtttctttgaggattagctagatcaaaatgaaagcttgtattacattttggtacatacctcctaattgccttcccaaaaaagtcctcgatttacactctgactagaagtgtataaagagtgccctgcaactttgtcaacactttaatatgagcagtctttcagtaccttattttaatttgcgttactctaagtgaagttgagcttcttttcatgtgtttattggccgtttattttttcatactttaatgcatttttctttatggttgtttgtccctatcttattgttccgaaagtattatatattagaaatgtcaattcttatttaatacatcacagtactttcttccagtctcccttgttttttaactttctgtttttaaaactctgtctcaattggcttctgggttttataacttgcttaggaaagttctctaaaccccaatagtgtacctgcttttttctgcttaatagaacaacacggaagtctttacatgtgaaaatagagaaattatcactgttaatggtgttcagttgtttggagatgttgtaatttgttatttcacgttattagactttttaattgttgccactgcagtgtccatcacgttcacttgtctagttaggataaattccaagtgggcatgctaaataaaacagatgcatgtagaactcggatttagactgccaaatcaacccactgaaaatagttgtagcttaacacccaccagcagtatatgagagctctgctttcttgttctaatatccaagactatctctcataaattagtgtatggctttggtaataatattctaaggtcctttctttcacaggaaacctggattaacaggacgaggcatgtatgaactgaaaccagaatgtgccaaagagttcaacttgtatttctatcacttttcaagggcagaacagtccaaggtaattgggaaaattaaaaatgtagcagggaaggattgcattgtttttcttaagagatgaggtttcaccatgttgcccaggctagagtttggtggctattcacaatgccattatagagcattgcaacctcaaactcctgggctcaagcaattctcccacctcagcctcttgagtagatgagattacaggcatgcaccactgtatctggcttgaatttttttttcctaaacaacttttttactgcttttgcagattgaaaaatgatacatttttattgtaggggatttggaaaatataaaatataaagaagaaagtagaaattacttaaaataccctcacctaacattttggagttaccccctagcgttttgtacatatgtatatacgatctatataatacatacctttacgtatatgggtatagttttttaaaacaaattttcaacctgtattataatcagttaatccattttatgcacatttcagaattggtattatttaacactttttcatagagattcatggagcttttctaatcattcctaggtaattaaattttgcctttttggtggggcatgtaatcccagcactttgggaggctgaggcgggcagatcgcttgagctcaggagttcgagatcagcctggccaacatgttgaaatcccatgtctactaaaaatacaaaaattagccaggcatggtgtcatgcacttctcgtcccagctactcaggaggctgagataggaggatcacttgagcccaggaggtcaagactgcagtgagctatgattgcaccactgcattccagcttggatgatgggagtgagaccgtatctcaaaaaaaaaaaaaaaatctgccttttagcagtctcctcttaaaatggtttttcaataaacagcattaaataaaacttaaacataaagcttttatttagtttttgatgaagtcatagagttcaaacttaaataagtttgtacttatttaagtacatgtttcccttctaatttaaagtaatagagaactcgtttggagattcttttagttaaaaaaaaaaattaaccttgatgtatccgtttgggggaggactagaacttaaagatagatatcttttttattttttattttttttgagatagggtctcactctgttacccaggctggagtgcagacctcggctcactagagcccctgcctcccaggttcaagcaattatcctgccccagccttctgagtagctaggattacaggtgtgtgccaccacgcccagccaatttttgtatttttagtagagatggggattctccgcgttggccaggctgctctcgaactcctgacctcaggtgatccacctgtcttggcctcccaaagtgctgggattacaggtgtgagctgccacgccccggcctctgttgtgttattttctgattttagatgttcatccttggccagacacattggctcatgcctgtaatcccagcactttgggaggttgaggtgggcagatcacaaggtcaggagttcaagaccagcctggccaacatagtgaaaccccacctctactaaaaatataaaaattaaccaggtgtggtggtgggcattactaattcccggtccaaataactttattttttattaggcagaagaagcgcaacggaaattgaaaagacaaaatagagaagatacaggtatttttaatctttctgaaaatgtcttgcccatcttttttgcttgttaaacattgttttctgttaactatgatgattgtccttggtggaatgaatatttaaatgtaagctttcctagtgaataacctcctattcagaggaataataaatatgttaacacagaaatagtttgtgctaagtcctctgggttgatgttatctcagatcttaagacctttctaggggaaaagatagactttcttctgtactgctgctactttcgtggctctttttatgcatttgaccttgagaatgtaaaataatagctttaaggtgtgtgttaatgaatattctttgagttaaaactatcaaaagtaacaaagagatagtttctaaagcatgttctgtaaaagaaaccaataataacaactgtattttcagcactcccacctccggtgttgcctccattctgccctctgtttgcaagcctggttaacattttgcagtcagatgtcatgttgtgcatcatgggaacaattctgcaatgggctgtggaacataatggatatgcctggtcagagtccatgctgcaaagggtaggtttgaagacatttattatttatattttagtattttatagtacaagcaaaatattcttgtctgtatctatacacaggaaaactaggccgaaatgtattgtgttttcctaacttgaatatattgttactgcttttgtgtctgacagtaaaaacaagtgccagacagatttttttataccacatggttgttattacctcagtcccactgggcagttgttctctcctagattggtccttgtctttatatatgtagtattctgatattgatataatgtgttatcttttatatatgtttctaatctaattattttccaaaacaaaaattttttttgaatcatccatatccttattttgtagttgaagaaactgacactcatagacttacggtcctatagctagttaagtggcaagtctggaaccttgtttgtgttatttttgtttttgtgtttttgagacaggatctagctttgtcacccaggaagctggagtgcagtggtgcaatcttggctcactgcaacctctgcctcctgggttcaagtgatcccgccacctcagtatcccaagtacctgggattacaggcatgcatcacaacatctgcgtaatttctgtatttttggtagaaacagttttgccatgttccccaggctggtctcaaactcccagactcaagcaatcctcccccctcggcctccccaagtattgggattacatgcgtgagccactatgcccagccccttgtttgtattttactttatagttttaatgtaagccgttcgtacactatctcattgaattcacacaacaccccatgaatagatacaacttttttctcattgttagatgaggaagccaagtttcaatgaggttccattaacttcccatattaatctactaagtgatataacaattattcattaaatagaatgcctactttatgccttattccatgctaagcccttttttttttttttttttttttttttttgagacagttttgctcttgtcacccaggctggagtacaatggtgtgatcttggctcactgcaacttctgcctcccgggttcaagcaattctcctgcctcagcctcccaagtagttgggagtacaggtgcctgtcacgaagcccagctaattttttgtatttttagtagagacagggtttcaccacgttggccaggctagtctcgaactcccagcgtcaggtgatccactcaccttggcctcccaaagtgctaggattacaaggcgtgagccaccgtgcctggccatgctaagcactctgcatacagtatttgtaatcctcagaactctagagggaagctttgtttttccaaggctaaagatgatgacttgggctcagaggcgttcccttagggtatatattaatagcttgaaagcagtaaaaccaggattcagattcaaattttggagccctcctcgggaggctgagtagctatcattctttctttttgtctcactggctaagatgtgtgtattcttataatgccctcctatttatctataagcatatttaaagtgtaaaagcatggagctgtggtgtactagctcactactagtacagctgtactagctgtcgtgtactgtcagcattacatgaacaaaagatttgtgggaaataatggagagaagaggtgtgaacaatatttaccttacatgtacacttgctttatgtcacctagttcttccaagtctctgacaaccacagtcatcccatgtgaagggaaagatacagagacatcacacacatatctccttcaaaatctggggtgtgggcccggcacagtggctcacccctgtaatcctaacactttgggaggccaaggcgggtagatcacttggggtcgggagttcaagaccagcctgtacaacatggtaaaaccccatctctactaaaaataaaaaaattagccaatcgtcatggcacatgcttataatcccagctactcaggagggctcaggagaatcactggaaactgggaggcagaggttgcagtgagccaatattgtgccactgcactctagcctgggcaacagagggagactccgtctcaaaaaacaaaaaaacttgggcatgggataagagcagtaaaaaaacaaataggttgatacagtctctagaagtctggtcaggaatattttgtgagatacactgaagaactataaagtttataaatgataaggcattagagataaaagtttgtctttctcagatgatgaagatttagtccttagagaaattaggtagtgtcatagactggataattacatgggggatacgtttagctttataattacttgaccactaattcttggaaggtttttttaagtctgtagtataggtatagaataaaacttacatattatgtgaattgctggtcacagctggtgtaattttagcttaccctgaggatttgcaattgaaatttcttcctcattgaagtagaaaattttgtttttcttgacaataattgtttgttagaaaataaacctcagtcttttcatttaataaaaattagtacttcaaggccgggcatggtggctcacgcctttaatcccagcactttgggaggccaaggtgggcggatcacttgaggtcaggagttcaagaccagcctggccaacatggtgaaaccccatctctactaaaagtacaaaaattagccgggtgtggtggcacgcgcctgtagtcccagctactcgggaggctgaggcaggagaatcacttgaacctgggaggcagaggttgcagtgagcctgggtgacagggcaaaactccatctcaaaaaaaaaaaaaagaaaaaaaaattagtacttcaaattgtttttaattgcatttagtatttcatagtttgatttatctttttcaataattcttttttcctatttcttattaaaatatgtacttgattttttaaatttttactaaaagttacaaaacatttattcaaggtgttacatttaattggcatggcactacaagaagaaaaacaacatttagagaatgtcacggaagagcatgtagtaacatttaccttcactcagaagatatcaagtatgtatatatctttttactaaactaactcaagatataaatgattttaagaaatcacttaataacctcttttatttgatcatatagattctaaaagggtaatatttaatccaaacatttgaggctatatgtactcatctgtgtagtaaaggtactgtattaaaccctgatacatttttataaaaatatctagggctaagttcaaagttacagtcagctgtggttgacgtaagattctacagtattgaaaataaaaaaaaattataggggattagattgtcatttcatataaagaaatgtgactttttaaaagaaggccagggagtttttctagctttttattttaaaaatttcatacatatagacaagttgaaagaattgtccagtaaacattcatatacctgctccctagattcagtagtttgctatatttgcttttatatttacatactttcttgaaccatttgttgtagacataatatttcatgtctcaaagaaaagcttctcatttactaattttcagaaccagccattggtctgatagttacctgcaattgtggcaattttgaatgttttttgtttagagtttttttaaatattattcatggatttttattcagtgttttatagtcacttataatgggtattccttttgatgctcaaattatgcccattttggtcagtgggagtttatttagtcagcttctgtgtccttttcacccagccccatttgtatttgagtaccacctcgctttccagcccaaaagatgcccaagctcatcttgtactttccctgccacagacctgtagtcagccatttgctgaagtgtttttaaatgaattgatggtgctatgataggagtttataaatgctttgattgaaaaggattatttctgtaactgtgttcagtgccatttcttcctaaacgataactgtgagaattatactaccaggggacaaggaggaagtaattttgtttgctgctagatctctagttttcctttttgccctcatccaagtaaatgagagaaagaggagaaaccaccttttcccactgaagactttattcttggatgccagtttttacctattctttttctctgccatattttctttggattaatactgttgtttttgctttctttgtttctggtgtgtttattttagaataaccacacagaatactccctaatttcattcactcatcactataaaatattaggttcttggccaggcatggtggctcactcctgtaatcccaccactttgggagatcaaggtggatgaatcacctgaggtcaagagttcgagaccaacctggccaacatgacgaaaccctgtctctaccaaaaatacaaaaattaaccgggcatggtggcgggcgcctataatcccagctgctcgggaggctgaggcaggaaaatcgcttgaacccaggaggtggaggttgcagtgatccgagattacaccactgcactccagcctgggcgacagagtgagactctgtctcaaaaaaaaaaaaaaaaaaaattaggttctctcttactttctctttccttattaaacaatcatcattttccctcaacattactcttaacttgtctttagacattctacataattaagacacacgatttatttccaaagaaacctctcccttatctagagtcacatctctaatgcatgccacagttttagatgtgatagaatattaaagatcacacaggtcaatctcttcccctcttaggaaaaagggacatttttccagaatggcagcaccaaaatcaagaaaatcaatagttgaactttctggctacagactaatagaaaatatggacttgactcttatattcaaataaacaaactatgaattcctaggagaagaaattcattttattctgaatctagtttttattaaagtcaatggtcagagcaaataaacatatttgtgcatatatgcacctcttaatgctaatttatttttagacctgtaaaatctgagacaccacttatttttagctgaatttgtatgtaattttgctaaagggatgttaaaataatcatttgctataaaaagtcacttttgaatccttaaagaattctagttgttggcaacttgtttgtaaaagacaaatatgtcacattctcaagaagtattgaaaatctctattttggtagagccataatcaaattatgggcaataggtgttataagcaactgcatttatgttcctgtgcgtaggaataagtactatgaagtattagctattgttattgtgccttttatttttctgccgtagaacctggtgaagcgccaaaaaattctcctagcatactagctatgctggaaacactacaaaatgctccctacctagaagtccacaaagacatgattcggtggatattgaaggtaaaatttccacattcctctgctttttgtgagaaatattgaatatttgttatgtgtacattgtgatcatatttcatacaggatactgatacttttttttttgtagacttttaatgctgttaaaaagatgagggagagttcacctaccagtcccgtggcagagacagaaggaaccataatggaagaggtataaacagtaaaaagtgtgataatactaaaaaattacagcaagttcagtatgaacaaaataaatttatctacattaagttgccagttactcacaacatttaaattccaagaaatatgccactatttatctctatttgttgtagcaattttttgtctgctttttttctttaaaacaagtcagtttaagagtcttttctcttatttaaataagtgagattatagaatagttttttaattggtatttacagtgaagatatttctgctttggaaaaaaatgtgcgttttagcatctaattgtctaattgaatggagcataatttcagagttcaagggacaaagacaaagctgagaggaagagaaaagcagagattgccagactgcgcagagaaaagatcatggctcagatgtctgaaatgcagcggcattttattgatgaaaacaaagaactctttcagcagacattagaactggatgcctcaacctctgctgttcttgatcataggtaaaaaaaaaaaaaaaaaaaattaatgtcttgacgagtttttcccaactaggggcagtgttgcgttttctccttgtaagtatacttttaatcctaaagtaatttagtagaattcataggtaaattttgtgacctccatttagaagatttaatcttagaagtctctgaatgtaggtatggtaagtcctgtgtacacctggtagggtattttctgcagaagaccttggacattcatgaaagaatgagtacactacactcagttacctagagcgtatgacatctgtgttgaagattagattactgtgaggattaaaggagatggttttgatacataccaaagacttgacaatccaagttatcaaaaccatgtgttaaatatatacattcctggctgtgcgtggtggctcacgcctgtaatcccagcacttcgggaggccaaggcgggcggatcacaaggtgaggagttcgagaccagcctgaccaacatggtgaaaccccatctctactaaaaatacaaaaaaaaaaaattagccgggtgtggtggtgcatgcctataatcccagctactcaggaggctgagtcaggagaattgcttgaacctgcgaggcggaggttgcagtgagccaagattgtgccactcaccccagcctgggtgacagagcaagactctgtctcaaaaaataaataaatatatatacacacacacacacacacacacacacacacacacacacacactacacacacacacacatacctgtagtctgctattttgtgattatatagaaagttttgggatcattaattatattcataacctttgtattgcagccctgtggcttcagatatgacacttacagcactgggccccgcacaaactcaggttcctgaacaaagacaattcgttacatgtatattgtgtcaagaggagcaagaagttaaagtggaaagcagggcaatggtcttggcagcatttgttcagagatcaactgtattatcaaaaaacagaagtaaatttattcaagatccaggtaagtcatagctagatcctcatcttcccttttaataacaactgccagttaatgtggttggtgatacgttgagattttttaaacctaaaaataactccatggacttggatggtatctttggcaggtaacttaggcaggaattccccacttggcagatgtggaaccactccagaaagttgcacctgaatcacatagctgataaatagcagggattcaaagaaaagcttttctttgtgatgtaacattacatactttggcatttcacagtcttttccatccttcagtacacttgcaaagtcctggtcatttgttgacacactgaaataataattgttttgtcttattgatagagcctgagtggaatctcctgagaacagtgatggagagttacctatgtaagaggcaatccttgagccaaattgttttagaatagtaataccaccacagatcgggttccccagaaagcagattcttgggatacagattaccgtgcaggacagttgagggccctctttcagcaactgagggagtaaagcagggagatccagtccgcacatgattttgtccaccacagacacatttatttctctgcttgtaggttgtgctctgtgtgcgtgtgcttcagcgatacccagtaaacttcttgagagtaggaactgtgtcttgggaattcccagagcactgctttaaccagtgcctttcacactgcagcgtgaaaggaggtttgagagcccacttttagagttgccttctctctgtaaagaaagtctttgcatcctacttatgaaaggttggtctgcttcatctttaaaaatggtcatttaggctgggtatggtggctcatgcctgtaatcccagcactttgggaggccgaggcaggtggatcacctgaggtcaggagttcaagaccagcctggccaacatggcgaaaccccatctctactaatagtacaaaaaaaaaactagccaaatttggtggcacgcgcctgtagtcccagctactcaagaggctgaggcatgagaattgcttgaacctgggaggcagaggttgcagtgagccgagattgcaccactgccctccagcctgggcaacggagcgagaccctgtgtggtttttttgtttgtttgtttgtttgtttttaaaaaaaaaaaaaaaggccaggcgcagtggctcatgtctgtaatcccagcactctgggaggccaaggcaggcagatcacaaggtcaggagatcaagaccatcctggctaacacagtgaaaccccatctctactaaaaaatacaaaaaaaaattagccaggcgtggtggcagttacctgctactcgggaggctgaggcaggagaatggcgtgaacccaggaagcagagcttgcagtgagtcgagatcgcgccactgcactccaatctgggcgacaaagcgagactgtcttaaaaaaaaaaaagatatttaaactaggtgctttataaatttcattccaggccaaagacaaagttgctaattttatttaacttattacttctgaagaaaaagcattagctggctataagtggattttcttaatgctttgacatttgcactgttctagtgttaaagcaaattaaaactattaaagcaaattaaaagtagttctttctagagtgttaggaaatttcgaagattatactaatttatataaagaattcaaaaattccaaaagaagccagacatccatcttgtttttcatgatttttcatcccctttgaatataaaaattagcaccaggacagaagactctgaattaccttttttccccccatctgatctggtctgtgcttagattttttgttgtcactttggctctgatgtgattattcgctgtatgagtgttgttaggcagtctgtcctctagggggcgccccgttactgccaaaacattttttattagcgatcattttaacccagctgccctgaacgcacataaggcagccccatgaagagagtagctcttttacctggagctcagggtacaatgggaggaattggaatatctcagcaccctgaaagtgtgaaatgttcaaaagattggatatatttaaattcatagttctaatttcagtttaacaatttgagaatgtttaattaatttgctgtgggtggtgaaaattagagagtcctactttctaaataatccaaggtgttgcataaattggtatctcagaggaataaactagcatttcatttcaaatttcaagtctttatcaaggattttacaatttaaagttacacatttgttataggaaaattaaatgcttcacttttgttttgttttgttttgttttgtaatgcagaaaaatatgatccattattcatgcaccctgatctgtcttgtggaacacacactagtagctgtgggcacattatgcatgcccattgttggcaaaggtaatgtatattcttaatatttgtcaagagaagtttatctaagggctcaatattttttaaatagaggaaatttcattctagaaaaaaggaaaagaactaaaaatgttgaaaaaatccgtatcattgcctaataaataacaaaagttatttgccttgtcatagatgtaaagtgtatgtcagatatgttttttaatttagctttatatccaagtctcttctatatcttccaaagaaggaagtggatctgtatcagtctgtggatgaagaaaagggtttttacagtaggataaactctagaagggtaatgttgtctttctttgggtccagggtggacaacttttgattccatagatgttagtacttgctttgttacttcccaaaattgtaatggctccctgtgatgagatgtcctgaatttgttctaccttggtgtttcctatgcttctacaaaaccaacaaatcaataatactattattctagaactatgctcacccagttatcatgaactacccctaacaactagccaccacattgtagtcccagctacttgggaggctgagacaggagaattgcttgaatgtgggaggtggaggttgcagtgaaccaagattgtgcaactgcactccagcctgggcgacagagcaagactccatctcaaaaacaacaacaacaacaaaaaaaaaacaaatagccaccagccttggggaagtggcaagagaacaatgacaccaagaaatttttgttgctgctttgtgaatgcttttttacatggcagtctttttttttattttactcttttagaacttttaatccatttggatttttaaaatcactcaaaaatcatgttaaaaataatttagtttaagattttcatttttgaactatttgtggaaacaaattattttaaatgttgaagcttatggctgtcatttatgtaaattaccattgttttgatacctcatgttctctaattgtaaaggtattttgattccgttcaagctaaagaacagcgaaggcaacagagattacgcttacatacgagctatgatgtagaaaacggagaattcctttgccccctttgtgaatgcttgagtaatactgttattcctctgctgcttcctccaagaaatatttttaacaagtaagttttggctcatgacaactattacaaagcaatagtttgctttgaagataatgaaataataaatcaaggaggaaaacttagtctaggcaattgcatagtgttttccagatactttccaaactctaatcattttcttctagcagacctgtggaatgtgattttagtttttagagaggaacaggtgaaaatttaacagtttctaagctattaaattcctatgtatttatgaaaaccaagtatctggtttatttctagggaccctacttttaatatcttccatacacttttcaagagatgctcagtaaactggtagagggagatggaacaactcaaactgactttataggacagtctaaaaatcgaataaaactttttgctgtactggccattcatagttttaagaaccaggcaaaaaagtgaaaatctgttggtatattttaaatggaaaaatctcagctgggcgttgtggctcacatctataatcctagcactttgagaggccaagatgaaaggatcatttgagcccaggagttcaagaccagcctgggcaacatagtgagaccctgtctgtacaaaaaataaaaagttagctggatgtagcggcatattcctatagtcccagctacttcagagactcaggtgggaggctcgcttgggtcaaggctgcagtgagctttgatcatgccattgcacttcagcctgagtgacagagcaagaccctgtctcaaaaataaaataagtgcttgcttcagcagcacatatactaaaattggaacgataaagagaagataagcatggctctttcacaaggatgacacacaaattcatgaagtgttccatatttttagctcttttagaatttgtctagcagactaaaaaaaaataagaaaagaaaatggaaaatttctgtaacttcacagttttttggatgcttttagttacgagtattggacatactcatttcgagtatgaatttgataatgtctgcttttcgaatctgaacttcatttctcaatgtagaattatgctatctacgttgcatgcacaaatactaagttatgtgagtataaacgatccatttctgtgttatttggattcagttcaaagcaaagtcagttttttcttgtcagttttaggagttcaaactttggtgttcttagtctatgctaccacaaaatgttcttaaaatattagtagatttgagtgtaagctcatgctttttaattataaaagaatatcgtggtactgacttatctgcatttgaactgatgaagaaattaattattgttagatggaggattaactgtgtataagaagaaatcacccttgttggatttcatctgtcactttattggtccaatttttgggttttgcccatgagattcaattatggtttagtcatattcgaatacaatcataaaaagaacacaggctttggaatctgacagagccaagtttgaatgctagctttgtcccttattcggccttagtcaagttacatagctctaaacctcagtttcctcatctgtaaaatggggacaataataaaacctattacaaaatataggaatacaacctatgcaaataataatacaacctgaaacaaaatgtagggatattttgaggattaagtctaataccataagatatttacagtaaaattccttactaagtgcttgtaacataataagcacttggtagatattaatagtgatggtgattatgatacttaagaaattctagcaaattccaatactgaagagtgagatttttaatacacagtgttattaccatcatattgacaaataatatattcctttccattggccaatatcctgattttttttaatgcaacaaattttcccttatcctttttgtttttaatatttggagtgtgtctaaaatatgcctgtgatcatttaaggagtcttttgtatcttaaggaacaataataaaacactaaatactctctataatcttttctagcaggttaaatttttcagaccaaccaaatctgactcagtggattagaacaatatctcagcaaataaaagcattacagtttcttaggaaagaagaaagtactcctagtaagttctggtaacctgttttcatttttccctaaagtccgaggtcatcagaaaatgtatttccagaagaagttgtttaaaagtgaaacctcccatttaaaattttgactcattctaattttccttgtcttaataaactaaatttgactttactgcattactccttattccttaaacacacaagctcatgtgaagtttctaataaacacttctcacttattcccccattttattgaagagcttctggaggtgggggagatgtaactgagtgttgcagagctagctttagttctcggtgggctaactcaccttactgttggcattaccaaaggcttcccaagtttcatagaccatgcactgcacttatgaccttgtgggaacgtagtatgaacaggatttatatcattggttttcatagaaacagaatagctactcttgtttttgttttagtggctgtactataaggaaaagcatagttaagaaagggccttggtcaactagagcaataacgttttcatgcttcatatggttgttatgccagtttttattagggaatttttttccttttgtttttgatttctttgacctatatggctgtacttttaggaatattgtcatctattgaataatagtataaaatgcctgtttctatagataatgcctctacaaagaattcagaaaatgtggatgaattacagctccctgaagggttcaggcctgattttcgtcctaagtgagtatattattttactcctttaatatttgacccatttgaaatgaatgattaagtcagcagttaggaggaatatgatttggcaagtgagggagcaaaatgttataggatactgatctttagttgtaaggtttaagcagaggctgagacaggaggatagtgtgagccccagaggtggaggctgcagtgagccttcattgcaccactacattccagtctgggtgacagagtgagaccctgtctcaacaacaacaacaaaaaaagtttaagcattacttgatggtatttattgcagtacattaaaaaaatctaagaaccatgtggcatgtttaactctcaccaccctctcctagtcagcattgctgacccctgccacacccctttctttacctggctctccttgacaacatctaatcagtaattctaaatacaaactgctcagcctccccaatgaatcccgcacttccgtctgacttcaaaatttctattaatgacctaaccaagctcttagtaacccaggattaaaaccagaatattttccaccctattttaccccatagccagttagttacaaggtatagcatagattctggagctagactggttgattcagttcccagcaccaccacttattagctgtgcaactttgggcaaattgcttgacctctgtgtacctcaattccctcatctgtcaagtgaggataattcataggtgttattaggataaagtgacataatgtacgtagagctacctgaaagctgtgcctggcatgtaccaagtaactcaataaatacagacctaaagacttgaatagaaaaaaacatcatgcctataatcccaggactttgggaggccatggcgggcagatcacttgaggtcaggaattcaagaccagtctagccaacatgatgaaaccctgtctctactaaaaatacaaaaattagccaggcgtggtggtgcacgcttgtaatcccagctacttggggggctgaggcaggagaatcgcttgaacttgggaggcagaggttgcaatgagccaagatcatgccactgctctccagcctgggcgacagaccaagaccctatctcaaaaaaaaaaaaaagaaaaagaaaaaacttcaatcttctgtctgccacactcccccagtcctgtcattttatttgtcacttctagtgtttacttccatatttctaattagacagtatcttcactgttgactggtaaattattccacaatttttggttaaatctagttgtcagtttttacattataataactgtgtttctgctgatacaagttgcgtattagaattatatttcctttcttgtacagttttgtcttttttttttttttttttttttttgagatggaatctcgtgctgtcgcccaggctcagttttgtctttcttatagttaataattaccttgtctttttcatgtacttgttttctatgtatttttttttttttttctgaatggtgcagtagatctatccaatgtctaacaactttttctttttttttttttttgagacagagtctcactctgtcacccaggctggagtgcagtggcgtgatctcagctccctgcagcctcccctcccgggttcaaacaattctcctgcctcagcctcccaagtagctgggattacaggcatgcactaccatgcccgactgatttttgcatttttagtagaggtggggtttctccatgttgcccaggctggtctcaaactcctgacctcaggtgatccacccgcctcagcctcccaaagtgctgggattacaggcatgagccaccacacctggcctcctaacaacttttctaagtgctcagatctgtccgatgatcttctgttgctaggtccctccttcccctacacagcctctgttctcctacagtcaggagggggcacagctgtcacttctcttggccctgctcctcttattttctggattgagtatcttcctctttcttaagtacttgactctttttgcagattcctaagaaaggatacctggatggtatattttcatgttcgaaaatatgtttattttattcatatgctcaattgatagtttgggtgtagaattctagggtagaagtaactttttatctagattttgaaggcattattttactaaattctaatccattgagaaattattcccattctaattcttgttcctttgtaaatttttgtttttttgagacaggttctcactctgtcatccaggctagagtgcagtggcacaatctcagttcactgcaacctctgcatcccggattcaagcgattctcctgtctcagcctcccaagtagctgggattacagacatgagctgccacacctggctaatttttgtatttttagtagagacagggtttcaccccatcttggccagactggtctcaaactcctgacctcagatgatccacccacctcggcctcccaaagtgctgcaattacagtcatcagccactgcactcagcctcattttttttaacttttttagagacaggttctatgttgtccaggttggccttgaactcctgggctcaagcgatcctcccgcctcagcctcctgagtagttgggattacaagtgtgagccaccatgcctggttcctttataactctattactatactattacttctattttctattactactttttttttttcttttttgagacagagtgttgttcttgtcacccaggatggagtgcagtggcacgatctcagctcactgcaacctctgccacccaggttcaagggattctcatgcctcagccttccaagtagctgggactacaggcatgcaccaccatgtcccactcattttttgtatttttagtggagacagggttttaccatgttggccaggctggtctcgaactcctgacctcaagtgattcacccaccctggcctcccaaagtgctaggattacatgctgagccaccgcacccaggcttgtaactctgttacttctgaaaactgtaagatactctctttatctcttcagtgttccgaaattttctatgatatttcttggtatatgaatctttttttattcattttgctaggcgttcagtaaacctattgaatctgaacattcatgtccttcatttctgagaattttttatgttgtttcttaaataattttctcttggattttcttctttgaggtagttctgttagctcactgttgcccctcttgaactgataacctaattttcttatgattttttttgctttctacattgtctctgttttccctgagttctgtttctctgctcctttgttttggtttatctctttgatgctttccttaaatgtttattagtccttggataactatttaagcataaggcaatgagcataaggatacctggtggacaggttggagcttgctgacttgtaagcctcacaataaggtgatcaggacacctccagtcttttgcttggtgacccccgaatgtctgtgtaaaaacaactttcccctgaggattgttcactggaaaaactaatctctgtggaagtgggtatacattgctgatgttctcaggatgggaaacagggtcaaggatctcattgtgtagtgtgtaggcttgtgcccagcaccctgttttcagccctgtgcctcacccctgctaagtcaaagagtctaactcctcttgggcaggggcagtttgcattatctctgatcactgcatacaattatctctggatatatgttaagtggttcaatttcaatatagcaaagagctgttaagaaaccgaaccatttgattgatatgtgcacattgttctgagctaattttatacatgtttacttcaggatcccttattctgagagcataaaagaaatgctaacgacatttggaactgctacctacaaggtgggactaaaggttcatcccaatgaagaggatcctcgtgttcccataatgtgttggggtagctgcgcgtacaccatccaaagcataggtaagagatttacagctgtttctctataagtcacaagcattcattgatatgaattaggcatagaatcttgtttttaaatgaaatgtttgaagtgggtaacaacgtgaagaaataataaaaagacttagaagcaagaaatgtaatgtactgacaaaatactagattgatagttcataaattaaccacagcaacagagaactcttggtggtggtggttatagcttcttgtcagttgaaggaatgtactgttcgtttttactttgtaaccaaatttaattcttgtgaaatgactttgaagattctgaaacttgacaatattgtactttctgtaggattggggtttttttaacctttttaagaaaattatattaaaatatacataacataacatttaccattttaaccatctttaatctgtagaaagaattttgagtgatgaagataaaccattgtttggtcctttaccttgcagactggtaagttctcagtttattcagttcatgatagtggggcatggaaattaggtggttctgctgcttttaatcttatggacctgcagtagttacttacaccttcacttctttcgtagtaaaaacccattttctgtaaggatattaaaaagtaatgtttgtggtttaatctttcttttaaataaacttcaggaggccgggcgcagtggcccacgcctgtaatcccagcactttgggaggccgaggcaggaggatcacctgaggtcgggagtttaagaccagcctgaccaacatggagaaacctcgtctctactaaaaacacaaaattagccaggcgtggtggcgcatgcctatagtcccagctactcaggaggcagaggcaagacaatcgcttgaacccgggaggcagaggttgcggtgagctgagattgtgccattgcactccagcctgggcaacaagagtgaaactccatctcaaaaaaaaaaaaaaaaaaaaattgcagcctggcagtatagtgagacctcatctctacacaaattttaaaattggctaggagtggtggcgtggcatgtacctgtggtcccaactacttaagaggctgagttgggaagatcactggagctggggaggttgaggctgcagtgagccatgattgtgcccctgtactctaggctgtgcaacagcacaagatcctatctttaaaaaaaaaaaaaagaagaagaagaagcagaagaatgtatattctagctccactttcttgctaaccattcatatttcaactcctgcagtttggctccacttctaacactttctgacttctatgaaatatctctttccaagttcaccaaatgatctcctgattatcattttgcgtgggcattttttagcccttgtctttgaaacctctacttaattgctcattctgaaacttttatttctctccattccttcttcattctgaaactcaattttcccttaatttctgtgacactcttggctttctttctgcctctgtggctcctgcctctcagcccactctccctcctccatcctgcagttgtcatttttaaacctccagagttctgccatctaatactcttccctggtcagccccatctatgcctctgatttcagttatatccaaatgatccccacctgtgtatctccaacccagatctttatcttaggtgtaggttatctctgcctatttttttaacctggatctcctacacatacctaaaattcaatccaaattaatttttcttcctatagtccctgttttagttaatttcaccactattcatccaggagaaaccagaaaattgaagtcttttttttttgagatggagtctcactctgttgctcagactggagtgcaatggcacaatctcggcccactgcagcctctgcatcctgggttcaagcgactctcctgtctcagcctcccgagtagctgggattacaggtgcatgccaccgtgcccagctaatttttgcgtttttagtagagatggggtttcaccatgttggccaggctggtctcaaactcctgacctcaggtgatctgcccatctcggcctcccaaaatgctgagattgcaggcatgagccaccattcccggcctagatacattttttagcctgggcattcacattcagttggtcagcagagtctgacaaattctcaccattccttcttctacttgtttggttcagccccatattatttcttgcctagattatcatagcagtttttacccagaatctcactcttctctaatacgttattagaggggctcctcaaaagcaatcctgttcatattcttcatacttttacaaacttcttaacctatttctccattatcacctcctgccagttcccacccctgtggtccagacttgtagaatcactgccagttcctcaatgctagttcccatgcctttgcacattccatttcctctgcctagagtaccctaagcagactgctactctttcagatgctgttcaagctttcccttcccttagaaagccctctgaaccatgtactgtgagttagagacctctcatctgtgatgcctgcctccttccccactttcttcctttcccaccccaggactttaagctctttgagagcaggagggggagaatgggttttatttgaagatcttcagaaccaagacctagtgtatatagtaggacctcaatatttattgaaccaaacattacagaaaatttggaaaatgaaaaaacaagcaggaagaaaaaagtcatcaacttatcacatacccatctttttccattagcatatttatgcttgattacaattggtactcacatgtagctttgtttctgctgtattctttaaatcaagagttttcttattactgctacttagtcctcataacaatttttaatagctgcaggcaccctcatttgtaccaccatcttcttagacagtttccccaatatttggagtatctctttaggatactctacattttacggaagagtatccacattttagaggatctctttaggataaacataagagatatgtgttttagggtatctgtttaggataaacatagagaaatactgcatccgcatcttggcttgtttatttgttttttgagatagagtctcgctctgttttccaggctggagtgcagtggtgtgatctcagctcactgcaacctctgcctccagggttcaagtgattctccttcctcagcctctcgagtagctgggattacaggtgtgagccaccacacccggcctgcactggcatcttgggagtgtcccttgctttctgtcagatgcgtatattctatattcttttcttttccagagaaaaccagcaacatggtggcaaagagatagatttcatttattcagcacacacttagacatttcccattccatttatcctgtgttagaggcatgtcattgagatgtcatagatctagttccataccatctagagcagtttcattgtgcatccagctgtgctctgaactagcattcctgaaagagaactgctttgcatttttgttttttgttaattgcgttggtttattttaggatgactgtcttaggtcattgacgagatttgccgcagcacactggacagtggcatcagtttcagtggtgcaaggacatttttgtaaactttttgcatgtgagtattaatacatttataacatgttgtaatttttcatcctctgaaattttgtttttaatggtacagcttctctcagtaatgaattaaatatttagtagtactggttttcttatatataagctctagcttataaattctcatgtgtcttgcaagaagataaatttaaagcagattatatgcattttaacatgttggcatatgaaatatgctaatgtatttctctttaaatctgtagcactggtgcctaatgacagccatgaggaacttccatgcatattagatattgacatgtttcatttattggtgggtattgtgcagtttgtttggacttctacgtcatactatgtaactttaccttaggtttggtgagcagtgtagtggcagacaggaaggagttatgtgatttccttaccccttctgagtataattcttttatgagaaacctcaaaaagaaaatatttaggaacctagttgagagacttgacctggttatcgagacgtcctctgactcttattttgctttatggctgaggttagtattttaacctctctgtgcttttaacctgtaaagagataaaaacaccagcaacgggtcaggtgtggtgactcatgcctgtaatcccagcactttgcgaggctcaccccagatcacttgaggtcaggagtttgagagcagccttgccaacatggtgaaaccctatctctactaaaaatacaaaaaattagctgggcgtggtggcacatgcctgtaatctcagctactcaggaaagtgagacaggagaatcacttgaacccaggaggcggaggttgcagtgaccaagattgcatgactgcactccagcctggatgacagagcaagaccccatccaaaaaaaaaaaaacagcaacagaagcactgctgctggcccatacagtgcttttgtacattttcgaaaatctggcagatacagccctgtggtcacactacttagcagcagagagccccttataattcagggaaaggtatgtcctctgagccaggacatcctagtgctaagacacacagctgtccaaatagtgggtagccaaatttcagccctacctcaactgggttcccttgcacagggtacagagtgtactgccacacccagcagccccgagtgctgtgcctttattctctggacctcagattctgcccctttaagttggttagtacctactttatatgactatgtcagaactcagtgagttaatccatgtaacacacttagagcaatatattcctaataaatgcggctattactgttctcattgctgcaactaaaaccaccaccacttatactgccatgcagacagcaggaggccaacagagctagcatttgtgtacctgccagcttttacatacgttcacacttacatctctacaatttacatgtaacatattgtctttagtttaccaatagggaaactgaggcctgatcagagatattaatttgtgtaaaacagctcataagaggaggaggtaggattcatatctagatatttatgggtccaaaacccatgttttttcaactgcctacagtcctggagagagttcagatactgtttttgttaacaataagctatgtatagaggacccactggattaatgaaatcatagtgcccatcaagagtcctgtaactcaagtcatttcatgtagccagtcctattggattttccaacatggatgccctttctttaagaacaaagatttcttaaagggaggagctgaactcaggagggatcacagtaagaaaatggaaatgtgaccaggcgcggtggctcacgcctgtaatcccagcactttgggaggccgaggtgggcggattacctgaggtcaggagttcgagaccagcctggccaacgtggcaaaacctcatctctactaaaaatacaaaaagtcgggcatgatgttgcacgcctgtaatcccagctactcaggaggctgaggcaggagaatcgcttgaacccaggaggtggatgttgcagtgaaccgaggttgcgccattgcactccagcctgggcaacagagtaagactctgtctcaaaaaaaaaatcaaaataaaagtaaaagtaagaagatggaaatttgcttagctgtgaaaggaaaggcgatctgtctgatgtcctgtgtttggtgcctaggtgggcttggtgcttgcatttcctgcgttgcagtgtcaggatttttcagggatcagccttggcactggagaccttcacattttccatctggttactatggcacacatcatacagatcttacttacctcatgtacaggtaactcttgcctttttgtcagtttcttgaaggaaatacttgagttttctgagttttaaaaaaagtattagaggaaaaggtatttggatgagaataacacatgaataaggctgtttttttctgtgtatcttcatatgaaaagttttgaaacatttctttctcctcttaaaatttcctagtaatgtgaatgtttctagttttaatttcatacattcagtaatatttgtgtagaatagtaattaaatcttttagaatcttatgttttagaatgccaattttgttttaacttacatgtttgttaatgcccacatgaattcatcattaaattacgttttgcattcaaaattcttgtttttcatacactttaagactatatttatttgattttacttaaaacatgccagctggctgtttggtttgattgagatcaatactgtgctcccacttgagggattacaattttgcatgttttctaggaatacttcatgttatatgtgagtttatgaatatatttgcatgcttaatgtcttcagtccttttgataacacttaattggaaaatacagagtactagtatttccttatctttcagaagagaatggcatggatcaagaaaatcccccttgtgaagaagaatcagcagttcttgctttgtataaaacacttcaccagtatacgggaaggtgagttagttatctttacataacgcatttccctaaatattgctagatgatgatagcatgagaaaggaattcgtttgttaattaggggaatttgttgtctgttgacatgtttttaaaataagacgtggagtgatctgcagagcctttctgaactattcatatactaacataattggaaatctgggagaaaggtgataatatgcagagcttcccacatttatttggctgtggaacccttcatttgctcagggatctggcagagactagaggatagatcaaatgtactttggaaagttgatactctaaaacttatgttgtctcattcagaatgggaatttaaaactgcaagttaaattggcataatttatttttaaggtaatattcagtagtagcaggaataaaatgaaattattagaattccatgtatggttagagtcatgatttgctacaaatagcaattcagtagtttgcttagctttcaacagtatatatgtcaagaatctgtagtcaggaacctataaaaatgtctgttttttgactatcccatttctgagaacctacattaacaaaataattcaacatatagaaaaaaaacatataggcatataaagatggacactccagccaggcacggtgtctcacccctataatcccagcactttgggagaatgaggctggcagattgcttgagcccaggcatttgagaccagcctggccaacatggtgaaaccctgtctctaccaaaaaatacaaaaattagccaggcatggtagcatgtgcctgtggttctatcttctcaggaggttgaggtagtcagatcacccaggcaggtgaaggctgcagtgagccatcacaccactgcactccagactggacaaaagagtgagaccctgtctcaaaaagaaaaagatgtacactctgatattatttatattagcaaataattgaaagcaatctaagtgtttgcaggggaatagtttgatatagtgatgaatgtgttccaaaatattataaatctatttaaaatatggctcctaggagctgggtgcagtggcatgtgcctgtagtcccagctgctcaggaggctgaggtgggaggattgctggagcccagtagtttgagtccagcctggacaacttttcattttccacattttctctttatgtcactatgttacttttataaattttaataacatcacacctgtaatcccagcactttgggaggccaaggcgggcagatcacaagatcaggagatcgagaccatcctggctaacacagcgaaaccccgtctctactaaaaatacaaaaaattagccgggcgtggtggcaggcacctgtagtcccagctactcaggaggctgaggcaggagaatggcgtgaacccaggaggcagagcttgcagtgagccgagattgtgccactgcactccagcctgggcgacagagcgagactccgtctcaaaaaatttaataacagcattggaggctgtgtcaccacttacacctggcatcctataataacacacacccacttgcctgttaactcacaacttttaagcatacatgccatcagttccaaatgacagtcaagtctgttttcacactataagtacagtgaccttttcttagtagatttcccaataatcttttttttcttttttagtgccttgaaagaaataccatccggctggcatctgtggaggagtgtcagagctggaatcatgcctttcctgaagtgttctgctttattttttcattacttaaatggagttccttccccacccgacattcaaggtaatttatactttctttcaaaacgtagggagagttagtaatcctttactccagcaaatataaagatcacttgcaaaaatgaaaattgactaaaagttcaaagaatagcttattgactatggtgatgtacacatttatagcataaaatgtatgtttatgcatatgtctccatttatttggatctcagtaaatgactgttaaacttctgtgtaaatgtttttacacctgcaaagcccttctcccgtaaagatcatagttttgctttcagatgttaaaatgttcagttatgtattattcataaacaaggttcctcagatttgaaaaggtgaaaactgacaatttcaagtgatttttaacttgaaacatgcatagcattaaaatttagaatacccataattgcacataaatctgattttaatctgggaattgatttgctctttcatagttgttttccatgttctgttttgattcatttcataaaagtagtatgaatgtggacttgactgtatctctgtatcccacagtgcctggcactggccgtagagtacctgcatgcagtgctactctctgaaagtttgtccactggcatttccatttagctagttgcctaggaaccatataaaagagtttagtcttccagattatttgcagtgatgattagagttggtatttaaatctgtgtctcgtggtaaaaccatcttgtatttctgtattggttgatccttttccagagcacccatacatttttatcatttaatgttcacaataaccctgtgcagtagattgtgcaggcacaccattttgcaaatgataaagccgagacaccaggacattgggaccagtttgatgtaggagtcgcctgactgcacttgacgcattgcgtcattttccatggattccttccatgtgccattctgttaacttcctacaagttacgtacctggcaaattggaagtctttcatcctttttttttaaactctgctattgcttaactctcatgcagaatatgcccttagttgttatatgcactcttttcttgttcttcatttgcagttcctggaacaagccattttgaacatttatgtagctatctttccctaccaaacaacctcatttgcctttttcaagaaaatagtgagataatgaattcactgattgaaaggtaatgattatatacttttctttgttgtattaaatagctctatggaaccaaactttagttatcacatatgtagcaaaattctcaagtaatgaccctggtagaattcaacacaaataattcaaactataatgggtgggccttttgttgttgtttgttttgttttgttttgtttttgtttttgtttttgttttgagactgagtcttgctctgtcacccaggctggagtgcagtggcatgatcttggctcactgcaacctccacctcctgggttcaggggattctcctgcctcggcctcccaagtagctggggttacaggcatacaccaccatgcctggctagttctttgaccaccatgttggtcaggctggtctcgaactcctgacctcaaatgattcacccacctcggccttccaaagtgctgggattacaggtgtgagccaccgcacctggcctatgagtaggcctttttagctaaggatctggcttttcagtaaactttttgccaagctagtgaatagcataaacaaatttgcatggaaggggaatagtggtagaaatgttgatttctttacatgaacttacttgttaaggactctcttccataggttttttcttgtttttgtttttaagagatggggttttgccattttttccagactgcctttgaactcctgggctgagacattcctcccacctcagcctcctgagtagctgggactgcaggcacatgccatcacactcagcttttcatagatttttaaagctgaaagaacccttaaggctatctagtccaataccctcaactttatatttgagaaaagtgaagtctagagaaattggcctgtcaatcatgtcaagttagtgactgagttaaatatatggctgttctgtccacaaaacgggggaaaatatttgcaaactacatatctgataagggattaacatccagaataggccgggcacagtggctcacccctgtaatcccagcactttgggaggcagaagtgggaggatcacttgagcccagaagttcaagaccagcctggggcgggggcgcggtggctcacgcctgtaatccgcagcactttgggaggcccagacgggcggatcacgaggtcaggagatcgagaccatcctggctaacacgatgaaaccccgtctctactaaaaatacaaaaaattagccaggtgtgttggtaggtgcctgtaatcccagctactcgggaggctgaggcaggagaatggcgtgaacccgggaggcggagcttgcagtgagccgagatcatgccactgcactccagcctgggggacaaagcgagactccgtctcaaaaaaaaaaaaaaaaaaaagaaagaccagcctgggtaacatggcgaaaccccatctctacaaaaaatttaaacattaggcatgctgacatgtacctgtcaggaggctgaagtgggaggatcacttgagccctggaggtcgaggctacagtgagctgcatgccattccactccagcctggatgacagatcaagaccctgtatcaaaagaaaaaatccagactatatatatccagaattcctacaacaacaacaaaaataaaacccaattaaaaaataggtaaagggcttaaataggcatttctccaaagaagataaatagccaaaaaagcatacgaaaagatgctcaacatcactagtcactggggaaatcacactgacataccacttcacacccattaggtgagctattacttttttaaaaaaagaaaattacaaatgtttacaaggatgtggaaaaactggtatactggtatccttgtgcatgggatatagaaaatgatagagccactacggaagacagcatgacagttcctcaaaaagataaacataaagttaccttatgattcagcaattccacttctaggtacagattacaaaataactgaaagcaggaactcagatcaatattatacacccacatttatagcagcattattcatgatagccaaaaaatggaaccaactcagatgttcaacagatgaatggatgcacaaaatgtggtgtgtacacacacacaatggactattattcagtcttaaaagtaggccaggtgtggtggtgcacgcctgtagtcccagctactcgggaggctgaggcaggagaatcacttgaacctgggaggcggaggttgcagtgagccaagattacgccactgcactccagcctgagtgacagagcaagactctgtctcaaaaagaaaagtaaagaaaattctcacacatgctacaacgtggatgaaccttgaggacgtgtgctaagtgaaataagccagtcacaaaaggataaatactgtatgattccacttcactgaggtacctagagtagtcaaatttatagaaacagaaagtagaatggtggttcccaggggctgggagaaggaattttgcatttaatgagtacagagtttcagttgggaaagatgaaaatgttctggagatggatggtggtgctggttgcacaacaatatgaaggtacttaatgctacagaacattagactttgaagtggttaacatggtcatttttatgttatatatattttaccacactaaaaaaaaaaatttttttttttttaagtctcactctgtcacccaggcttgagtgcactggcacagtcacagctcatcctcctgggttcaagcactcctcctgcctcagcttcccaagtagctgcgactacaggcacatgccaccacacccagctaatttttgtatttttagtagagaagggcttttgccatattgcccaggctggtctcaaactcctgggatcaagtaatcttcccgcctcagcctccgaaagtgcagggattacaggcatgagcacctggccaaaaaagttttatttttaatatgaatgttctagctccagataatgttagcttggcattaatacaaattaatatagactagtttttctagagtatccaaattagtaagataatgatgtttatagtcacaaattgtatatatttaagcattcttgcttttagaaaatattctcctgattttaaaagttgtaggcaaaatagtatttctacaggtttcttttgatgaagtaaatatgttaggtcaagaatattattttcctcttattggctatggaggggaaaaaattctagttctaaccctttaaaagtgttttgtgtttttccccctctgtttacattaaagttggtgccgtaacagtgaagttaaaagatatctagaaggtgaaagagatgctataaggtaagttaaagagcctcaaaaactttattgaggtgggagaaagggtggaatcaggatataagtgctatattccttcagaaactgacttctcaagcctttagtgattccaaaaggttaagatatgttgccttcatattttcttcttaatctaatgagagtctatcaaagtcagaattatgaacataaatatactacattcttggcagagaaagcaaataacaaagttatattttaggatatttgctttaaaaaatataacacgtctcctaggtttttcttagctctatttttttctatctttcattatgggaaaactctccagaagtgtgaagagtaaaataatgaggctccacatacttgtcattcaccttcaataactatcagtcaaatcatggccagtcatttcttataattattttttcttcatttctttttacattctattctgattctatagtaaagtgtgctctaccagatcctaacaagatgtgtctcaattgttactatacaagttgcgcatctctaatccaaaaatctgaaatttggaatgtccccatgagcattcctttaagcatcatgttggcactcaaaaagtttcaaattatggagcatttcagatttcaggttttaacagtagagatactcaacctggattaacaattgaaatgcatttgttgttatctggtagagtatgctttactacagaatccaaacagaagtaatgcaaacattccaaactctaaaagaattcaaaacccaaagcacttctggtcccaagcatctcagataagggatactcaacccatatctcttagttctggtaaatacatcgtccataaaagtcagaagactagagattatctgtcctatttgtttgcttttacacatccagaaataacaccccaattttattagtttggaccacatgaaatgtcaatttttatcagtcaaaaatggttgaatatcacaatttcatgtgattccaccctgacgtcagaaaactcttaataaatggaacagtaatcctcaactagaagtatacatcagaataaccttgggaacttttgaaaaaatactcaggccactacctactgaatctaatttctctaaagttaaagccctagcatgtctgtcccctcaaaattcccccaagtgattttgatatgattaagaactactgtctagccgagcacattggctcacgcctgtaatcccagcattttgggaggccgaggcgggcagatcacgaggtcaggagatcaagaccatcctggctaatacggtgaaaccctgtctctactaaaaaaaaaaaaatacaaaaaattagctgggcatggtggcgggtgcctgtagtcccagctactcgggaggctgaggcaggagaatagcatgaacccgggaggcggaggttgcagtgagccaagattgcgccactgcactccagcctgggcacagagctagactccgtctcaaaaaaaaaacaaaaaacaaaaacaaaaaaaaaactgtctaaaataatccccccttcagtttaactccatttcttgtcttggcaataggtaaagtagtgaaaggccataccatgttacccgggctaggcaggtatgtgcacatggaagtgcctcatagtataatatgacctaaattaatggagtgttctttaatttttctctttttttcagatatccaagagaatctaacaaattaataaaccttccagaggattacagcagcctcattaatcaagcatccaatttctcgtaagttttgctgttagcattgaacattccctgccactggaaacacctctctacaaagaatttgaaggattttgttgttgttctttgtttgggtagagaaatcatatctgtagtcctttatgagaggagagggagaaaaaaggaaaaaaagaagaaacttggcgaggcacggtggctcacgcctgtaatcccagcactttgggaggccgaggtgggtggatcacctgaggtcaggagttccagcctggccaaacccttggtgaaaccctgtctctactaaaaatacagaattagcggggcatggtggcaggcgcctgtaatcgcagctactcgggaggctgaggcaggagaatcacttgaacctgagaggcagaggttgtagtgagccaagattgagcaattacactccagcctgggtgacaaaagcaaaactctgtctcaaaaaatgaataacatctgtagtactctatactacataacttataaaagcatcatttcactatgtttcagaataagacatggaatgggagtaggagaagcaaatttgattcatgaatgtttaataattgcacttaaagtaataacagcccttagtaatttttttttttttttgagacgagtctcgctctgttgcccaggatggagtgcagtggtgcaaccttggctcgctgcaacctccgcctcccagatgctagtgattcttgtacctcagcctcctgagtagctgggattacaggcatgcaccacaacgcccagctaattttttttttgtatttttagtatcacctcagcctcccaaagtgctgggattacaggcatgagccactacacccggcagtaatttttaatatagtatcaaatatttaacatacaagcagcataaagaataatataataggggaggctgaggtgggagtatcactcgagcccaggagatggaggctgcagttagtcatgatcgtgccactgcactctagcctgggtgacagcgagaccttgtctcaaaaaaaaaaagaagaatataataatgtaagagcttaaacattacctagacagttgaagctccccagctgtctcttctctgttgcctctttctcctccctctgaagatacctactattctaaatggaatattaagcattccattcctatacattaactatataagtttctattcttgagcagcatgtattgttattttgtatgttttttttttaattagtatttattgatcattcttgggtgtttctcggagggggggatttggcagggtcataggacaatagtggagggaaggtcagcagataaagatgtgaacaaaggtctctggttttcctaggcagaggtccctgcggccttccgcagtgtttgtgtccctgggtacttgagattagggagtggtgatgactcttaacgagcatgctgccttcaagcatctgtttaacaaagcacatcttgcaccgcccttaatccatttaacccttagtggacacagcacatgtttcagagagcacggggttgggggtaaggttatagattaacagcatcccaaggcagaagaatttttcttagtacagaacaaaatggagtctcctatgtctacttctttctacacagacacagtaacaatctgatctctctttcttttccccacatttcccccttttctattcgacaaaaccgccatcgtcatcacggcctgttgtcaatgagctgttggttgcacctcccagatggggtggcggccaggtagagaggctcctcacttcccagacggggcagccgggcagaggcgccccccacctcccggacggggcggctggccgggtgggagctgccccccacctcccggacggggcagctggccgggtaggggctgccccccacctcccggactgggcggctgctgggcggagacgctcctcacttcccagacggggcggctgccgggcggaggggctcctcacttctcagacggggcagccggtcggagacactcctcacctcccagacagggtcgcggccgggcagaggcgctcctcacatcccagacggggcggcggggcagaggcgctccccacatcccagacgatgggcggccgggcagagacgctcctcacttcctagacgggatgacggccaggaagaggggctcctcacttctcagactgggcggccgggcagagacgctcgtcacttcctagacggggtggcggccgggcagaggctgcaatctccgcactttgggaggccaaggcaggcggctgggaggtggaggttgtagcgagccgagatcgcgccactgcactccagcctgggcaacattgagcactgagtgagcaagactccctctgcaatcctggcacctcgggaggccgaggctggcagatcactcgccgtcaggagctggagaccagcccggccaacacggcgaaaccccgtctccaccaaaaaatacaaaaaccagtcaggcgtggcggcgcgcgcctgcaatcccaggcactgggcaggctgagacaggagaatcaggcagggaggttgcagtgagccaagatggcggcagtacagtccagcctcggctcggcatcagagggagactgtgcaaaggggagagggagagaagagagggagagggagagctgtatgttgtattttattttatttatttatttatttatttatttattgagacagggtctcactctgttgcccaggctggagtgcagtggtgtgatcttggctcacagcaacctccgcctcccaggttcaagtgattctccagtctcagcctccaaagtagctgggactacaggtgcacaccaccatgcctggctaatttttgtatttttagtagagacggggtttcaccatattggtcaggctggtctcaaactcctgacctcagttgatccacccacctttgcctcccaaagtgctgggattacaggcgtgagccactgcacccagccaattttgcattcattcagcattgtttctaagatttatctgtattgacgtttataactttattgatttttcattgctccatagtattttattatatggcagtggtaccgtttatctttttctcctattgatgattttatttatttttttttctccagttactgattcttttgagtgtttccagtacatggtctttgtatatatgtgcaagatgtttcctattccagattctaggaataaacttgcatagactgtaggatatacacttctttggctttacttgatattgcagaattcttttctgggctggttttttcatcactagctctttagccactctttagatcaatgacttgtgggttttttatcccttggaggtgcccgaaatcaggtggtgataagagcagagccccaactctgtgccttgtgtgcggatctctgctgtgctcccagagttactgctgccagactgaactggaaggggaggatgtaggagcctgcacagctcacacctactcctgtggctctggagtgggcatcttcctgaggtaaggacctgcaggggctttttagctttggatctgcctcagtatctgactgttagggtgtcacaggaaactactatattgccaggaattttgagactactgttccgtgtgattcattccagaaacgtggagctccttgtcgcctcacatctcacatctggtccatgccaactctgtgttggttcttttattgttaccattcccactcctcttccctcaaccataggtgacagttctgttctactttctccatgtctcccactaatgtgaaacttctctgattttctgaacaaatccagtcagaattactctttctgttatgtcctcatggcttttggattttacctccacttatacatattatcacaactctacatgccagcttgtgattagtgactactatgtaccaggcattgaggatgcagtagtccacagtgcaaagatctctgcccttatggatggagcttgttttgtatgagagagaggacaagcaagactgacaagaatttagatagtgatataggctaaggagaaaaaataaagcagggaaggggaatatgaaatggcagctatggagctaaatttgagatttaattttagtagatcagggaaggcttcctaagaacatgacttctgagtaaagacctaaagaagtgggagaacattctactcagaacattctgcacagttcctggggtagaaatgtgcctgtctgctcaaggcaaggaggcgcgtgtcactggagtgttgtgcacaggtgagagaatccaggggcctgctgtgtgctggtgacatctctgggcaaggtgtaagccatttcagggtttgaagcagaggcatgacatgagtgtgggctcctctggagcataggttgtatccatagcttagtcatccccccagtaccttgataatttcttatacgtattaggtcctcaataaatgtctgtttaattgtgctgtactattaatgccagaaaaaggcaaatgtctcaaagggatcaggggacacaaatttgactcgattcaacctatttcctagtttgtgcacaattttttaatggataacttcctcctaatagtggtttaaatatcagtactataagacttcattctatttggaactgaatacaaatgttggttactaatgtgtaaatgtgtaacgtatgactgatctctctacagagtacgggaatgtcaggtgctatttttagctggcaaaaccaaaggctgtttttattctcctccttaccttgatgactatggggagaccgaccagggactcaggtaagaacccatcctgagttagctaactcagggcctgcagcgcccttccgtatgtggtgacgtcctgagggtggagggctgaggtggttctggaagaggtggctgtgttatctgtggagtcttccaaggagggtgccctgtcagcctggtttggtgttcttttcccagccttcagaatgccatgaggaacatcaggataggtaagggaagagaataggacagagtgcaactttattccatttatcactccaaagaactgtttgaattgccatatagcatcccagctcagagcactccagggatggcccactctgacttgtatggccttgtatagaggaagcccagtgtttgagaaaatcttaattgctaacaaatgtgcttattacattaaaatctgggggacaaagatttaaaacataaagaacaatataacaatatttgaggctaagttacttctactctggtagctttagtatattgtaagctaacaattcccccaagcactattaaagaacttctttcagaccatctcttttgtctaaaggaggtataagttttaaccgccatagatatgcctgtccagccttaagtagcagatgttaaaggcctagaaacccaagcaaggtaagtagatgagctgccccaggcgctggactgcgaggctatgcccatatgccacccagtgctggtgcttcccactgttctcagcgtgggctgttaggaggaggagagtctgattagtgagtgagaggatggctgtgctcagaaacaggagcagaggtgcctggctcagggcactggtcccaggcaggaacccaccaaagcttgcacttgtgtttaaattagacctggaagttactcacatttgattgcttcactgagactgtggctgaaagattgcatctgaggaatgtttttcttttcttttcttttcttttttctttgcactcttagtaaaatctgtgaggaatatttttactcctataattcttcttttgtgttctcctctgccctcttccctttttacacgttaccaacaaaatgggcaatgaattggtagttttagcctctcaacccagaccctccttatcccccgcaacctctattccctcacctcactctgggtaagtctggtttgtgtacctttccttcctcatttcagcacttattcccttttacctgctcttggcaaagggtcagagctgatgtttttgttaatagccacagtcacctgccagacagaaatgttgcagggagtctaaaaccaataacttgtaaccttgcctaaatcaggaagggttgggttataatagaggaataaacagaacacattctgagtgacatgtgtcttctctttctagacggggaaatcctttacatttatgcaaagagcgattcaagaagattcagaagctctggcaccaacacagtgtcacagaggaaattggacatgcacaggaagccaatcagacactggttggcattgactggcaacatttataattattgcaccaccaaaaaacacaaacttggatttttttaacccagttggctttttaagaaagaaagaagttctgctgaatttggaaataaattctttatttaaactttccttcccagttttatagtttctggttctgaggactgatgaaaatcatcttccatcagcagattttcttgcactgtttgctgtgcccctcaaatataatgtcttgggttttaagatcgagcaaggagcttctcttcctagattggatcccagcccctttgtgggggtctgactgcatagtcccagccattatgtgatatttcacgttattgatgatagtgaaccgtgggtccgaagctgactcaacggaggcagggaacaaagtctctgtggtctgttgggtcatacttcctggttccactgagtggcccaacactgggactgggttggtgtcccctctgctgacaggaccctactcctaggagcaaagtggttgattttgaaggcagtgttcccttctctccattgactatgagagagttgggggacacacatgcagaagaagcccgtggggagaaggtggattcctggtgtgctggctggtttttcagggctgttagaggttttttttttttctttttttttttatggcaagacttttggctttgagaaaactcacttagagggctttccaaaaacttaggatggtctaaaaaattaggatattcttttagaattaggaagaaaaattaggatattctaaaagaatatggattaaaaatttaggatattcttttagatatcctaatatctagatgagaggccttccttcataagatctggttgtttgggctgtggttggcataagtgatatttattttggcctctgtcacatccagtttcttgagcttttaaggtaagcttcttttggctttttttcagatgttcaccaagcttaagtttaaaataataggtattctaaaagagtatcctaattttcttatctgtattcttttagaataccctaatgtttcagacagtgatattctcttgttatttctaaggctaaattggcagagtatatcatctaaagccaaacactgaagaaggtgagaacccactcccacccagccagcatttcctggaacagacaagctgctgcttccttgctggctcacttagtgcattcctgggatggtctggcacccaggctttttattctttttgatcattgttcttactgaggtgccttcctagaacaagagccacttacaaaatagcttataattattatgtaccacacaactactattgtttgatgtatgactgctgagagcttgaatacatgcagagagtgactgaagacttagtagaggaataaattctgagcctgtctaaggtggggctaaggaacagatgagtaataagaggctcttggatttttttaaccaatgcaactgaccctttcaatcagttttctttgaattacatctacaagttttgttccactcagctaccagtcaactaggcatgctccacagtatcacaggaagaaggtcagaaatctggaactgaagctaaaagaagtgaggatgtagaagccacattcctctccaaggtagtgtgtgaaagaaccgccccctcttgacaggaggatgaccgtcgccattcttgcgtgggactgactcacccagctgagaggaggaccaatagaaagaaaattcacatttgagtccacctctctccccctttttctggccttcattcataagatctggttgtttgggctgtaggtggcataattcatgtttattttggcctctgtcacatccagtttctttagcttttaaggtaagcttcttttggctttttttcatatgttcaccaagctaaaatttaaaataataagaccaggtttctctctgtacaagtggattataaacattttcaccaaatcataacaatactccagctttccggtccgacttcctaggagcctggagttagcaaaggttgtctctggatttcattctctgagaatatcacagagcctgggagaagatgaatttacatgaaattgcaacatacacacctttttattttctggtgttaagctagttgtctttcctaccttacaaatcatgttagttttatgatttgttccgcatgttttatgtttattgtagaaatgtttatataacatacgctttccatatcagggaaaatcatatctgtttaataaattggctataactttaatatctgtggacaacttgtaaaatttggaatgtatcatatgtaaaaagtttaaagatatccaaataaatgctttaggtgttggcatta

SEQ ID NO: 621 - DNA, 2071 bp, Homo sapiens
actcttgttttttaagtcacatttattgaggtatattttacaaacagattaactctttttagtgtacagttttatacattttaacaaatgcatacagttaaacaaccacaatcgagaaatagaacaattccatcttccccaaaagtcccctttgtagtcagcttcttgcctcatcctggctttcagctaccagtgtttttctctccctttgttttgtctcttcccgaatgttatataaatggaattgtatcatatgtagcattttgagtctggcttctcactaaagaagaatgcattcgggtcctccctgttcctttggattgctgagtagcattccgttgtacagacttctgggcagttgccagatgaagggcatttgggtgagtttgggtgattgttttggtgattactgctacaaacattcatggatgggtttttgtacaaacctgaattttcacttccctcaggtaaatagctagaagttgtcccttacatcttaatcctccatttgatgccatcctgagagctcagcattctctaatctgtaactttgctgtttacagtcctctgtgatggacaggataaaatgctgtcaggagttaagaactgacatgtttttccccttccagccaatctatccattgtgacctgggaaggcacttgtctcttccctggactttcatagtattggacagacacttttctcttcctaacacagtggtgctgcctgcctgcgctgtcattgagagccatctttttagccagtcgtggatgaaaagccctgtcttggtccacgattttccctggctaagctgcaaacatgctggcctagtgtaacaggtgcccggacgaggaggggcaggggagcgtgcagagcgggcacctaatcttattaacccatattaaggttactaggggtttatttactggcagctcagtcccaggcttgaagcatgttgtaaagaagctgtgggttctggaactgaggccaaaaattctaggacacagcttcccaaatattcaggatagtcatcacctgtttcttcaccgtggagtgagcattttaaaaatgaaagtcctaaggccctgtctacccccaccccatcccggggctatgctggcagaactttaaaagctagctgggccaggtggctcactcctataatcccagcactttgggaggccaaggcgggcagatcacctaaggacaggagttcgagaccagcctggccaacatggtgaaatctcatctctaataaaaatacaaaaattagccgggcgtggtggcaaacgcctgtaatcccagctagtagggaggctgaggcaggagaatcacttgaacccaggaggcggaggttgcagtgagctgagatcatgccattgcactccagcctgggcaacaagagcaaaactccatatttgaaaaaaaaaaaaaaaaagtaggctgggtccctcaggagaaaaggatttacaccagcccaaggaaagactgaagttacacacaagcaaaaacctgatagcagagacttcctgggcactggtaggtgaccaaaagggatggtccaggtttctctcgcaactaccggctacctgagaagacctgttaaaatgcagttaaccctaagcctgctccgaaccaatgagtgagatttattgtagagtcaatgcactcttggtcctctcaacaaccttcagattctcaggttgttcacatttgctcctataacctggccccatagagactcatatttccctgtttgaggaaataacgttttggccagaggagaagaaaaaatggcttggagttttgcctaaatttctacattaaaattccatgtattcagctctggttcaaactccagcaaatgctgagattatttggatataataatagtcactgttgtaatagtcaccgttcttacaggtaagagatggcaagatggagagatgtgatacccaagccatgtttataacaacgattgttaccaatgcttcccttagggtgggtttcttttcttttttggcaaatactagcggtagtaggggattctgatatatgttgttgaatggg

SEQ ID NO: 622 - DNA, 7428 bp, Homo sapiens
actgaatggtcagatgagctgaggcagaagttcctagaagggtttgatgcctttttggaattactaaaatgtatgcaggtatgtaaaaactgttacacttttctttttccttttttttttttctcttttctctttttttttttttttttaatttttctttttctttttaagagatgggggtctcactgtgttgcccagggtggagtgtagtggctagtcatagacacaaccatagtgtactatacctttgaactcctggtctctggcagttctcctgcctcagcctccaaagttgcctgggactagaggcgcaggcacgggcccaggcccagcttctttgttgttgttgttgttgttgttgttgttgttcattgaaatgaacagctttctgtctgcgcatcttttcatttcgtgcacatttccaaaagatcaatttggatggctgcaattctgaccaggaagctcctctttaattggaaattcttagaaaggtatggagcaaaggagatcccagcaaacattccggcatctactgctcttgggttttttctgtgttggttttttttgttttgttttgtttatgagatggagtctcactctgtcgcccaggctggagtgcagtggcgcaatctcagctcactgcaatctccacctccagagttcaagtgaatatcctgcctcagcctctcaaacagctggaattacaggtatacaccaccacaccagctaattttttgtatttttaatagagatagggtttcaccaagttgtccaggctggtctcgaactcctgacctcaagtgatccacccacctcaacctcccagagtgctgggattaccggcatgagccaccgcacctggccagtttttggggttgtttttttgtttgttttttgttttgttttgttttgttttgtttgagacatagtttttcactctgttgcccaggctggagtacaatggcacaatcctggctcactgcaacctccgcctcctgggttcaagtgattctctgacctcagctttttgagtagctgggattacaggcacctgccaccatgcctggctattttttgtatttttagtagagacgaggtttcaccaagttgtccaggctgatttcaaactgctgacctcaagtgatccgcccacctcggcctcccaatgtgctgggattacaggcatgagccactgcgccagccacttttatatttctttggtttccactaatgttctttctttagaggttacaagtttatttttttaatatgctttcttggaagtatagtcaagttatttgagaaactgtagtggtttttgattttgctttttaatgtttccatgtttctttttctctccttcatgtggtatttatataatacagtgtagacctttttcccctgtttaattctctttttaggaaacatccctatatacaaaacagaatctagaagtagaaacgaacaggtatatttaaccagttataactgtaagaagataggtgacgtctctaaaaatctgagcaagtactattatgatttctttagtagccacctggctttcttaagaaaaggaatgaccaaagttgacttaccatttttatttttatttgtttgaatttatttttatttatttatttattttggaggtggaggtttgctctatcgcccaggcgggagtgcagtggcgcgatcttggctcactgcaacctctgcctcccaggttcaagcaattcttctgcctcagcctcccgagtagctgggattacaggtgcacgccaccacacctagctcatttttgtattgttagtagagacagggtttcgccatgttggccaggctggtcttgaattcctgacctcaagtgatccacccgcctcggcctcccaaagtgctgggattacaggcgtgggccaccatgtctggcctgacttaccattctagttcctaggttgggtggtagttcatgggtgtttattataatactactatgtttttcatgtatctgtgaaaacaatagctactttggtcatttttgatacttgaagtattctgtattctctattgtttaataagttctgacatactagaatagttaggctagtttctgaacagtaattttaattaaaagctatttattgttttgccttctttcaggctctgtgaaaacttctaattgcatattaggacataatattaaaactttattataaaatacagttataaattcaataacattttaaaagcttgtcacatttcttttaacaattttttctatagaccatagagctaaaaaggaaggattattgcagtgaaatattgaagtattttattgcctaaaacagatcttagatgatacctctgaaataatgtgtttattgggatttctaaatttatattttagagaatgttatataaacacataattttaaaagctattatttctcatagtacttgaagtttcctgttaaaacttataccttctatgtttttataatcaatatatatttctcctacattacttcttaggtttccatataaaagaacaactattattttcattcatatataattttttcacttccgttaagggaatggatccaattacacgtcaagtaggacaacatattgaaatggaaccagagtgggaagcagccttcacactacaaatgaaattaacacatgtcatttcaatgatgcaggactggtgtgcttcagatgtgagtttcttctgggtgcggggaataggaggaaagtggaagagggaggaataagcagaatcctaagtaaatttcaaggagatctggagaaaatagtggtgatacttagttcattaaacagcgtattttccttctccacctataaactcagtaaaattttaaaattctacagcctgaggaaaaacttgaaaaatagagaaagaaataatccagattgtctcttccctaatgtaactatctttgttttttttccataatcccttctagactttgaggatataaaaatggtagtttctaaatttattcaaaaataaagttttattattggtacatttgtcctgtgtcttaaaattattttggccttcctttggcgataaagtctagatgagagcctgtatacattatgaggttagggaggtttctgtaaggtctgaacaatctgtaaaagttaatggaacaatgagtaaatgatattcctgactgagaagacagctgcattatagtctgtgatgacagggactagggtagtcctaggagctatagaaaggtctgtggttggagcacagaagtagagaacagagatttgggcacaggagtgatttttcggggccttggccatggttgtttttttttttgttttttttttttttgagacacagcttactctgttgcccaggccagagtgcagtggtgcaatcccggctcactgcagcctcaacctccctgggcttaggtgatcctcccacctcagcctcccaagtagctgggacaacaggcacacaccaccacacctggctaatttttctattttttgtagagacagggcttcgccgtgttacccaggctggtcttgaattcctgggctcaagcgatctgcttgcctcggcctcccaaagtcttggaattaccagcgtgagccaccacactcagcctgcattttatttgaattgaagtgggaagcctttagagattaccatctctctattaaattccctgcttcaactcttgccccctttatccattttccatacagtgacatgattcaatttacatgttttttaaaattgctctgtatggagaatggatgaagggggcaagagtcaaagcaggaatttaatagagagacgcttggcaatgccttggagttactagagatagagaaaagtagcaagttttgagagaaacttagaagatgaagttgccagcttggtaatagattggacaatggggaatgggggaaaggagggtattggaataacttctagatttctgcactatatgagtaaatgtatcattcactgagatgagggacactggaagagggaccaaatttgggagggaggattgagtttggttttgcctatattgttatttgaggtacttactcactgaatttaaggtgcttattcaatgttgtaaaaactcaaccttttgagtaacttacagaaaaaccctcttttttaggaaaaagtgttaatcgaagcttacaagaaatgtctcgctgtactgatgcagtgtcatggtggttatactgatggtgaacagccaatcacactaagcatttgtggacattcagtggaaactatcagatactgtgtttcccaagaaaaagttagcattcacctcccagtttctcgcttacttgcaggtaaagcatttcccctaaaataaaaccctaaaattatcttttaaattgttgtttgtggttaatatctgtgaatacttactttgtgccagatgttattctgtgatttctacatcattaacttatccaatcatcacatcgtcctgtgaagtaggtattattattaagcttgcttcatagatgggaagacagaggcatagagagtgacttgcttagtaagtcacacaacaagaaagaatcagttggcattatgaggaagtttggcaccagaggccatgtttatagccgttataccatagtgcttctttagacaactacagataccacgttttatcatttcatcgaatccagcttcaaagtctatgttgttaccattcaaattaatctgtcacttaagcaattgctaatcatttgaagccaccctaggttttctattctcctttttttcctctccctctgagctgtttcatatatttattgatagctttttacgcaacaggtcaagaacaaggacataatggggtgataatcttttaatttcaagtagttgatttacaagccacttgtaattaattggtagaatgtctgaagctgccatcttatgtggccaaagactttgaatatgcacttatccatctctgcagactcatttcagtacagctttcatatttcttgattctaggtattcttttcttgctcgcacactgttgttttctttagttccgttttaactcagagaacagaaagaaattttgaaggtatttttactcattgtaaaatatgtagtttatgttaagtttgtggctcagtagcttaatgtgatgtgagggtatgttttttgttttgttttgtttttttctggaggagattgtagagagtttgtttcatttcttccttaaatgtttgacagaattcaccagtgaagtcatctcatctgatgctttaggttttggaaggttattaataattgactcaatttctttaatagatacgggcctgtttaggttatctttttctccttgtgtgagttttggtagtctgtgtctttcagggaattgatccatttcatctaagttatcagatttgtgggcctagagttgttaatattccttcattatccttttaatgtacatggggtcagtagtaatgattcctctttcattctgaaggcattttttttcattgttctgagacctatcacattatcccactgatagacccttgccatgggtatattattgaagtcatggtaatttaagataattacttactctgaggcttataaagttgttattcctagacatatgaatatcaaatggtacaatagaccattacctagaatgaaatcatgatcgtaagaagaaatctctcttatttctataacttgttcaggcccagttttgtttttataagtgttttgagcaactgaactgtcaatcctcaacacaggcaattgatggcatggtgttgtggaaaagtattggacagaaggcaagaaagtgaggcatgcgtgtggaagtagcacgcaggcgcagcgtggcatgccctgcacgtgcccttaaaaaaaaaaaaggcaagaaattgagtaatgagtcctgtctccaactgagccactgatctcttctgcctttaaaaatcagagtgagactctgtctcaaaaaaaaaaagtctaattttatgggaggaagctgatgctgatagttatctacagtgaaaaaagtcagtgctctaaaaatgtactaatttctgcctaggtttttacctccctcaaagctgtcgtgtgaatatttttgagtattcatttcatggtatttcataaaccttagcctaactgcttataatctaattggaaatctaagtaaaccaacacaaaacagttcatggacagtttgaagcaagtgctaatggagtttgtaaatgttgagcatttacaacatttacaaatggagcagtaaatgttgagaataagctattagaatggcattagtagtgcaagttttcctagatgaagaaagcctcaaaccaggcttgagtaaatggccattatatattgataagactttaaagggtgtcctctgtttaagcaatagcataaacaacacattcagaatgaactgaaggctgggcgtggtggctcatgcctgtaatcccagcactttgggaggccgaggccagcagatcacctgaggtcaggagttcgagaccagcctggccaacatggcaaaaccccgtctctactaaaaataaaaaaattagctgggcatggtggagtgcacctgtagtcccagctgctctgctcaggaggctgaggcaggagaatcgcttgaacctgggaggcagaggttgcagtcagccaagatcccttgaggttagaaactaatgaggctttgatcctaaaccaaaagttctggggaacttaattcaaaggtcagtatcagtaaggaccgtgaattccagggccagtttttccgatcagtggccagaaggatctctcactgctatactttaaatgggaacaaattccatggcccagtgaaatacaactcttaaagctggcataacatgtatataaattgttttgatagcttttaaaatgtcattggtgtgtattagtacatacaactaagactagttctaagtgtgcctttgataacagattcatgagaagcattaaaaagcctcttttattagccgggtgtggtggcgggtgcctgtggtcccagctactcgggaggctgaggcaggagaatggcgtgaacccgggaggcggagcttgcagtgatccaagatcgcgccactgcactccagccgggtgacagagcgagactccgtctcaaaaaattaataataataataagcctcttatgaatatagatcattttctatcttaattggtaatttgataggttcccaaagagaaaagaagttagatataaagttgagtgaatatttagggtatttttcctaaatgatttttactgatagaaatactgttttttgtttgttctttcatgcaggtttacatgtattattaagcaaaagtgaagtggcatataaatttcc

SEQ ID NO: 623 - DNA, 8473 bp, Homo sapiens
gctctacctcccgcggccgggactaccctcagagccgcgaccgccgcggcgtgcgtcccgggcctgcaaaactgtttccaaactgcccgggccggaggcgggcgcgcggggcccggggagatggctggggtctggggggccgagggtgtgtgtggacgctgggagccgcggggggaggccggcgtcgactcagaggagttgcaatcgaggtatctgcgctccggcttcctcctgcggcccgcgaccccctccccggagctgagctggggaagggagaccagggttcaccacgttagcattcgcattcctgggaggatgcagccctcgcctggacctgggcgatagacgccttcttctgtttttatttttggaggggagcgccctgtaattgtcctgaacacatgcttcccccccttcctccagccacccgcggaggagagagtcccccttttttgcatttatcttttccttcccctttctttattaaaggtccgggagtggcggcggccaatcagcgcgcggcttccattttgtgagttcaactccgaggctcccgggcttcgcgaggacgcgtttgcagccccctctgccgctcctctctggcggccgaggcgcaggagccgcctcgccggggctcggagctggtgtagctcatattggggctcttttcggggtttgtaatttggccgtgggtaggtaattggctggagcagggcggcagggcgcggcagccaatcagcgcgcggcttctatagggcttgagttattagacgctgatctcaaaacatccttcatcagacacgaaggagaggccaacagatgagggaagccatttttctgcaatggaattaaatggccaagtgggtttttcctttgttgcaaatggggaatgtttttcctttgactctaccatccagttcaggacgtctcagtgtgtttaacatttgtcaacaggcccaaggactcacagttggaagactggagaagactttttaaaaagatctggatttttccttatgacttggaatccatctttgtcttgtataactaggtcatagcacaccattcatgtcagcagttaacagttttgaattccaaaaaaacctaagtaaatgacatattttttttcctctttttgttctatgggtgggtggggggagcttggagctgtcttaatctgtattctcttgactgaacaataaatttttaaatatatctagtttcctctattaaacacttaaacctggccatcttattaactccttctctctttttaacaaggtaatgttttaaatgtatatagctttaggactagcgaaatggcagcaacaaaaaattgtgagcagttgttactcttttagtttttaaaaaaccttttacattgtaagtacccaatccattctgtcctgacgcagtacagttttgatgttaatgttgctgagatgtccttaattttccgaaccttcatctgcatgtatgtctttgtctctcttgtctaatataagccagttaagatgcttgagacgatcttgctttataaagctaaggttctagctttatgcttttgaaaatgtttacagcactaaatgctagtcagctttcttccccgtagcttgtacactttctttgaaaatcgatctatttgaagaaaaacagccctgtttttctcgtctttggtgttgggggttggggggagctggtgggtgagggaaaggaagaccttttctttgtgtagagagactaaagccgtcacaggaaactagattaaaactggaaaacaagtcctagctggttccagcaaacaccaacgttaagtggggggtattttctatggtggttgggcggctggtgcgtcttgtgccttttgtttgatttgactgtattttcgccttttgtctcttaatgacgatcacaccattgctatatccagagcagtaaacagtcctcagcgaagccgcctttttgcctacccaaccctggaaagtttgcagaagtggaaggagcagaacgtgagggtgtaacttacaaaaaggtaataagaacaaagacaccaccataacccccaaatttcccaactaaatcaaaaaatatatatgtttttacaataacgtctccaaaaccaccgcccagcttgatcttctagactccatggcaccgggctgagcgggtaagtaagaaagataaaaagtgccttttgccccttcgaggaaacccttttgcaggccaagcaagggctgcaagtgtttgggagctgagaggagaaggaggattctggagcattgtatttggcagccggagcgggcagtgggcggggggttgggacacgaagggctcttcggacccctgtgcctcttctgccccaagggcgagaagacgggcttcgcagcgaccctcgggggtccatggagccgcctgccttcgccccctcgctcttcccaggtctgaacctggatggggagaagaaattgaagtgctttggagacgggggggcttaaaacactagggagcctcatcgcccagccttgggcccactttcctttcgatcgtgaggattccgcaccccgaagccggcttctcggggctccggggcgcgcctgcgctggcaacgcgaaggaggacaaaaggccggcgtccatgttggcaccatgacgcagcatctccgcccgcagcccggagctgctgtcctcccggccgcgctcgctcctcctcccaaacaccagttttctttacaggcttcgagcccgtcgcggctgggccgggctggtctggcaggcgggcccagccgggcagggctgctttgctaatggcggcggctctctttccttccttcctcctttcctccgtccccccggtcgtggggagcccggagcaggaggcgggcccgcggccaggtcgggccccgagagcccgcggggcgcagcgctggcgaccgggtgtcgggggccgtttcgggggccgtgggcctcgggggcgtcgcgcgccgcgcctcccgcgctcgcctcagccgggcgcggcggcctgatgggcgccatttcgcgcgctgcccgtggctggggcggtggcggccgccgcgcgccgggcgggaggagcggcaggggtagggggctgggcgacccggcggcccacgcgggcaccaggaggcctcgccccggaccgcttccctctttcgtctttgtcctgcgcgggcgcccgcagccgagggccacggggtcggcggggcttcgaggccgccccgggtcccaccggctcctccggaagccgcggaccggcctggccctgaccccaggccgccccccgctgcccacccagctctgggcgcccaggtccgacctcccagtcgccctctgagagccgagtcagcgcggggcggggggtcgccccctttgtcctcactcagggcgggaggccctcggggtggccgcagacgccccgttgggcagccctccagcccagctctccaggcaggaggtgggggaagcctgggaaagcggagggggggccccgggatcccccgaggcgcggggctcccggcgaagcctcagatctccggcccttcccggggagggtgcgggcggggcgggcctttggaaatgcagatgagccgccgcccgggccggggttgaaccttctgactcagccacccccggccgcccgggccgctgggggaggggcggcgtctggggtgctccctttcagccccggagcccgtctgctgtgtattcggccggtcacatctctctcccccaacgccctgatccgccctccaccttcctctcctccaggttctgggccggagaaggggcgacgttcgggcaccccccgaatggacaatctttccttctgtcaacggcaggggcaggcctagtttgactctgacagtcctcccactaaggtaggtgtgagtacttgcccagaccgtgagggagatttggggggctctggcctgcagcccagggagggccgaaccccaaacacgccgggctggttctgcgggcccggcccaccccacccccccccccccagctgcgagcgcgtagggccgcctgctgggccgccggggccatccatccccgtctgtcagcttctgttgtcaggcatttggggcgtgtaagtctctgccgaatatagcagcatacgagaggatccacttgcaagtatttcccagttgtgtgttcttcggcggggggagggccctgggtgccgcctacttctgaaagacacaggtcactgtcagaaagcccaactgtgctgtggccttccctccagccgcccccgtggggcatgtggggtgacagtgtgagccgtcctctgatgtctggctgctagagaggcaaagaacagagacccgaggttccggccacctttctctatgaaagggccttccttgacgcttctccaccttcctgggattgttttcttctccagtccccgaatgggcaggcctgtatataagccttgtttctagaaccagacaaagctggatttgaaacctggcgagccattgaacagctatggccttgcgtaagcggtatagcctccaagcctatttctccatctccgaaaacagggctagatcagtggttcttagtctggaaccggcatcagaatcacaccggaaggggggctcactgaaaatggaccaccgggcctggtgcccaagtgtctgattcagtgggttggtccttaggactggcatttctaacaagttcccaggtgaggtgaggctgatgctgtggtctgggaacacattttgagactccagcccctagcctggtaacacctggggttttgacgcagaagtgccacgttccacgcttggcacatagtaattgatttcattctaacgctagccgacttcatgtattgaatagtttcccatctcagtgtctaagaagctccacagctggagatggcggcccttggtctcggagcccccctccttgtgatttctgctttgtgattgctttgatgaaccatttgggtccaggtgctcctgatcacaccacctcccctatttgggacttgtgccccactcccgctgtgagggctacaccgagctttgggggcctgttcggattaacaaggagatcttgctaaaggtatcttggtgctaagttaagggagatagttcgccatgggctaggatctctcagtgctggtgaccttgggtgagtgtctccctgtaaagtgataaggatgcctgctggaaagggtggtgggaggattaagtgcgttaaagaggccctcctcccaagcttttagttggcctccattgtgatcgtggttattgctgggagtggctgcagggggtgggggctgggctgcctcagagcttccccccgcaccagcccacctgctgaagcacgtgtccctgcctcagggcaaaggggaatctggcgctccctgggaaggcggccaacgcggttctcctctggagtggttgagtccagctgcaggcctttccccatccacaggggctgttccatgatggggtcaagatttgggtcacccacccatggtccggggagaagtgactccccaaggtcacaaggccaccaccaatagagccaggatggggttccaggtggcttgacttggcagccagcgcctgtgcccatggcaccccctcaccccagctgtctgggttattttgggcttcctcccgtgccagctgtctgctggcatccctgcccgggactgtctggttggaagtaactggcgtggtgctgttggctcctcctgtgagggccagggctgggtcttcaatccccgatgagccgtgctgggtccagctcctttgctgggagggaagagtgttcctgcccagactccccgctgcccaagtacagcaagagggcgaaagcacctgataaaaattgaggttcacattgttaatatcccaaaagcctcctccttctatactccctgaaacctgttttaaatttggctctgccattgaaccccgttgctctcacgttaccctctgccgcccgagggtgtggcgcctccctttagagtcttcgttgctctccgggtggggtctttactccccacctgctttggataattaagtaattgatgtacgtctccctcccagctgcaccctggagggctccagccagtttctcccctccctggatccaatcagtgagctgttgggtgctcagctgtggtctggatgtggttctcggcacggtgtcgggacccacctggctggactgtacccctctctctctgctttggtccctcttctttctttgtccccccaccatcacctcttggggcagggagggtgaggcagtttgtcctcctgctgctgttcctgctggtccctcgagggcgccccgcccaccggtcacccagcgaacgcggggcggggccgctgctggcgctgggccccagggcttgcagagagagggccacgccagcggaagggccggccaggaggtggcaggacttgccttactactgagtcgccggcatccccgcctcttccggcctctccgcccggagccctagcgtggaacatgacctttcggaccctctgggtggagacacagcctctgcctgggctgtgcagtgaggtggcaccaccatctcaggtcgtctggcccagtgcatctgtagctggcatgtgacttccagcaagctcctgcccctgagcgctgggaggagcaggtccagcaataatttttttttttttttttttgagacagagtttcgctcttgttgcccaggcaatggtgtgatctgggctcaccgcaacctccgcctccagggttcaagcgattctcctgcctcagcctccgagtagctgggattacaggcatgtgccaccacgcccggataattttgtatttttagtagagacagggtttctccatgttggtcaggctggtctcaaactgacctcaggtgatccgcccacctcggcctcccaaagtgctgggattacaggcatgagccaccgcgcctggccggacaataatgttttgagctgttgctgagtctggcttttgtgacgggaacttttagcactcaaggagtggccttgtctctggcctgtccccgagtgctcatgggcagccaaggcctggggactgctcaggcagggtagatgtatttgccaggccagctcccgtccctgggacctcagggagtagcttcatccctgaaggctgagtgtcttctgcctcatgtgggtggcccctctgcagggttctcaggcatccagggaagtgggtgccacagcgttgcctccagcctcactggggctggctggactttgctctgacaacacagcagtggctgggcccctgcaactctccagggctcagtttccctgttggccgcactatggcataggcccctgtgtggacaccgatgagctgaccccacaaatgccacccggccgctcccccaggcttcagtggcctaacagctgttgtgtcaggaaccagcttaaagaatctttcttgctttctcaaactctccaggaattcctggtgactggaagggggagtgactcaggccctcaacctctagcaggtaagggagctacctcctgggtgggcatgcccagttcctcagtgggcccagcgcggcccagcctccgaggaagctctgagcagctggcttggctccgaggtatttttagctacagatccagcccccctccatcaccacaacagtcgagtccaaatcaaacgcgctccaggcaggtggggctggggttctgccagcctcctggccagcaggggtgggtgggcagactggggccagtatcagctgttctgcctggacccaggccgggctgggaaggcacacttgtgcttatttcccgcctccacttctgtgcaagcttgtgctgtcataagcagagatcacagccccatttcttggatggagaaagtggacactgaggtctgaggcttttgaggacagtcaggagccctcctatgggctccagtgatgcactcaccagcttctggtcctcttcttccacctcttagagtgccttggctccctcctgtcgtcctggggaacctcggccccagccctgcctccccagccagtcacagctcctccctggtcaccctgagggagctcagggcccggctggtagctgggttgctctgcttctgtcccccactcctgtggagcctggcaggcaactccatgatctgaccccggttaccttgacagccctgcctggcctcccctctcatggcccagccaccccagaacctgaagaggttttctagctgccgtgcatttgccaggctgggttacccaccctactttccctgcctgccctccagtgctgccaggcctagtgtgccagccagcgctcagccttcagtaaagggttcccctgcttccaacctccattgcactgcttcccctaagactgtgacctcctggaaggctggagcacaactgcctctcaataaacgtgttgcaaaaaaggaat

SEQ ID NO: 624 - DNA, 438 bp, Homo sapiens
gatcccactctcggccatgctctcgtgcctgtctgccgtggaccggctccaggggggggtccctctgccaccctgtcgactcatctgggtggtgcagagggcagtcagcccgcccagggtgaggagtaagaggaggggtgggggttacgggtaattcagccagcagccctgatagcactgcctacagtaagtgctcaacaaataagctgttttgatcaggggatgggagagttggggggattcctgggatgaaggacatgtggctgctggcaaggaaacgcattttcttacatttcttggtgggtgtggggttatcagtctccaaagctccaggagagggaccaagttgacttcaactagagctactccaacctgcccctccctgacgacgtcttgcgtggttcacgcctctggctcctgccggaaggaggcggccgc

SEQ ID NO: 625 - DNA, 6195 bp, Homo sapiens
gtgttttctgcatcccctttttattctgtaagttccacctgttatattggctttcctagccccattgcttccgcatcttagctagtcatgctaaatgcttgaagggggaaagggagatacaagatagacaaaaccagtcccagacagatggacagacacggtggtacctcatccatcttctctgaggtcggggttctgtctccaaccaggtccaaggccacctcagctgtctggctcagaagcccagcagggtccggggggcctggctcaggtggaggccgaggcccaaggcccaggtcgagctcctcgtcctcgtcggagtctgggaggggtgttgggctgatatcctccaggccggtgctggaggggcgtgacgaggggggcgtggggccccggaagcctggctgggagttggtgccaaagggggccagtggggagagctgggaggaggaggaggagatggggctgccctccatctgcagctcggtgtccgagtccggctccctcaggaagagcagcttggtgcgctgctccttcagcagcatctcgatgcgcgagtccaggctgtcgtggggtttctctggccctgcaggggacgactccagcgtgggcgtgccagggctgtcacagggctcaggactccagccgaaggtgggccggccgcccagctccatgctgttggtgtcggggggcggcgggccgggtggcgtgcctggcttctccttggccagaggctcagcaggtggcaggggtgggggcgccggtgccctccggaactccccactgtcgcgggccccaaaagcggctgtggcggtgggctcttccgggggtggagggaagtgggccactggggtctgatacggagagaaagcagacttgaatccaggagcaggggttgcttgggcgggtggtggagtgtgggcaaatgtggctgaatcctgtggttgagccttgaacgggggaccgctgctgcccccagtgccgccgactgctccgaacgggaggtccgaggaaccccggaaagcggctgtggccccggccaccgcagtgaccgcgggagaattgtgtacataatgatgttcgtggcggcggttgtaggcgtccgtgaacttgctctcgtggcgccgggccttgaaggtcactgcagggtcctggctgaagaggtatgagggtgtgggctggcggctggagtagctggagtcctgtgagaaaggggtgcccaggcgcggtgtgagcggggtgccctgtccataggagttgggtgtgtccaggcggcagctggaataagctgtgtcctgggagaagggtgtcccaccgctattgggggtgacagaggaggagccggagccacagcctgcagacaggcctccatccttgaggcgcttcagggcatctgacagctaaggagagacagagatgtcagaccactgggggaaaacatgcaatggaacagggctattttcccttctcactctggctgctgggaagctcagagccaaactgctctagaactgcagcataaggaatggaagtgggggagattgaggaggagtgtcaggatggtactaactttttctctaatcttaggggtagccaaatatgttcagggaaccttgagggtcattcctaattccagaggaggcagagaaaaaagaagactgtaacatcttggtttaggctgggattttctttctgcctcaggctgtcagaaatcaaagaccttccaggcaggattatgaccaagaactacaatcttgtgcacgagaggatggccaagggctttgtcctcctagtcacccagtgctttaggatttaaagtgataaacagaggccaggcgtggtggctcatgactgtaaccccagcactttgggaagccgaggcaggtggatcacttgaggtcaggagttcaagaccagcctggacaacatggtgaaaccccacctctactaaccaaaaatataaaaattagccaggtgtggtggcgtgtgcctgtaatcccagctactcaggaggctgaggcaagagaatcacttgagcccaggaggtggagcttgcagtgagctgagatcgcaccactgcactccagcctggggacagactgagactctgtctcaaaaaaataaataaaacaaaaaaaaagtgatgaacaggccagtggcagctagtcagcctgatgccagggaggagctggcatgagactcgccccacgcgagagttgtccctgtgtcctggaaggcagtggtttggaaggagtcagccttgctctggaaggcagggcatgaactctggtttctgggtttaggggtagtggcatgcccaggacaccagacactaaggaccccggaaacagcaatgtttggcatcaacgtggaaaagcgggccagggcaggctctgggtctgtgggaatcacagcctgtgctggggaggggagaagccacaggaaacagaaccaatcccatggagccctactgcaggagcacttgggaaaatggggctctaggccctgctcccaattgtggggggcgtggccaggcttcacaccctcctaggccttggtctccaaagctggagtgaggtgggggtaggctgggggtcccataagagagttggtgaggctttccagaggtggggggcacatcaaagagctggcgatggggcagactgacggccataaacccacctgcagggtctcattcacgattggagagacagcgtccagctcgcccactgggagggtctggggggtgtatcggccagtgaccaacagttcatagaaccgcattcgggtttcccctgtagatgggcaggaaagggggaactcagtgaggttccaggatggggcagcccccacaaggattccaacctgtgtggcaccctggtgggtcccttgtgcccgagaccccagtcctagggaggctgtgtggccctgagttcccacccctctgcacctcgctcagggtccccacctcttcaacaaagctgctgagctgcaccatttttctgatcctgagatccagaagctcatgtctcctggggctgagactcccccaaacccaaacccagaggtgccacccgcgacgcccagcccccccccacccctgcattacctgggccatggcacccacagagccaggtcttcccctttctgctcaatacccaggggcttgcagtaagaggaagggaagcccgtgacacagaagccagagtttgttaaatatctggggccaggtgagcagcagagtttgcaacacgctctagtagcacattactgtgaactccacaggccctgaccaggctgagggccccagggtggcctggggactaccttgggcttgaaccctccacccctcagcagaaggaggcttttatagaccagggcccaggggttatcgatatttatagagcctcagaggcagctgcttacatatgcaaaaaagacacgttcctggagctacactttactggtctctttcttgaaatacaaacttagttggcagtctctgagggcttttgtgttttttttcttttcttttcttttctttttttttttttttttacagaattgaaattttgttgagacctggctgctccttaaaatgtgggcacgtgataggaaaggggttaccatgttcaattcaattatcagggagaaatcgtgctgcagccacccaaggtcctcactgcccccccaacccccagagactgagaagctagggaaaggggtgggagggactgtggactggacagaaaaagagggctgtgccctgagaggaggaacagaaccgggcacaggctcggcaagtgtgcgtggaataactgccaccaccccccggcaccggcttagagctcggtcaatacattttaatcattaaacgcaaaaaaagaaaagttctgattttcctgccttgggtttggtgtgtcccagttgtccctgaacgccatgctcacaaaattcctggaagctgcacttttgccctcccaggcagggtttcccaggggaccccggtgggctagggaccgaatgacatctccccacaagctggctggccctcaaagcactcggcaccttcttttataggtgggagcttccctaaagaggcctcaggcacactttggggaatgccctcgagtcctccaagccccttggtcctgcaggggcctccgaagacccacagggtgggaggtatggcctccccagccagctccagagagcacctagctgattccagagcaggggaggtgctgcggtctctttaagagagaggagggaagacacagtgtcaacccttgagcacccagagccgcctgcctggctcttccctcttcccggctctgctcttccccggcggctctgtcgagaaccttatcaatgaaacaacactcctggccccagattggctgccacttccagaggggaaggggcagcaaggaggtggggggacaccctggatccttagaggactctcttttcagttttcagaccttctcttgatgtatttcaaggcatcctagtggcacttcctcagtcccccacaagtaaacaaactctgtctcctcccctaacacaggcaacactggggactgtctaaacccaagccaccagggctcagagagggggcccgcgggggtgtcagcggtggggaagcctccgggtggtccctaggggtgcggtggccaaggaccggcacatttggtaaattacagactgtctcctagcaacagacaacacatttagctccacgcgactctaccctcaggagggggctaagaaataaggttgtggggggggatcccaaggaagagtgagggggggtcctccccacgctgcaggaagggtggggagggaaagggtcgggctgacaggtctccccacgctcctcccctgccaggctcacctttggtgtccagctccacgtggataatgttgcccatgacggaagtgctgtgcaagtgctgaacggcatccttggctccccggaccgtggcaaagaccaccttggcgatgcccaggtgcttcttggtcttggggttgtacaaaatctccacctcctccacctccccatacttcttgcacatgtccctcaggaagttttcacggatgttatcattcagcttggcaaatgtcacctgcttcggaggcaccgggcccacgtagaactcatcgatctggcaggggccgagggggaagggagtttgaagaacgtttaaacctaagggaaaacacaacatcccccccgccccgcccgcaactcgcccacccgttgaaaacaataaagggtaaaaaaactaaaaattaaaaaaaaaaaaaaaattttttttggaaaaaaaaaatgcacgcgggcgggcccgggaagcggaggattaaatcgtttggaacgtggaagtcctctgggttcggaaggaaaggggaaaaagaaacagtttctctttccccacccccctttctggccttctcttcctgctgccgggtcaggggcgacccctcaggcttaagaagttgtcctgtagtgggctagcgagaggggagagtctcggagccgagccccccgcggggcgtgcaggacactgtatctgcgccgtgattacagtttcacccagtgttattttgttttcagtagctgagaggggacaccctctcgccagcgctctacccctccccgccaaaacttccctggccccggacggcgggaactgggaatccggctgggctcggtcaggactggcgttattttcgaactcggggaggtgggggagggacggcggggcagtggggaggggtcctaccttgaatttgggcaccgacagctccagctccttgtttttggtccagatcccgacgacccggggatcttcgacaatttccaccgggcggttgctggacatctgtggggagaaattggggggccgggatgagagaactggtccccctccccatgggcagacccctttctcgaggcacttgtcaaactccagggctggggccccgtctgacagttggccgggggatcgggcggggggtccctggccgctaggcgcgtctccccggacacgacgcggggcacggctgggggggcgcgccggctactcaccgccaggctgaaatgctgcccatcgtagcggtacagtttatgatgcccctttttcagagccgggtcaatcatcaacttgtaacttctccaatggtggttcctcc

SEQ ID NO: 626 - DNA, 16301 bp, Homo sapiens
agtccccacctagggcacgctgccacgccgccgttacctggtccaagtgcccgggaggctccgcctgtcggcttcgctctgcagctgcatctctgatctgtcctgcaggctcaggtgagtcaaaggattgggaggcactgaggggtctgcaggggagtaggcatcaagccaggtcaggcgagtgtattttagcagagacgctgcctagggtgccctatctgatttgcagtgcccttccccacttctgcagggtcctttccaaatcgagcccccaccctcaaagccatcaaaataggatcatcccttttctactctcatccctccaggaaccccctgaaatgtccctaagggacttttgagaatttatttacaggcctctcctcccttgctgctccactccctcaacctcacctcagggcatctctgaatctttctttttttaatgcaaggattaactcctcagaggaatcccaggttctagtatcagtcctgccacgacatcgccatgtacccttcagcaagacactaccctctctggacctagttcctttctttgtagaatgaggggtttggaaaggtgatgaactttgaggcatttgctattttgactttctaggattcctggggtggaggcagggtgccaggtgagaagttggctcagaccaagaatgggatgaggggaaccttaaccaagatttaggggcccagaggcatctccgggtaggaaagtatgggaggtggcagaggccccttgtgccttagccctcatgctgtccagggatgttggctttgcctgtggcccaagcttgacaagggttccccgccctcccacttccaccagcgctgccacatcttgcttggtcaccctcccacgacgggccctgccagaggatttatgttcttctaccaggcctgggaggggaaaagggagaagaatccgggatgagaaggtcgcctggagtgagaagcaggcactggcctcgctcagaataggcgcattcacggaattggggggcgggggcggagctgctgttgggttaggggcagctggccctctctgccaagaaacagcaacagaaaaatggctaacacagcttcagcatggggcgcggcggtggggtaggagctggaaggaaatgaggtttagtgaattctaggcgccagggggcctcaagagagagaaggggaaccaggagccctaggttctaatcctgcttttgcagttcggcgggctgcctccttggggcttagttttcctatttgtatagtggggagggggtgggggggtggtccttcgtagttctcacggggcgtctccggggcctcgggagggtaagcgctcacctgctgcccctgcggggtccatggtggctccacggggccccagccgctcacccgccgccctctggacgagtccagtgctgctgtcgctggaaccctgcacacccctgctcctcggctcttgcgcgggttatatcctgtccaggccttatctccaaggccccgggccccggccccctgtttgctcggggtgggcgcacctgctgggcagatgtgggcttcccacgccccctgccatctcgggcgccccctggcggtcgctcctgagagcaggcgggaaacaggcgccaagccgcgcgttctcgtgcgcagtgggttttggtccactcgctgccacgccaccacgctcagccccgcaacagggcgcagcccctccctgccgcctgcggttgggcagtgcatgtctgtgtttgtgtgtgtggaggggtctgggggggttggcgagttgcaaagacagccacacagaagcctgtgtgcgtaggggagtgggccgaggtggggaagggcttctgtctgcagaggttcgcctggcaggaggagaggcaccaaacgcccaggctggctcacagaaactagcaggcgtgggattgtatcctgccgcagccactttttggccgaatgactttgggtaccagcgcttaacttttctgagcctcaatttcattgtctgtatgatgggggacaatcacagccttagtcttacaattgcagagaggattaaatgccacaatgcgtgaagagcatttaacactgtgcctgacatttaaggaagacctgtttttttctgtttaaattttgcatatttgtatctatgtatctattcttatttaccattctcttgtgggccgagcgcggtggctcacgcctgtaatcccagcattctgggaggccgaggtgggaggatcacctgaggtcaggagtttgagaccagcctgaccaacatggcaaaacccgctctctactaaaaatacaaaaaattagccaggtgtggtggcaggagcctgtaatcccagctactcgggaggctgaggccggagaatcgcttgaacctgggaggcagaggttgcagtgagccgagatcatgccactgcactccagccgggacgacagagcaagactctatctaaaaaaaaaaaaaaaaagaatctcttgtgtttcccagcaatcccactgtgatgagaattttttaattctgaaacatttcaaacatacacaaaaatagagagattagtaaaataaacctgtaactgtcttccccctccaagtgcctatcacccagaataagagctctgtaaatactgttgcttttctattttccttcctccctccaggctctgacacctccattctctgtccccaagcgccatgagaggccttctttgctggcccgtgttgctgctccttcttcagccctgggaaacccagctccagttgacaggtgaactggggcccagccctcaccagtgggaggaggggagcggaagcaggtcctccctctgcagccagctcctcctgctggggagagggaagcaagggctttggaacatatgggactgggtttaagttccccacttcacctttctgggcctcagtttcttcatctgtaggatgtggcttagttttgggcgcatgcagaactgcccatggggtgtttaatttggaaaaattatttgaaaacatggaaaaaaaccaggaaattttacataaaaatccctgtttagtatttctcttgaaaaaccagggatctgctgacatccaattcgcaggggcatggcctcatttggatgcagctacctgcccaatttaggagtgataggggctctttgggtctccagcgtcctaacccaaccagttcatccatgttccctgcctggtccctgcaggctttgagtttgcgacgcttccttgccccctcgtcaatgggtaataccgcctcagaatagccctcagatctgtaagatgagggaatttgtgaaatctcctagcccaggtgctaggcacatgccgggcgagtgcatctgtctaatctgcgtttgctgtgctgggcgctgttatgtcggcatagcggcatttcccctgggtttcctagggggtctcctcggaggtgaggctttgctgacctaggagagtcctccctgatctccccgcaggtcccaggtgtcacactgggcccctggatctggtgttcgtgattgacagctcccgcagcgtgcgccctttcgagttcgagaccatgcggcagttcctcatgggcctcctccgaggcctgaacgtgggtcccaacgccacgcgcgttggcgtgatccagtattcgagtcaagtgcagagcgtcttccctctccgcgcgttctctcgccgcgaggacatggagcgcgccatccgcgacctggtgcctctggcgcaaggcaccatgacgggactggcaatccagtacgccatgaacgtggccttcagtgtggccgagggcgcgcgaccgccagaggagcgcgtgccgcgtgtcgctgtcatcgtgacagacgggcggccccaggaccgcgtggccgaggtggcggcacaggcgcgcgcccgcggcattgaaatttacgcggtgggggtgcagcgcgcggacgtgggctccctgcgcgccatggcatcgcccccgctagacgagcacgtcttcctcgtagagtccttcgacctcatccaggagttcggcctgcagttccagagccggctgtgtggtgagttaggagggcgctggagtgaagctcgaactctcaatccaaatgcttggattcctttcccaccacagtaaatcccatcccgtgggggtggccccgcgatttccaggtagagttgccctgacctaccgcaggctgtgtcagatttcagctctgaccacttctgctcagcctccatcaacaaggagcaacctataatttcttgccctacccgccacagcttaccacaggcttaatgtcaaattccagcaccaaccccctgcacacacggaaccagtgattctcaaagctaagagggatcggctgctccaaagagtcgtggccctcccacatggggatgacttctcccattatcatcttagctcctcccacaaatgctgcaagatctgttctgatctgttttgagtttattccgcccacctcgacttagcacctctccaccttcctacccactcctgcccctgtgtagtcctgtcccagcccactgacgtgtctaattgagtgtctcctcttctgagcctactcacaggggctccttaagccttattctttccctaagccctctcacttggtacggcccttctcaaattagtcatttccttctgaaagccatttgagggtgatgcctgcctctgaccccatccccatccagctctctcttgttggaggcttctgcccatctgttccctactgattctagtcctgtgtgtcctcagggaaggaccagtgtgctgaggggggacatggttgccagcaccaatgtgtcaatgcctgggccatgttccactgcacctgcaacccaggctacaagctagcagcagataacaagagctgtttggatgacagctatccctgtcctgcaatctcactgctcctgaaccttctttggctctccattgccccaacatcagaccaatgagtctggaagggcctttggcagtaaaagcacacctccatcactttacaggcctaagaaagaaaggtattgcctggggtcacataagtccctggtgggagcccacagttcagtgtgctttctgccctctttctccctgttttcaggccagtctctaatcaacctcccaaacttgtttctgttttcttcttttcttttctctctctcttttttttttttttttttttttgagacagagtctggctctattgcccaagctggagtgcaatggtgcgatcttagctcactgcaacctccgcctcccgggttcaagtgattcttgtgtgtcagcctcccaagtagctgggattacaggtgctggccaccacacccagctattttttgtatttttagtggagatggggtttcaccatgttggctaggctggtctcgaactcctgacctcaagtgatctgcccgccttggcctcccaaagcgctgggattacaggcgtgagccactgcgcccggccatttctgtcttcttacaggcacatccttacagtttctcttcttagatactgttggggggtcttcaattaggtgggtgtcccccctcatgccacccattcttgactctgcacctcagctctttgtgtgctgctcacctgagctgcccttgccactcccctctgcctttgcaaatctttcaagactctctctttttaagagatagggccttgctatgttgcccaggctggtctcacactcctgggctcaagagatcctcccgccttggcctctcaaagtgctgggattacaggtgtgagctgcttcttcatttttgtcttctgaaaagctatggcatagaatacctcgcttattcaattcagttttttactgagtaccaagttagtattagacattgtgctaggagcattacacatgttattatctctcagcctcacaacaacctggaaaaagaaatcatgtaatcccaataacccagatgtcagctggggtcttcttgtttctagaaactaaaagttggcttgaactctgatttgatgactgtttaacattcaaatctctctccaagacctctggaaatcccccaagtgcttatcttctggttgtcacctcttgctgtgagcctctgctaaattcatttgatttatggatcctctctcatttctcaaccctgcacatgctgttcttgttccatgcatgttaatcaacctcttcgttggtttacacacttgtgtatgcaggggcatacacaagcgtgtatgtgctaagtaactcatagcgcgtgcacacacacacgaaaaactcattataattgaatattagacagctttgtttctgaaagtcctcagtcagcctagtacaagggatttttcacaggcagcctcaacccacagagttactcatcttcatactggctctcttgttcttttttttttttttctttcctctctccactctcatctcctttccaggaaccccaaatactcacttttttatacagggtaattatcttctctccagtccagctctcggccatctttgcctatccagatcatcaagatgctcaacagggcaatagttccccatcttccatggaaggaagctgtgaatagcaatcactgtcttccattatattcccattttgcaaatagaaaaatggaggctcaaataggtaaagtggccaaacctgtcctctgtaagtcagagagcatcttgaggacaggggccctgactaattaggtcaggatttttggggttggggcccaggcgtaggtattctttaaaatttccttaggtggttgtgctaccagagctgagaagggcagtcctgggcatagactgaccccatttcttcctcagccattgatctgtgtgctgaagggacccatggatgtgagcaccactgcgtcaattccccaggctcctatttctgtcactgccaagttggctttgtactccagcaggaccagaggagctgcaggggtgagcaacacccccaccctcccaccacaccctggactgtggcctccgagggctccaatcagaggcaacatcttgctgtttcttccctcctgccagccattgactactgcagctttgggaaccatagctgtcagcatgagtgtgttagcacccctggtgggccacggtgccactgcagagagggccatgacttgcagcctgatgggaggagctgtcagggtgaggagggctctcctacatttgtgggaggggtaagagatcttagctggtggggtccatcctgactcatcctgacctgtctctcctttcagtccgggacctttgcaatggcgtggaccatggctgtgagttccagtgtgtgagcgagggcctctcctaccgctgcctgtgccccgaggggcggcaacttcaggcagatggcaagagctgcaaccgtgagtgatgggcgggagggtgttctgttggcttctgccccattgcccacatttggagtgtccttgactttgccattgctgtggcccctaggctgtggtgtgaatgtctgtgtgtgttgtgggggtgacattggagggtgtgccattccctccttccatctctttcctacaatcctctactctgctgtcaatgttaatttaaaaatacatatttgatcacattcctcctttgtgcacaagccttctgtggctcaccaatgactacaggagaaagatcaaatgacttacccctaagtatttcaaatggtgagcagaaccacattaatgaataatgaaatcaaattactgggttacaaccaacattaaaaaaaaaagagtggaagacaatatagagtttactgcctgtagaaagagttatattatttctgaaattttagttctgtgtgaaatgtctcatgatgtattgtcattattattatttttactgtgggctgtgataaaaattttgaaaccactgccttaggtcatcacgatctagcttcagccaactccatctgcccatctcctgccacacttgaacatttcagtcttactggcctgcccctccccggatgtgtcaggatctccccagatcccaagcctctgcacgtgctgcatctcaccttctagactgtcccttactgccttggcaaactcctactgatctttcaagactgtcttagatcattcaggctgctatatcaaagtactgtagactagacatttagttttcacaattctggaggctgaggagtccaagaccaaggtgccagcagatatggtgtctaaagaaggcctgttttctgattcttagatggcacacctttcaaagcctccccacgccaacacacacacacacacacacacccctacacacacacacccacacacaccaattttcttgctgtgtcctcacatggtgaagacaggaagcaagccctcttcgacttttttttttttttttttttttgagactaagtctccctctgtttctcgggctggagtgcagtggcgcgatgtcggctcactgcaacctctgcctctggggctcaactgattctcctgttacagcctctggagtagctgagactacaggtgtgccccaccatgcttggctaatttttgtatttttagtggagatggggttttgccatctcagccaggctggtctcgaactcctaacctcaagtgatctgcccgcctcagcctcccaaagtgctgggagccaccatgcctgacctcttcagactcttacaaggacagtaattttactcataagcgctgtaccctcatgtcctcatctaatcctaattaacctccaaagatctcacctccggagactatcacataaaggcgtagggtttcaataaatgaattttgggaaacacactcattcagttcataacaaagatcagatagaaggccatcatctccatgcagccttccttaacaactccaggaagaatacactattcctaccttgggatccctgcatgatcttctcttctagcactttccttgaccagagcacatagcatgtctgacttgctctgctctgtcctcatggaacaggattatgttttaattatttcaaaacctttgaaaacctccccacgccaacacacaccacattttgggcctagcaactttcctggctcagaataggggaggtgacattgtagagtcattcaggagcatgggttttggagtcagatggacctggcttcatgtcttggctcagtcagtactagctatgaaatctggggcaatcactttatccatcagaacctcaggtcatagaaaatggggacaatattcaagcttattgggaggattgagaatatatataagcacttcacccagtacctaccacatggtaagctgtcggtaaataatgtttttgttattattattgttaatactggtagagtgcttagaagtgtgcctgatacatagtagatgatcaataaatggtagttattgtggtcattactatgattgttgttaaaaaaagatgcttttagcagagtggtttgttctaagcactgaataaatgtcaagggcgatgatgagggtgatgatgatggtgatggtgatgatgatggtgataattattattacttagcacactgcctggcacaggaaggactcaggaaatgttgtctgttatataataaatgtttgcgaatgaacgactagatggatagacagctgctgccagtccagaatctggtccctcaattcaagcttttctggctgtgcagggtgccgggaaggccacgtggaccttgttctgctggttgatggctccaagagcgtgcgtccacaaaacttcgagctagtgaagcgcttcgtgaaccagattgtggacttcctagatgtgtcccccgagggcacgcgggtggggctggtgcagttctcgagccgcgtgcgcaccgagttccctctgggtcgctacggcaccgcagccgaggtgaagcaggcggtcctggccgtggagtacatggaacgcggcaccatgacagggctggcgttgcggcacatggtggagcacagcttctccgaggcgcagggtgcacggccccgtgcccttaacgtgcctcgtgttggcctggtcttcacggatggccgctcccaggatgacatctcggtgtgggcagcgcgcgccaaggaggaaggtgggcttggcatgggacacagtgggctggggttgggtcagacgctgggaggcagctttcccgaggcctggggcaccctctgagaccccggccttgcaggcatcgtcatgtacgccgtgggcgtgggcaaggcggtggaggcggagctgcgcgagatcgcctcggagccagcggaactgcacgtgtcctatgccccggacttcggcaccatgacgcacctgctggagaacctcagaggcagcatctgtccaggtgagcgcatctctctcggggctcctcctctctctcattgcccgtcctctgatatctccccttcctattcactccctgcccactttgtagttatagccagaggttgggctcactagacagagctttgctactccaaatgtggtctgcaggccagcggcagggcggtcacccggtagcttcttagaactgaaacatttctggtgctctccagaccgaatgaatcagaatttccacttcgacaagattctcaggtgatttgtaagcatattaaagtctaagaaatcctagactaggctacctgtcccccaaatcagtggaggttcagaataatttgggaaatttttttgaaggcacaccagacagcatttgtaagtggagccacagcatatatccctgaacttgttagaattcaaccttatgaacttggcaaagtggcaggactgaatatattttaagtatgcaaagactttttttttttttattggggacaacatacctcataagtgcaatccctctacttcatcatctggtgctcagctgaggaaaaagagactgactctacctgtgaagaaggggactcttgaatcgcatgcagtgtactgtgctctaggtgatacagggaatgtctccagggtaacttttaccctagagactttagacactagcccaggcttaagatgtgactcttcttcccatttatcagactgcagctccagaaacagactaagtagggctggtttgggtctggagaatttgcctttttttttttttagatatatgtaggggggctgggcgcagtggctcacacctgtaatcccagcactctgggaggccgaggcggctggatcacttgagatcaggagttcgagaccatccttggcaacatggtgaaaccctgtctttaccaaaaaatacaaaaattagctgggcaaggtggtgggcactgaggcaggagaattgcttgaacctgggaggtggaggttgcagtgagccgagattgcactactgcactccagcctggtgacagagtgagaccctgtctcaaaaaaagtatatataatatactatatatactatattatataatatgtgtttgtgtatgcatgcacatgcacgtgcatgtatatacacatacaaatatacacatacagtccttcccccaactctccttccctccccgctctcagccaattctaattattgtggctctttcagattaggggctctttcagagctcttcctatgtgactcttatgggccctgcagtgtgactttggacgagtcacttaccccacacctaccttaacttttctcttcggtaacaggagaggcactggctgcccaaggttacctctagttctagagttctaagagaagtctgggttttgtggttgaagctctttatcaattggtggtatgactgttccctgtctccaaccctttgtttagagaaacaaatctgtgaagttaggggtctttgctggattccagcagtttgttcatagtacatataagactaagatgaagagacaacttttaaatcattatggcagtgttttcaaaggttaaatggcaggtattgtgcttattatttcaccacgtgtaatcctttttcttttttttcctaaggtacttttattgtagcattttttttttctatgtcattccctgtaatctttttttttttttttttttttttttttgagatggagtctcgctctgtcatccaggctggagtgcagtggtgcgatctcggcttactgcaacctctgcctgccaggttcaagcgattctcctgcctcagcctctcgagtagctgggacaacaggcgcatgccaccacgcccggctaattttttctagttttagtagagatggggtttcaccgtgttagccaggatggtcttgatctcctgacctcgtgatccacccgcctcagcctcccaaagtgctgggattacaggtgtgagccacagcacctggcctccctgtaatcttaacaatggcacatgcttatagaatttcagtgaatctaagataccattcattttaagattcatcactaccttatgtactgctaagaaaaaacatgtgccagttttaattgtaaggcctcctgcccaacccccaagatgttgatgtgtggggagatagagttggatcaggatcagtggttcctaaaaattaggtcacaccagaatcacctggtggacctttaaaaacacaaattgcagctgggcatgatggctcatggctgtaatcccagcactttgggaggccgaggtgggcagatcacaaggtcaggggatcgagaccatcctggctaacacagtgaaaccccgtctctactaaaaatacaaaaaattagcagggcatggtggcacatgcctgtaatcccagctactcgggaggctgaggcaggagaatcacttgaacccaggaggcagaggttacagtgagccaagattgcaccactgcactccagcctgggagacagagctcaaaaaacaaaacaaaaacaaacacaaattgctgggcttcaactctagattttctaattcagcaagtctggggtgttgtctgataattagcatttttgataaattcctacacgatgccgatgctgctggtccaaggaccacactttgagaatcactggtctagttgaaatacactataaagcagtggtttccaacctttttggcaccaggcagtggttttacggaagacaatatttccatgatggtggtggggagaatggttttgggatggttcaagcacattacatttattgtgcactttatttctattattacattgtaatatacaatgaaataattatacaactcaccataatgtataatcagtgggagccctcagcttgttttcctgcagctagatggtgccatccgtgggtgatgggagacagtgacagatcatcaggcattagattttcataagaagcctgcaacctagatccctcacatgcacagtttacaatagggtttgtgctcccatgagaatctaacaatgccactgatctgacaggaaaggagctcaggttgtaataggagcaatgaggagcagctataaatacagatgaagctcccttgcatgctggctgctcacctcctgctgtgtggcccagttcctaacaggccatgggctggtactggtccatgtaatgtgctggtactggtccatggcctggggattggggacccctgctgtaaagtatttacttgaaccaggcagtgttctagatctgtgctttttcaaaaaggtaggcagtacctatttaattacaattgattaaaataaaatacattttagtcctttagtagcaccagtcatatttgaagtgttaaacagccacatgtggcttgtagctactgctttggacagggcagatgtagaacactttcatcattgcataaaattttatttggagagtgctacacaaagtgtggtccacagaccaggagcatcagcatcatttgggagcttattagaaatgtaccttctgagcttcttctccattctgaagcagaatctatattttaacaagctctcctgatgattccaatgagcattaaggtttgagaaacagtcttgtaagttgtgcgtgagcacacacacacacacacacgtacacaggtgaatgaatcctcgaagccactaatgcgtacactctttcattatatccattttatagatgagaaaactgagcttagaaaggttagtgagtttttcagtatctcacagctacttagcttgggactcagcccaggtctctctaaatccaaagcccatatactcaaccataggcccagtgcagggaaatcagagggccaaagctagggcaatttctcatccccctgaccctctgtgtccggcttgcagaggagggcatcagcgcagggacagagcttcggagcccatgcgaatgcgaaagcctcgtggagttccagggccgcacgctgggggcgctcgagagcctgacgctgaaccatatcctttggggctggtggcgcgggctggagggaaagtgaagggacctcggcgaaccccaacggcctccttaaccgctcactggcccagctgacggcgcgcctggaggatctggagaaccagctggccaaccagaagtgagggccacggacggcccagacccgggctggggcgcggcaccacggacggtgccccttgcgcgccatcggtgcgccggggccaggcagaacctgggcccgtccggcttgggctgtcggggcggaggcgctggcgggcttccggcattgagctgagttggcctcgcccggaccattaggcggactgcggcgtcagggggatagcgggtggtgagggaaggggcacgtgctagaccggcacgccctcgccgcgtgctgcgctcagttctttgttggatttcttgtttgtgttcttaaaaaaataaaaaaaactgatttccacggggtccgtttttgggtcttgctgcgccgcctgggggaggggaagccagacggagcgtgctgtggcggcgcccgggcggcgtctccttggagaaaggcgcattgtgcgggggtcgggctcgggggcaggagacccggcgctgcttccccctgcttgtttattcagccgagaacagatggctccttatgcaggctgcgggaagggagggggctcaacaggaatccttggggtctgagtaagtctgcgccactccattccccagcggactgaacgcttcgctcccggccacgcctatcccatgatgcccccaaatctggctcaaaagctgctagtactgagcgctggtaaggggtgcgggggtggcgttggtgggaaagtgagaggcagtaattgaacccctaaatggatggggtgggagtggatagatgagctttgaccgattttaactctctcctgcactaggtaggaagagaaggaggtatcagctaggacccctgtctgtccagcctgtggccttccttctgtcatcttatcaacccctcccaaaacacctctatcagcaaagaacacaaaccagtaccatttcccgagtgcatgtaagaaacaacgaagtttaaaatgcttccagtcctagagtgatttggggaaaattattttgtgtttgtttcctcatctgcaaagtggagactggaattgttacccccaagcgtgatggggagaatcaaggacattcttctaaggcatgtgccttgtacctatccctcaattaatggtagctattaactgttcttatagtaacagctaacatatttagtgttgggcattattgtaactgatttgcaggtattttcattttatacttggaaccagtgaaataagaattattgcctttatcatccccattttacagatgaggacactgagacacagaaaggttaagtttccaacagtaacataaccagtacgaagctgaaccaggatgtttcctatggctgctctaataagttaccacaaattgagtggctagcaacacacatttattaccttacagtttttaggtcagaagtctaagatgtgttggcaaggctttattccttctagaggcttttgtttcctggccttttccagcttctagaggctacctgaattccttgggtcatggccctacatcacttcagactcagtttccatcagcacatctctttctctgactctgaccttcccgtctctgtcttataaggacccttctgtttatattggcatgaccttgataatcaaagataatcccatctcaagctatctttttttttttttgagatggagtttttgctcttgttgcccaggctggagtgcaatggtgcgatctcggctcactgcaacctccgcctcctgggttcaagcgattctcctgcctcagcctcctgagtagctgggattacaggtgtatgccaccactcccag

SEQ ID NO: 627 - DNA, 1425 bp, Homo sapiens
gggttgaccaggacagttccccatctcagctggtgattgggacagagactccttgttctcctgcacacctggctcatggctcttacttggtgtgtggaggaaggaaaaaagaagaccttcaccatcacctctccccattcatttattcacagcacttaccaccctctacagtgatccccttggaagatgagctccatgagggcagggattgtgtgtatcttgtatatcttcatatgctcagtgtttgcacaatgtctggtgcacagcagggtttcaatgtatgaatgtgtgggatagtggcctggtagggcaaggttacacagcaagtccaggacagagcctaactctggagcctcagactatattctgccagtccaagcaagggaatcctgatttcggcctgagagatgcatcttctagcaaagtcaacatcgggatggctcctgagctttccttctcagaggggtgggcttcctacttccccctcccagactcccagtctgcaaggccaagatccatttccaggagaaaatcaatatttgatgttcccttccttccccagcattggttcagagctctggaaatctcctgccctccttacaccacgcagataggaaatctctcctttggcttttaccttctgggcccaggccacccactgctgccgtggattttagccatattattttctgctgctctgagtgccaacagcacactcagcactagacacaaacatgcaaagacgcagctcttgcctgccccaaaggcttgctgggtaagttaaacagactgtaaaatgcagacttcaaatatgccagaggcaaaggcatttaaaattctcagcgggggctggaaagagaacgcttttaaagtcttttcatttctccctcttcctttgccttcagcatcgagctgcctgtgagttgtcctgcctcttctgtctatgaccatttaaggatgactggtccttttgtgagcaggcaaaggctttgagatgttggctgtgaatgtggacagctcttcccaggctgcctgaaagagcggaggcagctaaacttggcaacaaatatttccaagcctgctttccattccatcatgcagaatggtgttattaaattgatgattcaggatctcaaaccagcagagctctgtcctttgggagaaacataatccatatgacaggtttcaccagggctatttctgaataccagaaaccagtgcctaggacagtgtagatcagagagcaggtgagctgggtgctttgggatcagaagccacctgggccagagttttgcaggtaacactctgcagtggacatgcctgggtcaacctggtgcaccgagtccatgctgtgttcactttggtgtccttttctcctgacaagacttaacctggtgccatatctctcctaaagcatgtgaggag

SEQ ID NO: 628 - DNA, 1857 bp, Homo sapiens
gcagacgtggtagaaagacagtaagagaggaacaactagaagtggagcccgaagatgtgactgaactgctgcaatctcatgataagacttgaatggatgaagagttacttaagtggtttcatgagatggaatctactgctggtgaagttgctgtgaacattgttgaaatgacagcaaaggatttagaatattacataaacttggttgggcagagtttgagaggattgactccaattttgaaagaagttctgctgcgggtaaaatgctgtcacacagcatcacatgctacagagaaatctttcatgaagagtcaatcaatgagacaaacttcattgttgtcttatttcaataaattggcacagccactctagccttcagcaaccactgatcactcagttcagcagccatcaacatcaagacaagaccctctaccagcaaaatgattacaacttgctgaagggctcaggtgatcattagcgttttttagcaataaagtatttttagatataatgctattacatgcataatagactagagtacagtatagtgtaaacctaccttttatgtacactggggaaccaaaaaattgtgtaacttgctttattgtgatacttgctttattgtggtagtctggaacagatcctgcagtatccccaaggtatgcctgtatctcagtatagtcgtgatcataggtcttgcttttctttagattcactgttggtgttatcatccatgaatttcaccttcctgtgtacaaacatctcttattacagtaggagaatatgggagtcagaaaaggaagacatttattgtcattatgaactcagaaatatgttttctagtgatcattgaaacaactgagattgatattttccagccacggcagttttggtgattgaaagcaagatctgttttttaaaaattaaatataagtttgcacattcttccagggaagggcacgggataatttcccttgccattttattttgaaaccagctttgttgtggtggcacgctccatgagatttgctccatgagatttgctccatgttgcaccacacacagtctttgctcctgtgtccttccatagaaaaaaacagtgtggggaaggatttggtttgtcttaccctttaatcttctgctcctacagctctctggtctgatagttcactattttggtaataaagtcagatatagttcaaatcctgtctggtctattatttcgtgaaatttttgaacttttccatgctttggcatcctccaagaactttttcctttctaagttttactgttttaatataaatggactcctatgtgaacacttttagactggagtctaaaagtggcctaataggcttgctatttttagagaaggagaaagttgccttttgttctctctgtgcttttcacctcccacatgttctttagagttttttttcctgttctggtcttagtagtgacagctttctaattccagaggctttttcctgggtctgtttctggctcattttgtctcatactcaaaatttttaatgtcagaattgggctgggctcttctctttctattatctgtaaacattttgggtttcttttcctctaatttatgaaaattatgaaatgtacacataaaggagtggaaaatatattcacccagtttaaagaagagtaataaaatggacattcgtatatacccaccatccaggttgagaaatagaacattgcttgtgtctcagaagctctctgtgttcctctcagtcacgttcccccaccccaactcctacccaaggtaacctctcatcctgaagcttacatggaagatttgggcatttttattaaaaaaaaaaaaaagaaagaaaaa

SEQ ID NO: 629 - DNA, 6193 bp, Homo sapiens
agaaacagcagcagtcgtgcagtatcatccacagcctgagagagagtcagcagcaagagctgagccggtttctgaacccgcccagcatcgagaccacccagcccagtgaggacacgaatgccaacagtcaggacaacagcatgcaacctgaggtatgggcacgaggcgtcctctgtcccaggacactctgtgggcttctttcttttaataaaaataaataaaatgggtgctggtcagatcattcaaacaaggtgacaatatttctaataggaatattttcattaaaaaaaaaaaaggcaacggaaatccattgatccagattatgtctatgtctttgccatcttggatgcagttgaggttatttaaaaagagtctgactcatatgaatgccaaaaaaagtgaatgccctgaacttcataattctgtagttttatttttgtctaaagagttaacatcagctctaagggctgcatttgaatctgggtatattacatggagtatggtttacaggaagctctgccctaaatattttcctcccttctctaaagtcatagaaatttgcagtaaaatcagtgaaaatgtttgtaattagctttcaacctccttaaataatcagactcattgaagatatatcctttcctggttgggtatcagaagaacatatggaattcaggacaattggcttgaggagtttctatttattaagtcacagcatattttcattttcaaactctatgtatgtgtctatataaaaaagtacaaggagttatcagcgtcctggagagtcctgtgctgtgagaagcagctggctgggaggacctgcccctttatgaggcagcaattacgatttgaggttaacaacgtggagctgatcccgtgctctgtgcagagcccccagcagcaccaggctccatggtgtgcagcaacgcagccaggggccagagtacctttggaagcctaaggctccacggcccagcagggtgctccaggaggcccactggtgccatagctcagttttcagtagatctcatgttttgggctccccagcctttagaaatcatctgccaccgactgcagggacttctgcggagttagtcaaccaaggggcaaggggaggcatctgcagtggccttgccactggtcaccctgaagatggttggcaatgtctcgcatgggagagggaggcaggctgaagtcaggacagacagtgagacagggctaatgaggttggggaaagtgatgatttcagagccctctgtttttagatgaaaaagcctaagaaagaaagaggtgacaaaaaaaaaaaaaaaaggatactaaagagatgtgaagaccaaggcttttgttaggaaagggagaggtgacaggtgaacctgagaacaggtgaaatgtgtgggaagtcttggcatctctctttctttcactgtagcttagattgttatcagctccatcctccaccagggcccatcatacagctttgcctgcagagaactctttccctgaagctctaagtgtggatctccaggctggtgacagtagactgcccccgcccagcccgtccccactgccccaccttccttcctgcagttccccttccttaccccctggtttgccagcgaagatatgaagggaaacaatgacattctcaggcatggaggggaacgaaccatgggggttacccaggacaagatgtcccagaaagagtggtgtgtccttcagcagggcgtgcagtggtggctcttattcttctgtaacccttaatacccattttcacttttccccattgtggacactctgagtccatgttgttcttcccacttgtcctcctgccatgtgttttcctttcttatagtaaaaggaggagagcgcagggttaaaaagacggtaactgtgtgcttctcctcccatgcagacaagcagccagcagcagctcctgagccccacgctgtcggatcgaggaggaagtcggcaagatgcagccgacgcagggaaaccccagaggaaatttgggcagtggcgtctgccctcaggtaggtccatccaggcatttctccagcgatcgaggcattttaaaggtatttactctgtttgtgtgttttgggtcttgcctttcaaaatgcaagtctgcatctacagttgtttacagacagcaacataatgaaaaatgtagtcttgtcaaaaacattgtcccccaaaataacttctctaaatatgacttacattagcccccattttccgggtacatttcaggctatcatggttgagaagccagcacctatgaaaaagacaagattcagcaagagggagaaatttccaagggctttctgtgtgcctcaaggcatgctcaaacatgggcaaaagtattcaactgaagagggagtgggcagatgcaatcattcagaaaatgccacgaagttctcaaaaaagggacaggcccccgatttctctcagcacactttgcagctgagccggtcactggctttaggcaagctgctttacctccatacaataacaaacaacaacaacaaacacttacgtagtactcactgtatgccagtcactcttctaagtgcattacttgtgttctctcattcaatcctttaataaacagtcccattattttccatattttactgattcagtaagagaattttcttctatgagcttcttctctatagggttttggaaagccaggataatcccattaagagcactcaggaatggagggagagcaatgctccccacagcccagtgtccttgtacatgtttttttctatagataactaagttcatgctaaagcaggagctttataatgctctttaactgtgccccaacttcagcccaattgaaaggagaagatgtgtagcatatgtgttccacaaagcagatgacagcacagcttacattttgaggctgacgatgttcagtgggtcttcactgggactaccaccaaggaaagtatcccctttcatatccaggaacttatttttcagagatcagagaagatctaggttcctcctgattcaaacacagcagagaatgacagcatcaagacaacgtagatggtggtgccaggtcataaattacaagctgagtcggttcaattttatcctgtaggcaattaggagctagcaaagatttctgagcagtatgtgacttttggaatctgtgctttaggaagttgacttggcagcaaaggagggaattgtctatgacagagcctggaggcaggttacaagctggaggaagttaccgtggtgtgagcacaaggcaacaaaggcatggacagagctgggggccagatactgcagggacagataggagaggtgacctggggagaatgcacagtccttggtattcatttaaatggacaaaagaaatgatgctgtcaaaagtacttccattgggccaggcgcagtggctcacccctgtaatcccagcactttgggaggccgaggcaggtggatcatttgaggcctggagttcaagaccagcctggtcaacatggtgaaaccctgtctctactaaaaatacaaaaattagctgaccggtagtggtgtgcacctgtaatcccagctgcttgggaggctgaggcaggagaatcacttgagcctgggaagcagaggttgtggtgaaccaagattgtgccgctgcactcctgtctgggtgagagagtgagaacctgtctcccaaaaaaaaaaaaaaaaaaaaaaaaaaaaaagtacttccactggtccatgcctaggtggtccccaccaaaaacggtgatcgtgaaatagacatgctcttggggtcaggctgagtttgaggaggcagaggagaagaaaaatagtattttgagggggcagcaacaatgtcacaggtgtcatgctatgcactttcctaagtcatctcatgtaacctgttttaatcctgacaatagtctaattaggacattttcattgtcttcatcttacaatggaggaaacttgggttcagagacgtgaagttgcccatagctacatatccacaggttgcagaggtgggtcccaacaccatgactgtgaggccccagaaccacacctttcctcccataccctcactgcatcccccctcgcctttactgtgggtcacactctccttcctttttgttttttttattgcatatgctaatgaatgcacaggtttctgtgacacttaatagttcccgaattggaatttttttagtgattttctagtttttttaattatttcaaaatgaaaggggtgagcagcacgtttttttcccaaatgacatcattagttgtccatgagcacaattaaaaaaaaaatctatcgtgaacataaagaatcaagtcctgaaaaggatgtttacttagcatctgtggctaggacacgttagccaaaagtatcactgatgggaatatcatgggtttttaggagtgattacaatagggtgaagcaataccaagtggctcataggactcattaattccacagccccaaaaccaataagccattcagtgtcctcagtcaacttacggtttggaggaaggacaaccatgaaatctgtcgtgtgcaaaatgaaccccatgactgacgcggcttcctgcggttctgaagttaagaagtggtggacccggcagctgactgtggagagcgacgaaagtggggatgaccttctggatatttaggtggatgtcaatgtagatgaatttctagtggtggaaaccgttttctaataatgtccttgattgtccagtgagcaatctgtaattgatctataactgaattccagcttgtcacaagatgtttataaattgattttcatcctgccacagaaaggcataagctgcatgtatgatgggttactatcaatcattgctcaaaaaaatttttgtataatgacagtactgataatattagaaatgataccgcaagcaaatgtatatcacttaaaaatgtcatatattctgtctgcgtaaactaaggtatatattcatatgtgctctaatgcagtattatcaccgccccgcaaaagagtgctaagcccaaagtggctgatatttagggtacaggggttatagctttagttcacatctttcccatttccactagaaatatttctcttgagagaatttattatttatgattgatctgaaaaggtcagcactgaacttatgctaaaatgatagtagttttacaaactacagattctgaattttaaaaagtatcttctttttctcgtgttatatttttaaatatacacaagacatttggtgaccagaacaagttgatttctgtcctcagttatgttaatgaaactgttgcctccttctaagaaaattgtgtgtgcaagcaccaggcaaagaaatggactcaggatgcttagcggtttaaaacaaacctgtagataaatcacttgagtgacatagttgcgcaaagatgttaagtttcttaagaaaccttttaataactgagtttagcaaaaagaataaaactatatagctcaatttatttaaaaaaatctttgcatgtgtgatgttatcattggcttcatttcttacccaaggtatgtctgttttgccataaatcagcagagtcatttcattctgggtgatcctaacacaccattgctacgttagatttgaaatgacatctctgttaaaagaatcttctatggaaataatggtgccctgcaaaatcttcctttgaactcacaggttagggatcacacaacttacttaatcgttttttgtttttgttttttttccttatatgtcaatggcccatgtcctccgggaaaattagaaaagcaaaatgattacaaagtgctgttagatttcttgtgctgggccagccaagtagaagtggacttgacttggacctttaactattttattacagattggacatttgctgttcagatgttttttaacagagggattatctcagaatcctgtgacctccaggttgttttataatctatttttctctatttaacattcctcagatagataggcaaataggacattccttctgtgtcacagaagtatcgtggtagtggcagtctacagtttatatgattcattgtaactatgagataaagaacaaccagtcatgtggccaaaaggattagatttgatttgatgttcacttggagtttactttttgtacatacaagataaaataaatattggatttgtaaaataa

SEQ ID NO: 630 - DNA, 336 bp, Homo sapiens
ctctattttttttttttttttttttttttttttgagacggagtcttgctctgtcacccaggctggagtgcagtggcacgatctcggctcactgcaagctccacctcccgggttcacaccattctcctgcctcagcctcccaattagctgggactacaggtgcccgccaccatgcccagctaatttttttgtatttttagtagagacggggtttcaccatgttagccaggatggtctcgatctcctgacctcgtgatccacccgcctcggcctcccaaagtgctgggattacaggcgtgagccaccgtgcccggcccactctattcttaatggtact

SEQ ID NO: 631 - DNA, 3602 bp, Homo sapiens
gaaggttagaggatttgccctctgaccttggcccagccacttcccccctgtggagcggggttctcaccctgctttttccctggctctgatggagcctttgggctgcagtcgtgcttgagatgaatggccctgcccccgtatcccttcctccatgagctgctgcggcccacctagttgtgacacctggtggtggtcttgtaattgcccacggcttttccctctcctctggactctggcctcctccctccctctgtggccctagcacctggcagatgcattggatgggcagcaggcactcagaacatgtttttataatgaattcctcaaccaagggaactaagggacttgctgtttccttactgtcacctgggattctttttgctgttttctactttctgattgcttttcttcctgctaattcagtttcatcttctcttttcagatgaagctactaaacttatacataaagagggcccagaccaccaacagcaacagcagctcctcctccgatgtctccacgcacagctaatggcagtacctgtctcttgtgtagacctagaagcaatcggtggtgcctctcagagacctttccccacccccttcatcggctgcccagtcagtacaaggaggcccacaaatatttattacaatcagtattttggtcccttccagcttttctgtagaatcttactggtattgaatgtaaaggaagcaaggcctgtattgcagtcttcatacaaaacaaaaggaataagaacagaaaagagccatactgaaacatgtcttgtacagcctgctgagatggcgaaaccctgtgtgtggggtgcagtttttaaaaatcagagcgctctagccactacttggtagaaagtagcattttttttttcagttaataacatatttgggggtggggtggggtgttactttgtgttcttcctccttagcctattttcttgtgcgtatggtctgtgtggggcccctttcacagctgacaccacgaaaggtgatatatctttaagttgtgttctgagacctactaaaaatgggaatcaagtcttggcaagaacagtctgaagatggccttttaacaaacgctgggaattttgcttgtcatatccagactggaggccgactgccctggctttcagcgtagaattgggagtgcaccctgacagtctccttccagctctccctaatcgactccaccgacaaggtccctaccccagagcttccatgcaaaggaattcttcaagtttaaatctggacacaaaaataagataaatgtatggcatcatttagggatgcctgagatggcagttcatgaagcacagaagataaagaagaagtctttcatctttactgctgagatccttgggaacactgttgtcatgggggctctgccaagaccctcatctctgggctacacggtgattcagattgagcaccaacttgtttcctcccctcaaagttctgcctaagccgttcagttctaacatggtctcagttaatctggtaaatggcatctttaccatcttagttctgacttctcagtttaatgtgggattaagagccaagaaaagcctagagagactggatatcacaattttttttaattttataaactgaagtagttccttgaatgtctgttgatgaaatagtcactgtttaaggaaaaaagtaattatgaggtgtagcagattgcagaaaaacaggattagaaacacacttaaaaagaacacacatttagagtctctcttcctcctcagcgaaccactaggccccctttttaaaaacacctttagagcctaattactccaataaaagtaactagaggtttggagtctggttaaataaattctgagtaaaattcttaagccaaatggaaattcttaatgcaatcatgaggacttctattgtctcttactgttgtattagatcctataaattgaactgatttttccataaggaaaatgcttcttttgagattaattctaataacgtatttgctattgcagtgcagagcccaccgcaactgctaggactgaaagcagaggctgggtgccagagcacgtgattcttaacatcatttccacagacccctctgccctgaccctctgcattggatgcaggaagctgggaaagactgatgttgatttggaaacatgggctgaaaatgaaggccccatagtgcataggaacagtaaagccagggtgctgacgtgtgtgtgtgtgtgtgtgtgtgtgtgtgtgtgtgtgtggtgttgtgtgtgtttgtgcgtgcaccctacacatgtgtggtacctcactgctgctgtttagggaacttgagggacgcgtttcaaggggttgggtattactgacgagctttggctcaaaatatagcaggaccaggtcttttgttgataagtactgtttgtttattaatatgtcattaatggtatttcttttttacactctacaagtgaattagggagtctcttgttgacccctttgttgcaggaatgtgcgtcgggctaggttatccatgagtttctttattcctaatgcagttagaaagacctttctccttgagctctttgactcccagaaggtaccccagtccccagtgtacttagaaaggatctcgaacattgctggacgtcctcatagtactcacaaagggctagccttgaatgtcactcgcccagtcttcagtctcctgacttagagatacaatcacgtcacaggtctcttggcctcaatctgaaaactgctgccgccgcgccgaggagactcgcatgccgccaccacctcactgggagggcgccgagcccaccgtcgccccctagaccctgacagctgcagctgccttgccttgccgccgcctccctgcaggcccctgttccaatgaaaaacagaacacaaaagagcagagcacctaagcctgtctctgcctccctgtctaccggactggccagggcccaagacccccgctgctccactgcggggctgggcgggctgactccctgcttcctccaagctgctgcctcccctgcagccagggtctgggcagggtgcagccggtcctcggggcacgcagcttccttcaagtacactgtgtgtgcttcccggacctgcggcgatgcacgggcctgccttttctatgcgcctcactagcttaccaccctgtgcaggtaatgcaactgactttgtctcatcagtctttttctttccctgccaccctttatttatcaagcgtaatgttacactttaaaggacagcaaataagaactttgtagaatcccaccaggactttgctaacaataatgtttggaaataaagaagtgctctgaaacaaatatcagccccaccaaaatagttatgttggcactgtgttcacacgcatgtccccacaccccagcgttgggtgcgtctttttgctttttgcccttttccggggcgggcggcctcttcatgttacatccatatctgtatttatatcttatttgtctcactttcaagtgtatcatggcaaatgtacagatttttttgttaataatgtgctaggatttgctaaaaaagaaaaaaaaaaaacccttttgagtttgccctagaataaatga

SEQ ID NO: 632 - DNA, 651 bp, Homo sapiens
gcattctgggaggccaaggcgggcggattacttgagctcaggagtttaagaccagcctgggcgacgtggcaaaaccccgtctccactaaaaatacaaaaattagctgggtgtggtggtgtgtctgtaattccagctacccaggaagctgaggtgggagaatcgcttgagcccaggaggcagaggctgcaatgagccgagatcatgccactgcactccagcctgggtgacagagtgatactccatctgaaaaatatatatattaatatacatttttttaaaaaggtcaatctggggaaatatcacatctgatggagtcgcctgggagctggttgctgtgccgtgtgtgcggtgacaaggtgggaggtgagacgcatgggctagaatcccacccacgctcctggaggccatgtgagcaggggcctccctcatcggctccatttcctcaactgatcagtgagaacagtggctccccggaaaggtagaagcaggagaaagcctcagcctcgaatcccgagatgagctggagagccgctgagagcagccgggctcccctgcatgcctgcggttcttctctgctggtcactggggactggagcaggctaggcagggcaagagcagagcctctgggagcaaatgcacaacatcacagg

SEQ ID NO: 633 - DNA, 2883 bp, Homo sapiens
tggaactgtccctcctaggggggaatgttcactttttttttgtcaggttttatgggggggcaggaacatggtttctggaaaaaatcccattcttttggaattggcccattccttttgggcaaaattttcaaaaggctggatcaacttggtgtggtatctctgatggcttagagtaatggcaatgagggtctctgttgtgatgtcactgagtactttctggggtgcttctgggcaccccttatgatgtcacaggaagcagttcctcagaggttacttcctgtgaacataagggagcaggtacttcctgtgatgtctcaatgagttcttccttgaaggtcactttggtgatatcatgggaaggtgtacttccggtgatgcctagaggtcacgtcctgtgatgtcattaggctgaagcatgtacttcctgtattggacagtgaccagtctctgacctgccttctccctccacacccttctttggtgggtgttggcctgggggtcttcctaggaagagaataaggcacgggacttggatccaatctggaggactctaacggaaaaaaaccaatattgtcagggtcatctccattcaaacacgtcaagtctgcgaactcgccctggagggaggggtgggagatggacctagtgcaaactactgttaaagacctcccttcccacccctgccttttgtgtgcatgcctgtgtctgcgtggctttgtttcattgaatcgggtgagccaagtgtgtggtggctctgtcaggccagtatggccaggtgtagagttcagtgagccatagtagggtcccttgggccagaatgcttcgtgtggtctgataggttagattggtttggtggcttccagcaagctggcatacttcggtgatgtctgatggatcagaatgttttggtgtgctcaccaggggctctggagaactagaatgttctgatggagtctgacaagccaggcggccttgagagttggtttaggagtggctccctgagtgctgtggctgtggtcagctctaaggacctgttggcagactgagatttcagggcctgacaaccatgtagactaggatagctgagacctccctctacccccacccatctccctctcttccttggagaccacctccactttctccaacccaaagcagggcgcccagtgccctggttccatcatcagcatctctgggggaggggcgccccatgcccaccctctcccccatttgtccgcctcctaggtcttccaaacccttttcttctctatgactttgggggaaatccagcctccttgtctctctcctaaaaaaggagggaagaaaagccacagagacaattcctgcccctaaagcctaggagatccctctcccttgctagagagccacccccaaatcaaaatgtgaaaatccctagaaagcaatagccttcgaggtaccttgcactgaatttcccaccccagcccttccacccgatgggaggctgtaacttgggcactggggtgactttttccatgcccttgtcatctccagggtgggaggcaggccccacttcccctcccctatcccccacttcccattgttgttgccccacccctaatctccagactgaacccagatggagatctgagtgccaaaacaattcttgatgtaactttgtacatatcttctactaccgttgggggctcttggggttagaggtgggggcggctctgtgggccattgctcccctccacctctcaaaagaccttacagtatttcacagtatctctacccgcacgcgagtattacagtatctagctggaatatccccctacagccccccaggaccctatgaggaagggaaggagccagggagagtgaagtaaggtctgggactggggaggtgggatctgaatgaactcatttgcatatcatttgcatcctccgcttggcagccgctttctacaaactcattcactggagtctgggtcccaatcagccgggtccaggactcctctcacacagacacatctccggaggctgggcctcctgaaaagtgtttgcttggggtgtctgtgtaacaacccctccctattcatatttcttggggaccccctacccagccagccagggtgatctgaaaggtatactttgctagctcagtgagctagttcactcaccatgttggtgagcagagagccacacctttccccattttaccttgggaaactcactccaccatctttgccatctcttgaaagtcccttctgcaatctgacctcaatcttttgtgctgcagtttgtccagaggggacacagatgtggggtcagggatgaggattattgaaaaacccatcatctctttttttttccccgtctccctattagccaatccgatctcagagtctctgagtggcctccttgcacccttctcttcagcacccagtaggtgcttaataagtgtttgctgcattggattatctccctattccttctcatttgccctctagcttcccataccttctccaagtgtcttcctccctttctttgtctggctccctatgactttctatttttttttcctccgtgtggttcccattgttttctgtcctgtctctatcttagtctttgtctgtcttcctcctttcctcaaatgtctcaactctctctccccaatttccccatttaaaaaaaaaaaaaagtgccaaacttccttggaactgagccgctctggggggagaggaccttggatagaggggaggaaatgggaccatttctctttgaggaggtccctaagaggcattgcaaaagtgtggacatggagctaaattgggtcccccttccacagccctcccaccctgagtttttcttagaatctttgtaagaaaaaaaaaaaaagac

SEQ ID NO: 634 - DNA, 350 bp, Homo sapiens
caacttacccctatccttttgggtccccccaaattccaccagccaaggagaatcccacttgccaacttcctggcaaatctatggaaactggggaggaggagacaagctcaactcctcctctgctagcccaaggggcggtaccaactggattcaagagaaggacctcaaagctcctatgagaagagggggttcgatgtgccaaattaacctccttcatcccccatctcagggggctctgagccaacctgcccagccaccttcttctgccctgtcccagccacctctacatgggcaaggaggcttcactgcaataattagtaggggtggtgatcagaagacaatgattttgc

SEQ ID NO: 635 - DNA, 555 bp, Homo sapiens
ctggggaaggggggcaagacgttggtggagtaccaggagctgacgggcgctcgcatccagatctccaagaagggcgagttcctgccaggcacgcggaaccggcgggtcaccatcacgggcagccccgcggccacgcaagccgctcaatacctcatcagtcagcgggtcacctacgagcagggagtgagggcctcaaacccccagaaagtgggatgaggcctgtggtgtgtgctcccacccttttctctcctcccatctcctcctcttccctctcctcctcccccccaactcctgacctcagcttggtgtagtcctgctcctcttgggatggggctggggtaggcccgactgcaccctccccttctggtagtcataggcaggattgagtgacggttgggaagggggctcagaagccccctccccagcccggaactgacccctccttcctccctccctgtgcttggctgggcctgacccttcctgtcccagggcccaggtctgtgtgatatctgtatatattgcattttgttgattttaatagaaaacaaagcgtta

SEQ ID NO: 636 - DNA, 4243 bp, Homo sapiens
gaagatgatgagaagcttattgaggaaatccagaaggaggctgaagaggaacagaaaagaaagaatggaggcaagtgcccctccccaggcccccaggacagagcagcagccaggccatgcaggcttctgctggcctccctgagtgtcctggcactcaacccagcacaggagaggagggggtgctgtccctcaggtggctatagacctgacttcacccacgcggccacatctcaggcttatggaaaggccttcaacgccttgaatatagttttggcatctccttgatggtgaggaagtcccaaggggtgggtttgagctcaggaatcaatcaagccacacctggctaaagaaaagtagacccagctgatccttctgaggctgaaaagcagtgaagccaggtgtgttggcacacatctgcgatcccagctcctcaggaggcagaggtgggagcatcactggatcccaggaggttggggctagcctgggcaaaatagcaagaccccatctgtttttctttaaaaaaaagaggctaagtgcagtggctcacatctgcaatcccagcactcgggagggtgaggcaggtggatcagttgagcccaggagtttgagaccagcccgggcaacatggcaaaaccccatctattaaaaaaaaaaaaaaaagtaactgagtcactgaggtggcccatcaaggccctggctctgaaggatgtctggctgggtgggtggacgtgccaccttccaaggtgccactgtggagcaagacactggtggaagtacagatttgttcttggtttcttgcagtggcatttgggaggtgtccacgttttgtgctttgatcagcatgtggagccactcccgtgtccagaggtcgctgccctggtcccaggctagattccattgaggttggtttaatgtttttctccactaatccccacatccctttcagagaacaccttcaaacgcattggacccccgctggagaagcctgtggagaaggtgcagagggtggaggccctcccgaggcccgttccgcagaacctgccacagccacagatgccaccctatgccttcgcgcacccacccttccccctgcctcccgtgcggcctgtgttcaacaacttcccactcaacatggggcctatcccagccccgtacgtgccccctctgcccaacgtgcgggtcaactatgacttcggtcccatccacatgcccctggagcacaacctgcccatgcactttggcccccagccgcggcatcgcttctgatggccccgaatccccattgagcagcacaaagcccgtttggggtaggagtgtggatggagaaccctcccccaaggctggtgtctgtaccattgcatcctaagtcagcttgaagggtaggctggttttcttcccacccctttcctagaagggctactgctcctggaagagtggacggatccataataaagacgtcccaaatggtggagttcggagagagctgcgatgtgaactgcccctcccctcgcatcccccaggccaccaacggcagtccttctgccttgtccatggcataggccatagaccaggtccctgctgctcacacctgggcctctcctcggagccgacccctgggtagcaaggcagccgagagcatctccctggaggggcccacggttgggccaagggcagagggggctgcacctgcgggcctgggaagcattgctcagggtggggggctgggaccatggcccgcagaggcactgccacagctgtgagggccaagatgctgtccccccatccaaaacccgtgcgccactgcagtgagtgttgagggcacctctcctcccctcttacacctactcagatgaggcagcagcagacccatctcgcggcgggggttttgttctgttgccgcctaactttctcatcctcggtctctggaaagtcaggctgagaaatcctttcccaggccaggccgctgcggtacactggatggttctgaagctggcccattgaaagagcctcttaaggcagctgggacagaggcctggtggccctgctgggcagcccaactgctgggggagacgtttctgccaccctgggtgatgagcagcttttcccccctggctttctgggggaggagtgggcctccttagggagacaggtgaccctgggtgccacccctgccccgtgtgtgccccgggtgttctcagtggttgctgaaggcaggtagagggtgctgtccagtatcccccatgtgaaggtcacttcccttctcatggagtcagctgagcatcagctcagccctgccatgtccccactcaccctcctcgcctcctgtccggccctgggtttctagcggtgcctgaggcatcactctggcccattgacagatgagaggtctgaagccttcctggccacaggcatcactttctcctcctcctcatgccctgccttgtccttgtcgtgttgccatggggttctgagaggctgggagttcacagacctcagacacagctgagtccgacaaccattggggtggggctgcatcagtctccggagtggcccgccacctcctgaagcagggcctggcccacccaaggtgcctggggcaggcgggcaccgtcattcgctgccattggcttctcagatgtatttcaaggactaaagtgggctctaagatctaagatggcccggcgcggtggctcccgcctgtaatcccagcactttgggaggccgaggcgggcggatgagttgaggtcgggagtttgagtccccgtctctactaaaaatacaaaattagccggacaaggtggcgcatgcctataatcccaggtactcaggaggctgaggcaggagaatcacttgaacctgggaggcagaggttgcagtgagccaagattgtgccactgcactccagcctgagcaacaaaagcaaaactctatctttaaaaaaaaaaaaaaaaaaactaagatacccattctttctgcctttgcccaggatggaggctttgaagacaggtggtcacctggacctggggtaagggtgcgcagggaggccgggcttgggggcagcctgctgctatgtccttgctggcgcccatacctgttggactgcctgaactttgctactagcctgaacgacagtgccttggaaaggcaggctccatgcggcagcaacaggattgtcttcggtaccttaaatatgctccctgtgcttccccagggaggatctctgggagcagagggcggctgtagacatcacagctgaagaggtgacctcaggccctgggagcctcagctccctctgccctgtaccctaggcacgtggctccagcaagagccccaggcaggacaaagggagcaggcagcagctgcagaaacagccctagacaggtgctggcctcaaccctggcaggggagggggagcccagagtgatgtttctcctaaggccaaaccccaggggtgggtcatttgagaggagttccagctgttctggccacactgggctggtggggaaggagcggcggcctctttccttggagggtccctgattcctgaggatcctccccgagccaggcacgggggaccacagggctgccgtgagcacccaccctggttctccaggcccctctgtccagaggcagggcctgaacctcgggctcctgcctggaccagtgacagcattggggagagaagcactgggggtcttcagaccagccagcaaggggccgtgccagtgcccagagagcaggtcagacaacaggcaaccctgaggcagctggctccctctctctgccctgcagggcttgccgcagggcgtgaggctccccagccacagccccctcttacttgccttaaaactggagagaggaatctagtatttgcacttagcaaaatatttaaaaactgaaaaaaatgtgcatgatctgtcactttgtataaaaacaagaaacgattagttcattaaactttttctttaccttctggtagtaaaaatagataaaataattccgtttcaactactgtgtgtaaaaagcctgtatcatatgtaactgggacttttgtaaataaatgtttgtgcgctctgctccctccagcttcgtctctccaccccgccatccggcaagttacaggggccgccgacagattcgtccaagtgattgggtctaaaccagcatcctcacctccccgactgggtcctggcaggagcaggcccggaaggcccagtagtaagatccccaccactcccctgcc

SEQ ID NO: 637 - DNA, 3461 bp, Homo sapiens
tggtttcttgcagtggcatttgggaggtgtccacgttttgtgctttgatcagcatgtggagccactcccgtgtccagaggtcgctgccctggtcccaggctagattccattgaggttggtttaatgtttttctccactaatccccacatccctttcagagaacaccttcaaacgcattggacccccgctggagaagcctgtggagaaggtgcagagggtggaggccctcccgaggcccgttccgcagaacctgccacagccacagatgccaccctatgccttcgcgcacccacccttccccctgcctcccgtgcggcctgtgttcaacaacttcccactcaacatggggcctatcccagccccgtacgtgccccctctgcccaacgtgcgggtcaactatgacttcggtcccatccacatgcccctggagcacaacctgcccatgcactttggcccccagccgcggcatcgcttctgatggccccgaatccccattgagcagcacaaagcccgtttggggtaggagtgtggatggagaaccctcccccaaggctggtgtctgtaccattgcatcctaagtcagcttgaagggtaggctggttttcttcccacccctttcctagaagggctactgctcctggaagagtggacggatccataataaagacgtcccaaatggtggagttcggagagagctgcgatgtgaactgcccctcccctcgcatcccccaggccaccaacggcagtccttctgccttgtccatggcataggccatagaccaggtccctgctgctcacacctgggcctctcctcggagccgacccctgggtagcaaggcagccgagagcatctccctggaggggcccacggttgggccaagggcagagggggctgcacctgcgggcctgggaagcattgctcagggtggggggctgggaccatggcccgcagaggcactgccacagctgtgagggccaagatgctgtccccccatccaaaacccgtgcgccactgcagtgagtgttgagggcacctctcctcccctcttacacctactcagatgaggcagcagcagacccatctcgcggcgggggttttgttctgttgccgcctaactttctcatcctcggtctctggaaagtcaggctgagaaatcctttcccaggccaggccgctgcggtacactggatggttctgaagctggcccattgaaagagcctcttaaggcagctgggacagaggcctggtgcgcctgctgggcagcccaactgctgggggagacgtttctgccaccctgggtgatgagcagcttttcccccctggctttctggaggaggagtgggcctccttagggagacaggtgaccctgggtgccacccctgccccgtgtgtgccccgggtgttctcagtggttgctgaaggcaggtagagggtgctgtccagtatcccccatgtgaaggtcacttcccttctcatggagtcagctgagcatcagctcagccctgccatgtccccactcaccctcctcgcctcctgtccggccctgggtttctagccgtgcctgaggcatcactctggcccattgacagatgagaggtctgaagccttcctggccacaggcatcactttctcctcctcctcatgccctgccttgtccttgtcgtgttgccatggggttctgagaggctgggagttcacagacctcagacacagctgagtccgacaaccattggggtggggctgcatcagtctccggagtggcccgccacctcctgaagcagggcctggcccacccaaggtgcctggggcaggcgggcaccgtcattcgctgccattggcttctcagatgtatttcaaggactaaagtgggctctaagatctaagatggcccggcgcggtggctcccgcctgtaatcccagcactttgggaggccgaggcaggcggatgagttgaggtcgggagtttgagtccccgtctctactaaaaatacaaaattagccggacaaggtggcgcatgcctataatcccaggtgctcaggaggctgaggcaggagaatcacttgaacctgggaggcagaggttgcagtgagccaagattgtgccactgcactccagcctgagcaacaaaagcaaaactctatctttaaaaaaaaaaaaaaaaaaaaaaagatctaagatacccattctttctgcctttgcccaggatggaggctttgaagacaggtggtcacctggacctggggtaagggtgcgcagggaggccgggcttgggggcagcctgctgctacgtccttgctggcgcccatacctgttggactgcctgaactttgctactagcctgaacgacagtgccttggaaaggcaggctccatgcggcagcaacaggattgtcttcggtaccttaaatatgctccctgtgcttccccagggaggatctctgggagcagagggcggctgtagacatcacagctgaagaggtgacctcaggccctgggagcctcagctccctctgccctgtaccctaggcacgtggctccagcaagagccccaggcaggacaaagggagcaggcagcagctgcagaaacagccctagacaggtgctggcctcaaccctggcaggggagggggagcccagagtgatgtttctcctaaggccaaaccccaggggtgggtcatttgagaggagttccagctgttctggccacactgggctggtggggaaggagcggcggcctctttccttggagggtccctgattcctgaggatcctccccgagccaggcacgggggaccacagggctgccgtgagcacccaccctggttctccaggcccctctgtccagaggcagggcctgaacctcgggctcctgcctggaccagtgacagcattggggagagaagcactgggggtcttctgaccagccagcaaggggccgtgccagtgcccagagagcaggtcagacaacaggcaaccctgaggcagctggctccctctctctgccctgcagggcttgcgcagggcgtgaggctccccagccacagccccctcttacttgccttaaaactggagagaggaatctagtatttgcacttagcaaaatatttaaaaactgaaaaaaatgtgcatgatctgtcactttgtataaaaacaagaaacgattagttcattaaactttttctttaccttctggtagtaaaaatagataaaataattccgtttcaactactgtgtgtaaaaagcctgtatcatatgtaactgggacttttgtaaataaatgtttgtgcgctctgctccctccagcttcgtctctccaccccgccatccggcaagttacaggggccgccgacagattcgtccaagtgattgggtctaaaccagcatcctcacctccccgactgggtcctggcaggagcaggcccggaaggcccagtagtaagatccccaccactcccctgcc

SEQ ID NO: 638 - DNA, 344 bp, Homo sapiens
tttcaggctgtgcccactcagacccagccctctccaaacccttctcatatccaccacttgcacgcagctcagtgcatggaggccctccatccccccacctcaccaggcagctgcctgccatgctcagacccctctgcccagccttgtggatggcctccttgtggaacgccatcaggctgatgaaggaaggaggccttcggggaaataggaaggaacggtgtgcagcccaggccccactggccagcagcaggcttcgggcttgttccatggccataagcaacaagcggcctcctcactgtcccacggggcctcagcactgcatgaagctacaggttcatccttct

SEQ ID NO: 639 - DNA, 195 bp, Homo sapiens
ccaagttcaagcgatcctcctgcctcagcctcccgagtagctgggattacaggcgtgtaccaccacgcctggctaattttttgtacctttagtagagacagggtttcaccatgttggcgaggctggtctcaaactcctgaccttgtgatctgcccgtctcggcctcccaaagtgctgggattacaggcgtgaggc

SEQ ID NO: 640 - DNA, 1899 bp, Homo sapiens
ctattaatgactgtataaaaactgggatctagaacttttaatttgggggaagtgaatatcgctttttagctataaactatacatccttaaaggtgatatttaagtttaaggtgatgtgtttaaaaaattattaaacttccatgtctacttatgatagaagacataacaactcaacaaataccctaaccacaccatccatctgcagatagaacatcatcagcaacattgaaataccccatgtgctctctgcttcctaatctcagcgccctcctgtcctccatgatgaatgtttctcttgaaatttactttgttgtctttctttcacttttctgtgtcgttttaccattacatgcattattcctaaagtcgttctttttgttggattttgcttgctttcaaattttatgaaaatggcagcaaaatgtttatattcttctgccacttgctttttttcatttaatattgttttgaagatctatgcatactgatgcacactgatcatattttcagtgttgtactaattacagtttatgactattccacaatttgttcatccatttattccctcatttttgtgtatttggtttgttggaagatttcctggctttttttttctattatcaactgggctgccacatatgtctttatgcctgtttcatgataaatacgtgcaagaggccaggctatgcaaagtgccagctttacaagatcatgagcagctgttttgctacgtggtattgccagtttagactcacacaagtggtaaagaagcatccccagtgtcctaaatccttgccaacacttagtgtcaccaggcttcttaatttttaccaatctggccagtggataatagcattgaaaagttatttttattgtgatttggagtccaatattttttctgtaagaaatgcatgtacaatgttataagaacatgcaaaaatcaaaatactttataaatgttcactttataaaaaatgaatgagaaaaacataatgcattttacataaagaaaatctgtaatgcttttgttattggctgggtattttcacaccttccaagtggtggctgttgataaattcagcaataatacctttatgtttattaatattaaatgataatgtcgaattaattaaatgaagttcaatttattgatagttattcattatatcctgctgttctaactcatcctggaagagaatagagtgaaagagaaattgcctttatatataaatgactcatagaatttcatatactgacctaaatagatttcattgcaaaggtattatagaggtaataacacagtaactcttaggactgttttgagattttcacaatttgaaaaatccttttagatccttggttgacaaatgccctggctgtgctaattatatgacatttcctgacactagtgacgtggcatggcctctcccggcttacattatagattgttttctgcccccatgggatctgatttgttaaggctcattttctattttaatgtggtggaagaattttagaaaccctagaaccccactttcaccctccactgaaacaaatagaagcagtgtattagtcagttttctcactgttatgaagaaatacctgagactgggtaatttatgaagaaaagaggttgaattggctcatggttccacagctgtacaggaagcatggcaacatctgcctctggagaggcctcaggaaacttttactcatggtgggaggcaaagtgggagcaggtgtcttatgtgacagaagcaggaccaagagagagacgggggaggtgctacacactttttttaaaacagagtctcactctgtcccccaggctggagtgcagtgatgtgatctcggttcgctgcaaccttcgcctcccaggttcaagcatttctcatggct

SEQ ID NO: 641 - DNA, 225 bp, Homo sapiens
agtaggtttaaattcctaatggcagctgatcacagggattacattcaccccagtccctcagccttggcaagtgctggtcccaggaatccaggcttggccataccacaacagttgccatcagcctcccctacatcaagtggaggaccagcagctcagaccctcactctcacataaatgtatacaggttttactggtgaattatacctcaataaaactgcgggaaaa

SEQ ID NO: 642 - DNA, 3500 bp, Homo sapiens
cctatgtgcagtcagcgggcgggcacgcgctgcccctgggtaccagccctgcgtccagccaggctggaacagtcacctcgtacgggcccacgagctctgtagctctaggcttcacctcgctggggcccagcggccccgccttcgtgcagcccctgctctcaggtgaggggcggcctggcaggcagtgctggggacccagggtggggctgaggcagtccgggccctaacttggtctcctgcttcttcttctctgtctttcagcaggccaagccccactgctggctcccggtcaggtgggcgtgtcacctgtgcccagtccccagctgccgcctgcctgtgcagcccccggaggtcctgtcataacagcattttactctggcagccctgcacccacctcctcagcacccctggcccagccatcccaggcccccccaagcctggtctacactgtggccaccagcacaaccccacctgcagccaccattctgcccaagggcccgccagcccctgccactgccaccccagccccgactagccctttccccagcgccacaggtaggtgtcagatcaacccagagcagagtgagttgggggacccaggggatgggctccagtcaggcctggctcagcaaacaattttctccccactagcaggttccatgacctacagcttagtggcccccaaggcccagcggcccagcccgaaggccccccagaaagtgaaggcagccatcgccagcattcccgtggggtcctttgaggcaggtgcctctgggcggcctggccctgcaccccggcagcctctggagcctggcccagtccgagagccaactgccccagagtctgagcttgaggggcagcccacaccaccagcccctccacccctgccagagacctggactcccacggcccggagcagccccccactgcccccacctgctgaggagcggaccagcgccaagggccctgagaccatggtgagcgcctgcaggccgtggggctcccactgccacttggctgtgcctctccattgacgtctttgcttttctgtcctactcttctttccatgcctgtgtgtctctcaggttaaagggtcccctctgtcccttctgcctgcctgtgttgtctcctctcccatctgaggcccctgtcttggccttcctgaggccgtgtgacagccttctcaaggggtctgctgggcgggctcagatccaactctttgtttctggcctttgccccagagtctgagctcagtgttcgccatctccctgcccatctccaccccaggccagcaaattccccagctcatcttcagactggcgcgtccctgggcagggcctggagaatcgtggggagcctcccactcctcccagcccggccccagctccagctgtagcccctggtggcagcagcgagagcagcagtgggcgggcagccggggacaccccggagcgcaaggaggcggctggtactggcaagaaggtgaaggtgcggcccccgcccctgaagaagacctttgactctgtggacaagtgagcatgggctggggccttggtggagcgtgttagggtggcgggagtgggagcagctgcaggctgaggcgggggaggtgaccctgccggccctccagcagggtcctgtcagaagtggacttcgaagagcgctttgctgagttgcctgagtttcggcctgaggaggtgctgccctcccccaccctgcagtctctggccacctcaccccgggccatcctgggctcttaccgcaagaagaggaagaactccacgggtaggcgagcattgggcacccagggtccttaggtggagggcagactggggccacctgcactgagtctgcttctgtttggccagacctggattcagcacccgaggaccccacctcgcccaagcgcaagatgagaagacgctccagctgcagctcggagcccaacacccccaagagtgccaagtgcgagggggacatcttcacctttgaccgtacaggtgccgtggtgggcagaactttgggggcctggggacctgcaagaggagtgggtctctggaaggcggttagagagtgagagaggtagggtgggtccatccaggctgggaggaagcacagcctgtcagtggtgggttctggagtctggcaggcccctaggttgccctgtgactgtgggcaggacccctctctgactcccctgtgaaatagaatgcagtgagggcttgggtgggcactcagacggtggcaggaaggccctgccgctgctgcagccttgccatgctgcctgtgccctgcacaggtacagaagccgaggacgtgcttggggagctagagtatgacaaggtgccatactcctccctgcggcgcaccctggaccagcgccgggccctggtcatgcagctctttcaggaccatggcttcttcccgtcaggtgagcctgtctcggagtcttggggtcactcgggtgggacttatctgtacatctcatcctgtgctccccaccgtttttctatctccagcccaggccacagccgccttccaggcccgctatgcagacatctttccctccaaggtttgtctgcagttgaagatccgtgaggtgcgccagaagatcatgcaggctgccactcccacggagcagccccctggagctgaggctcctctccctgtaccgccccccactggcaccgctgctgcccctgcccccactcccagccccgcagggggccctgaccccacctcacccagctcggactctggcacggcccaggctgccccgccactgcctccacccccagagtcggggcctggacagcctggctgggagggggctccccagccctcccccccacccccaggtccctccacagctgccacaggcaggtgagggacccctgagaagatgccaggacttatagtaccccctcaggacatggacagtatgtgggggcaggaaggttatctcctcccgggtaaagccatttcgtcctctccagtttggggcggaatgaggcctgctcctcttgtaaatacccccttccctcgaagctccctcccggtgctggggggcagctgaggggctgcaggggcagtctccctcctccaagcccctgtacataacctggagcgtgtgaccttcagagcttttcactttatgcaaaatggctcctgtgagggctgcaagctggagggtggtgcaggccttgggccacagggaggcgcctgtggaatagggggagttcatgcaccccttttttccccagaggggctggactcaggttagtttgggggtgggggctcctgcactttgccacaggcacggggagggttttctcctcaccccctctgccctcccaacttgggttgtactttctaagaaggtgattccccctgcccttgcccccttccccagaacaaaacatgttgatcatgtgcaatatttcttactgtgccgagaagccgcaatgagcgagattaaagctgtttaacacacctgtgtg

SEQ ID NO: 643 - DNA, 632 bp, Homo sapiens
cagctgcacaggcaggtgagggacccctgagaagatgccaggacttatagtaccccctcaggacatggacagtatgtgggggcaggaaggttatctcctcccgggtaaagccatttcgtcctctccagtttggggcggaatgaggcctgctcctcttgtaaatacccccttccctcgaagctccctcccggtgctggggggcagctgaggggctgcaggggcagtctccctcctccaagcccctgtacataacctggagcgtgtgaccttcagagcttttcactttatgcaaaatggctcctgtgagggctgcaagctggagggtggtgcaggccttgggccacagggaggcgcctgtggaatagggggagttcatgcaccccttttttccccagaggggctggactcaggttagtttgggggtgggggctcctgcactttgccacaggcacggggagggttttctcctcaccccctctgccctcccaacttgggttgtactttctaagaaggtgattccccctgcccttgcccccttccccagaacaaaacatgttgatcatgtgcaatatttcttactgtgccgagaagccgcaatgagcgagattaaagctgtttaacacaattgtgtg

SEQ ID NO: 644 - DNA, 174 bp, Homo sapiens
cccgtgcaggccccgcccccgggtggctcagcccagctgctgcctgggaaggtcctagtgcctctggccgcccctagcatgtcagtgcggggtggaggggccggccagccactgccactggtgagcccgcccttctcagtacctgtgcagaatggtgcccagccccccagcaag

SEQ ID NO: 645 - DNA, 13789 bp, Homo sapiens
cactgaggaaggagagtttaatgttgtgggaaggcagcaggatgcttagggtgcgggctccagcaggggagcaccttggccctggtcttgggccagcagacgcagaagcagggagtgcagagcccggcaaacaggtgtgtagcccaggcggctcagatgcaggtaatcatacatgtcatgatggctgatggtgccatctgagtgcacaaagccagggtcggcatctaggaagtgggcccgagggtggccagccagtgccgcccgtaccagctcgttcacctgtcggttcttctcccgaagtgggttgggatgttggcctcgcggaagcaggccctgagcaggaacacgaggcgtagtaaggaaacaagcatttgagtatcttgttctctgtgccaacctgtcctccacccaccaccatgaagtttccagctgcagaaaacactagggatgggcaagtggggagggtgggagggtagttcctaaatatcacatcctagccctcatttagcaagagacttctgggttttaccctctttcgttttcttttttttttttttttgagacagagtcttgctctgtcgcccagactggagtgcagtggcgcgatctcgactcactgcaagctccgcctcccaggttcacgccattctcctgcctcagcctcccaagtagctgggactacgggcacccaccatcatgcccggctaattttttgtatttttattagagacggggtttcaccgtgttagccaggatggtctcgatctcctgacttcatgatccgcccgcctcggcctcccaaagtgctgggattacaggcgtgagccaccatgcgcggcctagcctctttccaagtatcacttagaaaaatgttgacattggctaggttcagtggctcacgcctgtaatcccagcatgatgggaggcagagctggataggtcgcttgagcccaggagttcgagaccaacctgggcaacatggtgaaaccccatctctaacaaaaatacacaaaaattagtgggacatgatggcgtgtgcctgtagtcccagctactcgggaggctgacgtgggagaatcacttgagccctggaagcagaagttgcagtgagctgagatcatgccaccgcactccagcctgggcaacagagccagatcctgtctcaaaaaataaataggccaagggaggttgctcacgcctgtaatcccagcactttgggaggctgagacgggtggatcacttgaggtcaggagtttgaggccagcccggccaacatggtgaaatgccatctctactaaaaatacaaaaattagccaggtgtggtggcacgcgcctgcagtctcagctactgtgaaggctgaggcaggagaatcacttgaacccaggaggaggaggttgcagtgaggccagattgcgtcactgcactctggcctggcaacagagcaagactctgtcccaaaataaataaataaataaaagatatcaacatcatggctcatgccaagggatcaatccgttttcagaagaggaaatatcctagctacctacaagtgatggagcctagatttaccccaggaatgcctgacaacttttggcctattcaaggttttttgagggtttttcttttgttttctggtgagacagggtctctgtcacccgggcgagagtgcagtagcatgatcacagctcactgttaccttgaattcctgggctcaagtgatccttctcctttagcctcccaagtagctggggttacaggttttgcgcaccatcatacccagctaattctttttttttttgagatggagtcttgctctgttgcccaggctggagtgcagtggcacaatctcggctcactgcaagctccgccccccgggttcatgccattctcctgcctcagcctcccaagtagctgggactacagacgcctgccaccacgcccggctaattttttgtatttttagtagaaacggggtttcaccttgttagccaggatggtctcgatctcctgactttgtgatccaccctcttcagcctcccaaagtgctgggattacaagtttacaggcgtgagccaccgcacccggcttttttttttttttgagacagagtttcgctcctgttgcccaggctggagtgcaatggtgcaatcttggctcaccccaacctccacctcctgggttcaagcgattctcctgccttagcctcccaagtagctgggattataggcatgtgccaccacgcccagctaattttgtatttttagtagagatggagtttctccacgtgtggtcaggctggtcttgaactcccgacctcaggtgatctgcttgcctcggcctcccaaagtgctgggattacaggcatgagccactgcgcccagcccatgcccaactaatttttttttttttgagacggagtctcgctctgtcgcccaggctggagtgcagtggcacagtatcagcttactgcaagctccgcctcccaggttcatgccattctcctgcctcagcctgccaagttagctgggactacaggtgcccgccaccacgcccggctaatttttttttgtatttttagtagaaatggggtttcaccgtgttagccaggatggtcttgatctcctgacctcgtgatccacctgcctcggtctcccaaagtgctgggattacaggcgtgagccaccgtgcctggcccgttttttagtttttcaatacccccaaagtcttaagccatccctgggcaaaaaaggctaattggtctcggagcatattctcaaccacagccactctgaagggtatagcaagctccaacgtgagattctgcctaaaagccactgctctatgtcaagctgcctagaactgtgccaactgtggctatatctgagggggtcccagaccactgccattcttcctttcccactctcccagcctctcaccagcaccacaacccgggcctggggctgtcgctcattcaccagttgcacaatggccttgatgccaccagtcacctgctctgctgtgtgtccgtggttgttggtgcccacccagaccaccacaatctgtggaaaaagagacatgaagcagcggtgagggggcagccaaaagatgttttagagccccacccaagccccgctcaccttgggccggatgtgttccagctccccattctccagccgccacagtacatgctgtgtgccgtcaccaccaatgccaaagttaagtgcatgcagaggagagaagagctcgcgccagatctgtgggcaagaagtggtgtgggcaagaagtggtaggggcacaagggcactgtccgcatggaccatccccctctgtccaggtgttaaccaaatgccattatggaagaaccttacttcatggaagcagtcttaaaattttacctggagcaaactccagcatggctgaacctcactttatagaaatctattagagtctctcacttattttattttattttatatttttgagacagagttattttatttttgagacagagtctcactctgtcacccaggctggagtgcactggcactatctcggctcactgcaacctccgcctccctagttcaagtgattctcatgtctcagcctcctgagtagctgggactacaggtgtacgccaccacgtccagctaattttttgtatttttagtagagatggggtttcaccatgtgggccagactggtctcgaactcctgacctcaggtgatccacctgcctcggcctcccaaagtggtgggattacaggcgtgagcccatggtgcccagcctatttattttttgagacggagttttgctcttgttgcccaggctggagtgcagtagtgcgatctcggctcattgcaatctctgcttcccaggttctggcgattctcctgcctcagcctgccaagtagctgggactataggcatgtgccaccatgcccagctaatttttgtatttttagtagagacaggatttcgccatgttggccagggtggtctcgaactcctggcctcaggtcatccgcctgccttggcctcccaaagtgctgggattacaggcgtaagccaccacaccctgcctagagtctctcactttaaaccaagccccaggctctgttgctcatgctgaggtgggcggactgcttgagcccaggagttcaagaccaacctgcgcaacagggcaaaaccccatctctacaaaaattacaaaaattagccaggtgcatggtgatgtgcacctgtagtcccagctactcggagactaaggtgggaggatcacttgagcccaggaggcagaggttgcagtgaacagagatcataccactgcacgccagcctgggtgacagagcaagaccctgtctcaaaaaccaaccaaccaaccaaccaaccaacaaaacaaaccaagccccatagaagcaagactcacttcatgaaaatccagtctgcttgagccatgcattgaatcaatggcattacagttgaaacttattttgatgaaacccattacagttggacatgctttgtggaaagatattattatgattgagtcctctttgtggagtgccattagagttgcccttcgcttcctgtaaagtgactatagctttgtgtaaacccaacagggctgcgcactacttaaagcaaacaagaaagagcctcactttaggcaagcctatggcaggaaagcctcattttaggtcttagtacattatacacaaatccaatctgataaaaccaaggcatacatttctttctcaatagaatgttgcaccttacaccaagattctcagagcctcgggctgcctgaggccaatctgggtactctcataatacctcacctggcctgggttctggtccagatgtgtcagcatggacacagggctggatggggcagggggagagggactgccctcacctcgcactggtgcatgagctggaccaaggagtccccgatgaagacgacttcgggttccttatctttgctgtcagccacgaaccgatggtgctgcgggagcgcgcgagagggagtcaatggcatgcacgctccagggcccgccccgccctgctcccttaggcagcgcctcctcaactgccctcagtttcccaatcaggtagtgagagtggcacgaaccagccgttctcctgagccaccccccgcgcccccggactcctcaatatcccaggtgggaacgctcaccagggacatccagcgcccgtcgccctgtacgtcctgcaccggcgtgggcttgctggctgggttctcctctccactcatcttggcgccgcagctcctgcaggatgagcgagtcgggtcggcccgggagtgttccgaacggagctggctccgccacgcccactcctacccctcgcggcaacaaaggaccgtcccaacgctagcacacccgcggaggacgaaggccgatacagggcgccgcctcctctccagggacggaagccttcacttaggaggtaggtggaatcaggaaccttcgcttcccccacgacggccgcacagtgggctcgcccggcgcttcccgctcgggccgctgactcccaggccgcgcacccggcacggggtggggggagggagaggcgagaccatccagctcccgaggcggggaggagggagaaaccacccaccggtcacggggaggggcgaactacctgaagagtcgagagtgggcggggaaaatctagccctctgtctagcaaatgggaagaaaccatttgctgtacagagtgaaatgtgcggaagggaccacctactgttgcgggggggggggtgacccattcacgtggtggggggaggggagcgagtggacgagtccattcttatattcccttgaaggggtggctcgaatgcacctggctgggggggacgctcctattttctactgatgtgggggacagaaaaggaagatgacaaaatgtgaaaattcgaggctcccttctaaggagccactctaaggccgcgccagggctttagtgagcctatctactcgtgggcttcccctactcaaaacaccgtgggtgtgtgtgtgtgtgtgtgtgtgtgtgtgtgtgtgtgtgtgttgaaatctaaagtacatatctttgcattcaagacatcacaggacccctactcaaaacaccgtgtgtgtgtgcgcgcgcgtggcataacatataaactacatatctttgcattcaagacaccataggacctgcttggagggtagaagaaggtgcagaaagagaaaggaaattagagacgcctccagggctcaggtccagtctggcgtccctccggcagatcatcttgcagatctgcagcctctacactctctctaaacccacaggccaactgggtatgtctgagctctgaaacctacatccatagccaaggccacctagggtcgcgcctctcccccaacgctgccccaaattaatctcagacctcagtgtcttctcagatctccctcttctctgggaccaggtggggggctcactccctgctaaacgtcctggtcatgttcttgtagcctcactccaggtgggaccttcccatgtattcattccttcgaggtggattgatactgagacagagatgagtgttattcattgtgtttatgttttcaatccactttcctggaactgggccgggcacacagtggttattccacaagtgcttgctgaatgagtagtaaatgagtgggtcagctcctgaccttgtcccaatgtgtttagggagacagatccagacacagaggtgtaggggtgtcaaagttgtgtttgagggagagacagggacctctggggaggaagaggagaaggactctgaggactatgggtttcctaggagtagtatctcagctgggtctgaaagataatgaagaatgggcaagcagaaagaaaagacacaggtaatcactttcttattaggtttggggaatatcgtggaatagcttgattttaaagtctgagggaggccagcatggaggctcatgcctgtaatcccagcactttgggaggctgacatggtcggatcacttgaggtcaaccagcctggccaacatggcgaaaccacgtgtctactaaatatacaaaaaaaaaaaaaaaattagctaggcatggcagcacacgcccgtagtcccagctacttgggaaggctgaggcaggacaattgcttgagtctgggaggcagaggttgcagtgagctgagatcgcgccactgcagcccagcctgggcaacagtggcccagcttgggtgacacagcgagactctgtcttaattacaaaaataaacaaacaaataaagtctgagggagccaggtgcagtgatgcatgcctgtagtcccagctactggggaggctgaggtgcgaggatcgcttgaacccagaagtttgagaccagcctgggtaacacagtgagaccctgtctaaaaaaaaaaaaaaaaaaaggctgggcgcggtggctcacgcctgtaatcccagcactttgggaggccgaggtgggcagatcacgaggtcaggatcgagaccatcctggctaacacggtgaaaccccgtctctactaaaaatacaaaaaattagcggggcgtggtggcaggcgcctgttgtcccagctacttgggaggctgaggcaggagaatagcgtgaacctgggaggcagagcttgcagtgagccgagatggcaccagtgcacttcagcctgggagacagagcgagacgccgtctcaaaaaaaaaaaaaaaaaaaaaaagggcaagtgcctgtagtcccagttagttgggaggctgaggcaggaggatagcttgagcctgggagatgaggtggcagtggcccatgatggtgtcactgcactccaggttgggtgacagagtgagtccctgtctccaaaaaagaagtcataatcagctaggcacggtggctcactcctataatcccagcactttgggaggctgaggtgggcagatcacttggcgtcaggagttcaagaccagtctgaccaacatagcaaaaccccatctctattaaaaaatacaaagattagctgggcaaggtggtctgcgcctgtagtcccagctacctgggaggctgaggcaggagaatcgcttgaacccgggaggtggaggttgcagtgagttcagactgtgccactgcactccagcctcagtgacagatttaaattccatctcaaaaagaaaaggaaagaaaagaaaagaaaagaaaaaagtcttaattatgccttcaagtcagtgatataagagagaattttttttttttttgatagagtctcgctctgtcgcctaggctggactgcaatggcgcgatctcggctcactgcaacctctgcctcccaggttcaagcgattctcctgcctcagcctcctgagtagctgggactacaggcgtgtgccaccacgcccggctaattttttgtatttttaatagagaagaggtttcactgtgttagccaggatggtctcgatctcctgacctcgtgatctacctgccttggcctcccaaagtgctgggattacaggcgtgagccaccatacccaaccgagaaaaaaatttttaaaaataaagtcttagaggataagttggagcagttcctgaagcaaagcttagtgagaaacaaagcttccaggcattcttcattcaccaggcccatttcaagttagacatattggtctagtttatccttctagcaaccaaatgaggaaggtagttttattaccaacccaattttacaggtcagaaaactaagtctgaccagttacaaacatttccaaggtcacacagcccagttgtgccattttgggcatttaaaccaagcctagctatgaatcacaacactacactaacttttttttgagatggagtctttctctgtcacccaggctggaatgcagtggtgtgatctcggctcactgcatcctccacttcccaggttcaagcaattctcctgccccagcctgctgagtcgctgaatatacagtcgtgagccaatgcatgtggcctaatttttgttcttttacagggtcttgccgtctccctcaggcgggcgtgatcatggctcactgctgcctccacctcctaggcttaagtgatcctcctgcatcagcctcccaagtagctgggcccacaggcaagagccactgcgcccagcttatttatttatttagagacggagtctcgctctgtcgcccaggctgaaatgcatctcggctcactgcaagctccgcctcccgggttcacgccattctcctgcctcagcctcccgagtagttaggactacaggcgcccgccaccacgcccggctaattttttgtatttttagtagagacggggtttcaccgtgttagccaggatggtcttgatctcctgacctcgtgatccgcccacctcggcctcccaaagtgctgggattacaggcgtgagccaccacgcccaaagctaatttattttttgtagtcagggtctccctatgttgtccagggtggtcttgaactcttgggctcaagccagcctcctgcctctgcctcccaaagtgctgggattacagacgtgagccaccacgcccggccaactgtataagttttctagggattatgtctgtggctgcttgggggacagctgtgcatgggggctaccatgacccttcttccctttggcacgcctggtctcaactagccctcgaaagaccgctgatagctatctgaaccaatcagcattcaggaagggggcggacctagtgaacctcacagccaattgagggctgggaggtgctgagaccaagaaagggagatttctgaaattgaggctgggaggggaggggctataaccggcgcttccctggcacgcgccgctaggtttccgtcctctcagagccacgaagccaaagggcatggaaagggcacgcgcatgcgtgtgggggagcccgaggcccggaacagcgccaggtgacttcgagagctggggtcaccgcggaaaagaagccattgcgccccacagctacgtgaagtgggaagggccggggttcgttggggcgagagaggtgcccttcccacaccctgctcctgccaaccgtaccccactcccttcactctgcccaccctgccctaccgcggctggccaccatgcttcctctcctaccctaggcccttcctttgtgatcaggccctgtccctgatcgcgcctctgtctcccttcctgttctcttgaggttttctcaggctttccagacttctcttgctgctctccctctcctgcttctctttctctactatctctttccactttctgcattcccctgtacctcgtctacccctggatttctccgtccagaatcactttctggtcccccaaatccctccaatctcatgaccccttcaccaccctccatcttttgttgttgttgttgttgttgttgttgttgagacagagtctcgttgtgtcccccaggctggagtgcagtggcgcgatctcggctcactgcaacctccgcctcccgatttcaagcgattctcctgcctcagcctctttgagtaggtgagattacagtcattcaccaccacgccggctaatttttgtatttttagtagaggcgaggtttcacatgttgcccaggctggtctcgaactcctgacctcaaatgatctacccacctcggcctcccaaagtgctgggactacaggcgtgagccactgcgcctggcccccaccctccatcttttttttttttttttttttttttttttgagatggagtctcgctcggtcatccaggctggagtgcagtggcgcgatctcggcccactgcaagctccgcctcctgggttcacgccattctcctgcctcagcctcccgagtagctgggactacaggcgcccgccaccgcgcccggctaatttttggtatttttagtagagatggggtttcaccgtgttagccaggatggtctccatctcctgacctggtgatccgcccgcctcggcctcccaaagtgctgggattacaggtgtgagtcaccgcgcccggctcaccctccatcttttaactgtttccccatgtccctgttcctaatagcctctctctgtttcctggcttatcttcccattagctgtgactccttcgacttcatcttacccctgtgattccttatctgaccaaaccttttccaatctctctctgctcacttattttctctcatcttctctctctcttttaagagacaaggtctcactctcttgcccaggctggggcacagtgatgcaatcatagctcagagtaacctccaactcctgggctcaagtgatcctcctacctcagcttccctagcagctgggactacaggtgtgggccaccgaatccagcttttttttttttttttttttttttttgagatagagtctcactctgtcactcaggttgaagcgcagtggcgcaatctcggcttactgcaacctccgtctcctgggttcaagcgattctcctgcctcagcctccagagtagctgggattacaggcgcgcaccatcacatacagctaatttttgtatttttagtagagacaggatttcggcatgttggccaggctggtctcgaactcctggcctcaagtgatctgctcgccttggcctcccaaagtgctgggattacaggcatgagtcaccacacctggcatcatccagctaatttttatttttattttttgtagagatgagggtctcactttgctgctcaggttggtcttgaattcctagcctcaagcgatactcccgcctcagcctcccaaagtgctaggattacagatttgagccaccatgcctggcctcatctggtcattctaaatagtattcccaccacaccccaaaacatctccctattcacttgttttgttttgttttgtttttgagatggagtctcactctattgcccagactgaagtgcagtggcacaatcgtgactcactgcaacttctgccttctgggttcaagcaattctcctgcctcagcctcctgagtagctgggattacaggcgtgcaccaccatgcccagctaattttttttttttttgagatggagtcttgctctgttgcccaggctggagtgcaatggcatgatctcagctcaccgcaacctccacctcctgggttcaagtgattctcctgcctcagcctcttgagtagctggaattacaggtgcatgccaccacgtctggctaatttttgtatttttagtagagatggggtttcactatgttggccaggctggtctcgaactcctgacctcaggtaatctgcctgccttggcctcccaaagtactaggattataggtatgggccactgcggctggccaatttttgtattttcagtaaagacagcattttgccatgttggctaggctggtctaaagtgacctggcctaagtgatcggcctgccttggcctaccccagtgttggtattacaggcataagccaccgcgcccagccctccctattcactttgctactccccttgacttatctgcatgctgatggccaccctatctttatattccaggacaccatggatacccagggaccagtctcccagccttttcagcagcctgagaaacctggtcgtgtccgtcgtcggaagactaggcgggaacgtaacaaggccctggtgggcagccgccggccattagcccaccacgatcctcctgtggccattcgggatccacctgtggtccctactgcctccaagctcgtggtcataacccagggccggctgagccgggagcaccggggtctcttcaaccacgaggtgaaatccctagatgttgcaaggctgcttagcagtgggaccctggtgccaggcagccccacactccccgccaagccctccccaagcccaggcagggcccaggaaccagccccacggtccagggacaaagagaaccaggtgcctggaggttcgggcccaggcccacccagttccccagagttgtctggcgtggggcagctgctggcagagctgcagtgtcagctgagtttgccacaggccttcccccggaggaacctgattcaggatgccagggatgccatcgtgcacaccttgcaggcctgtcatggttgtgtgcctgaccttgccctggtgcttcggggctgccagccacccttgccaggtgagcgtccctcctgcccctgtactcccctttcctttgtcggctctagctcagctagcctctatgcttctttcctctgtgccaggggccaagcctggggtctctgagagaaagatgacacccttctggattaatagccctgatcaagtcccagagcaggagaggcaaaggaagcaacaagggacaaaggagttcaccttccccatgccctacacctccagcatgcccactgcgcacagggggagtctggcaccgccaagaggtccctggccaccatactttccctcactgtcttcgccatctggaacagcctggggtcccccaacagcgtttgacttgttaaaaagcatctggctggtagccacgccaccccctcctcggccctggggggttggcctccctcagcccctgcctcagccttcatcacccctgttgccccgaacctctgtcctggactggagccccagccccccttccccactgcccagcctctcctgggtagtagcccagagcagtccggaagcctggtcttttccacccatgagactgtactgaggagaggctgaggctagggctggggacagatatcttgtactcccagtgacctcaataaagtacttttcatggtcctcttga

SEQ ID NO: 646 - DNA, 1121 bp, Homo sapiens
cttaaacctgattgtagctatctaagttgtagccaatgaggtgtcagaggaagtaccatgcagtgcaacttcttaagtagcctagaaagatggggtcacatccccctgggttgtttccttctttgtgtcattttgatctctctcgctggaaaacagaaatgatgtctggagtgtaagcagccatcttgggctaggagactacatgctgacatggtgacacaccacccagaaagaatctgagtagtcgatgatcacagagctaccatatcagcactagactctctacctccacattttatttgtgtgacatagaaataaagtttaagctttgttttttctggggtgtatgtgtgtacacatgtgcgtctctgtctgtctcacatgcagtgagacctaattctaactgatatgccggtaggatggggggaccttgccacaaggtataattgtggtgggatggctgtgtcttgctcccattcaggatccatggaaagctcctcctccttcctgttcccctggatgccaagcgatgggcctgagaccctggctttgccatgtggatgctccccctcaggactttggatgtgcagtgattgctacaaaaagggcaatgaagatgcctggaccacagccacacagtctccatcacagcagtggtattctgtggaatgagtactaattttctggccacattttctgttaaaaactggttgttgagctgcccacttgtcttggtcaagggatgctggagtggcctgggaaggcagtgttgtttgcttttcttaggatggaacacacttaggcatatttttggtcaaagcaaaagaagaattcaaaggtgagagaagttgaagataaaaaggggaaaatgagggtagcagatgaagcaaagtcacacagaaagctggcaggcgagtagtagaatcagagtacaggctgagcatcccaaatctgaaaatccaaaatcggaagtgctccaaaacctgaaacttttggagcaccaacacaatgctcaaagtaaatgctcagtgaagcattttggatttcatattttcagatttgggtttgcccaaccggtgtaatacaaatattccaaaatcaaaaaaaaaaaaaaaaaaaaa

SEQ ID NO: 647 - DNA, 1119 bp, Homo sapiens
cttaaacctgattgtagctatctaagttgtagccaatgaggtgtcagaggaagtaccatgcagtgcaacttcttaagtagcctagaaagatggggtcacatccccctgggttgtttccttctttgtgtcattttgatctctctcgctggaaaacagaaatgatgtctggagtgtaagcagccatcttgggctaggagactacatgctgacatggtgacacaccacccagaaagaatctgagtagtcgatgatcacagagctaccatatcagcactagactctctacctccacattttatttgtgtgacatagaaataaagtttaagctttgttttttctggggtgtatgtgtgtacacatgtgcgtctctgtctgtctcacatgcagtgagacctaattctaactgatatgccggtaggatggggggaccttgccacaaggtataattgtggtgggatggctgtgtcttgctcccattcaggatccatggaaagctcctcctccttcctgttcccctggatgccaagcgatgggcctgagaccctggctttgccatgtggatgctccccctcaggactttggatgtgcagtgattgctacaaaaagggcaatgaagatgcctggaccacagccacacagtctccatcacagcagtggtattctgtggaatgagtactaattttctggccacattttctgttaaaaactggttgttgagctgcccacttgtcttggtcaagggatgctggagtggcctgggaaggcagtgttgtttgcttttcttaggatggaacacacttaggcatatttttggtcaaagcaaaagaagaattcaaaggtgagagaagttgaagataaaaaggggaaaatgagggtagcagatgaagcaaagtcacacagaaagctggcaggcgagtagtagaatcagagtacaggctgagcatcccaaatctgaaaatccaaaatcggaagtgctccaaaacctgaaacttttggagcaccaacacaatgctcaaagtaaatgctcagtgaagcattttggatttcatattttcagatttgggtttgcccaaccggtgtaatacaaatattccaaaatcaaaaaaaaaaaaaaaaaaa

SEQ ID NO: 648 - DNA, 363 bp, Homo sapiens
agtaacttaattgataaagtcagtgaggaaggaatagaatacaacaaatggcttaaaaacagaaggccaagcgtgatggctcattcctgtaatcccagcactttgtgaggccgaggcaggtggattgcttgagctcaggagttcaagaccaacctgggcaacatggcaaaaccccatctctaccaaaaatacaaaaaattagccgggcgtggtggctcacacctgtagtcccaatttctcagaaggctgaggtgggaggatcacttgaacccaggaggaggaggtttcagtcagtagagattgaactactatactctagcctggatgacaaagtaagaccttgtcaaaaaaaaaaaaaaaaaa

SEQ ID NO: 649 - DNA, 446 bp, Homo sapiens
cagtgggaaactaatagagcatctttcctttttttctagttaaaggactcacttgtacgtgtacacatttctcaggagtcctgtcaaccactgggaagaaagaggctggacttctgcattgaacccaggaacggggtttcacagcaatggaaacctggggttaaatatcaatggaaccttacatgacttgaagaatctttaatacaagctaggttttgaccccaaattagacatttggcagcctctcattacagtctatcttgcaaacctcagtgtggcaaggaatcagattcacccacactccctagtctaaaggattgtcctctgatccttccaggtggattaagccctttctaatctgtcatggacagagcaatgtacctgcctttgtttgttttccttaattctttcaagtgcctttgggtaataaatggttgcgtactcag

SEQ ID NO: 650 - DNA, 446 bp, Homo sapiens; identical to SEQ ID NO: 649

SEQ ID NO: 651 - DNA, 363 bp, Homo sapiens
agtaacttaattgataaagtcagtgaggaaggaatagaatacaacaaatggcttaaaaacagaaggccaagcgtgatggctcattcctgtaatcccagcactttgtgaggccgaggcaggtggattgcttgagctcaggagttcaagaccaacctgggcaacatggcaaaaccccatctctaccaaaaatacaaaaaattagccgggcgtggtggctcacacctgtagtcccaatttctcagaaggctgaggtgggaggatcacttgaacccaggaggaggaggtttcagtcagtagagattgaactactatactctagcctggatgacagagtaagaccttgtcaaaaaaaaaaaaaaaaaa

SEQ ID NO: 652 - DNA, 865 bp, Homo sapiens
agaaagaaaatattgtcttttttctttcctcactcttattggatatttgtttagtcctaaacaaagtagctttagcttttaatcatactcattactgtatttttgttcaatgtttcttgatttctgcctactttattaataattatctctttatttcagtttggtctgttcttctctttcaatgaatctaatagaattcatggctcattttatttcaatgtctttatactttctggtcagtgtatttaaagttatacattttcctctgatttctgctttagttgtgccctgcatgattttatatgcagagatattgttgtcattcaattctaagtatcttataatttctcttatgatttctgcttaagcccaagggtaatttaatagcaggctttttagtttcaggactaggtaacatttttggctctttttaaaattattgtttttctaactttatttcagtagagttagggaacatattctgatgttgattcattggaattgtttgagcctttctctctgtaattgttacaaatttaatttttgtgaatattccatgtgagctaaaaaaaatctgtttttgttctctggtctccaccctaatgagactttagaaattctcagctgtaatccatgatccctggtctaataaaaagaagggtgtaaacatggacctgaccttcagatggggagggggaggcaaaagaacacaactgaaaatgctcccccagctacattgaggaggggtaaatggtaggagggagctagggagagaacatttaaagggtgttgacagagtttaaataggtggtgatagggacttgaagtgatagcaaaaacaaaaaacaaaaaacaaaaaaaaaaa

SEQ ID NO: 653 - DNA, 865 bp, Homo sapiens; identical to SEQ ID NO: 652

SEQ ID NO: 654 - DNA, 7442 bp, Homo sapiens
cagagcatcaccgcagaaacaaaggctccagcctccggacaccatgtctgtgcgcttttcttctacctccaggagacttggctcttgcgggggcactggctctgtgaggctctctagtgggggagcaggctttggggctggaaacacatgcggtgtgccaggcattggaagtggcttctcttgtgcttttgggggcacctcatctgcaggaggctatggcggaggtctgggcgggggaagtgcttcctgtgctgccttcacagggaatgagcacggcctcctctctggcaatgagaaggtgaccatgcagaacctcaacgaccgcttggcctcctacctggagaatgttcgagccctagaggaggccaacgctgacttggagcagaagatcaaggggtggtatgagaaatttggacctggttcttgccgtggccttgatcatgattacagcagatatttcccaattattgacgaacttaagaaccaggtaagaaacgccatggcgtgagtgttagcactcctgagagtgtttagccactcacagatgcacaaatgtataagctatcacaataacagggctttgccctcagcttctaaattttaggagttcattttcaatattaaaaataatttctaataaattctaatatttgaacatggcacgtccatcatgtagtattaggtatatgcttttggtaatattaaaatatcaaaagctgtccagtgtctccagttatatatttataggctttcccatagaaagagctttttttaatgcttggggtgggaaatacaagagaccatacccagccaggcacagtggttcagcctgtaatcccagcactttgggaggccaaggcaggtggatcacttgagattaggggttcaagaccagcctggccaacatggtgaaaccctgtttctactaaaactacaaaagttagccgagcgtggtggcacatgcctgtaatcccagctacttgggaggctgaggcaggagaatcacttgaatctgggaggtggaggttgcagtgagccaagatcgtgccactgcactccagcctgggcaacagagcgagactcggtctcaaaataaaagacagagagagagaccatacttaaattacccatcttcaaaagaatggtctgattattagagacagatgccagaaatattactataatttcatgggtaattttatttcaaggaactttgaaatgcatcttaaatatttcctcaatcttaactaacttttcatttgtcagataatttctgcaactaccagtaatgcccatgttgtcctgcaaaatgataatgcaagactaacagctgatgacttcagactaaagtaagtagagctgaagataaatgggaaaaaaaagttgtctaagcattttttctcctttattcttctaagttatttgacgttgtctcaagcctttgttcttgtttattcatgtatttgttttaaacaaaatgcctgttagaatgagtaactagctgagcaacaaattttacttgggaaatttcgggactaacaaaaacgagtgtcaaagtcatatgagaaagaattttggctattcccattctcttgcttcaatgaaatgtatttattgcatgatagatgacctaactgaaatgtgtttttttaattaattaattaatttatttatttatttattttttggagacggagtctcgctctgtcgcccaggctggagtgcagtggcgcaatctcggctcactgcaagctccgcctcctaggttcacgccattctcccgcctcagcctcccgagtagctgggactacaggcgcccaccactgcgcccggctaattttttgtattttttaatagagacggggtttcaccgtgatctcgatctcctgacctcgtgatccgcccgcctctgcctcccaaagtgctaggattacaggcgtgagccaccgcgcccggcctgaagttttaagtattatcttagtagttttacctcaaagcttagtctgagttgtatgatgatctaaaaagtgatgtgccatgtctaatgactaatgatgaaacttccaaatacttttctaaggtttgaaaacgagctagcgcttcaccagagcgtggaggcggacatcaatggtttgcgaagagtcctggatgagctgaccttgtgcagaacggacctggagatccagctggaaactctcagtgaggagctcgcttacctcaagaagaatcatgaggaggtagaagctccacccggctggctctcacaatcgcctccctaccaaattttaaaactaatttcagatgataaatataatgtcttaaattaacattcaagaaggaacctgtcagtttctccataaggcttagattgtttgagacgcttctattcattcttctcaaaagaaacaaacctcccaaaaagtttctaaccctatagatcttgtccatctgactcctttaaaaatattcaggccagaagcggtggctcatgcctataatcccaacactgtaggagacccagaatggaggatcgcttgaggccaggatttcgaggctgcagtgagtcataattgcaccactgcatttcagcctaggcatcagagcgagaccctaactcaaaaagtgcaataaataaaatattcagatcctaattccgttaaacaaatatctttcaggaaatgaaagctcttcagtgcgcggctggaggcaacgtgaacgtggagatgaacgcggcccccggggtagacctcacggttctgctgaacaatatgcgagctgagtacgaagccctcgcagagcagaaccgcagggacgcggaggcctggttcaacgaaaaggtaaaaccacgcttgggtgcgcccgggcgcggactcagccccagcgccctaacgcggcccctgccgttccagagcgcctcgctgcagcagcagatctctgacgacgctggcgccaccacctcagcccggaatgagcttatcgagatgaaacgcactcttcaaacccttgagattgaacttcagtccctcttagcaacggtaagcgaaaagttacaaaacagatttgctttagaaattgagaaaaaaataatcgaagagaattttcttccaacataattacatattttagtttttaaccattaattacagtgcttgacataagacatatttgcattttgcacatgacaatcctctttgcctacaaagtatagctggatgccaataattatgaaatattagaaattagcaaatacagtcaagatactggaaaaagaaaatcgttttgactttgaatcttctatcataagtcaaaatatcaaaaaccactcatatgtggaggctaaaaaagttgatctcagaagtagagagtgggataagtgcttactagagcctgggaaggggatggggggataggaagaggttggttaaaggatacaaaattacagagaaatagggagaatcagttcaagtgttctatagtactgtagaatgactacagttaagaataatttattctataatttctaatagttcaaggagaggattttgaatgttcccaacacacacaaaaaagataaatgtttgggaccatggatatgctaactgccctgattctatcactacacattgtgtgttttgaaatataattatggaaccccataaatatatacaattcttatgtgtccatttaaaaaaaaagaaaaaaaatcctactgcttaaagagagcaaaaatacatttgcaccactcctagcttcatctagcattccttttggccactcaattaagagcacttacaagttcctttgtaagtggcatagacagaggaaaagtcgaggcatgaaggctgactataaaactaaacatgtgtaatgataatcataactgctttcattaagggtttgcccagcacttccgcccacatgtgagtccacaacaaccccggggcatgggcagggcagacgttataactcatgtcattatttccaaaagaggactctgagattcgaagaagttaagcaattcccacagtcccacagttgggtatgaaggaatccagaagttctctccaaattttctaactcccaagtctatacttttcccactatggctagtaaaccaccagagtttatccacagatgaggctatgaatgtatataaaatcaagactttatataaaaaatacttgcaggtgaaaggataagacactctcatcttcattccatgtaaaattgcagtgagtgttccctctgagtatatctgtaaacccattcagattcacaagccaatgaattgaactactgtatttaaagtctaagaaggtaattattttctgtggtttattctactcatggaacgtttatgcggtttactgcaggatgactttttaatagaagagctacaatcctcataagacaagactgtcacatggctagaaatgagtagcaaagtataggcggacttctagttgtgggtaaagtagcaaattgtgccacactctacaagcataggctatattggtgcaggggagggatctttcagtctgtgccctatgaagagacaatttcatcttttttagcacacctgggcatctgagggacattcagcaccagctgtgtcattctcaaatagaaaagtagtaggacatttaataaaggcaacaattaatattgaagaagtggaatcttttgggtaaatataattatttgcatgatgtaaggataattctcttaattatctcttaaatgctttggcttattctaaaacaccgtgaccttttctattaaaccatgtcttaccaaactacagaaacactccctggagtgctccttgacagagaccgagagtaactactgtgcacagctggcacagatccaggctcagatcggggccctggaggagcagctgcaccaggtcagaaccgagaccgagggccagaagctcgagtatgagcagctccttgacatcaaggtccacctggaaaaagaaattgagacctactgcctcctgatagatggagaagatgggtcagtattgccgccattgagaaaacaattcatttttaaggttactaaagatgatttgaaatcaagtacaaaatatctatgatctagatcacgcatagataatactcttttagtgttatttcagaatgcagtgaattcccaccttaaatcattatttttcagtttcctcagtaaaacagaataattaatataagcgctctatacttttacagctcctgttctaaatcaaaaggctatggaggcccaggaaatcaaacaaaaggtaaacaaaagctgtgttaggcattcagtgtttatttgtatgtgtttcaaatgatgttttatttcctatttatgaatttgataaattctaaacagtttatatgtggcattttagattcatctaaaaccaccattgtcaaaacagttgttgaagagatagatcctcgtggcaaagttctctcatccagagttcacactgtggaagagaaatccaccaaagtcaacaacaagaatgaacagagggtgtcttcctgaactccagcctctgagacagaatggcccccaaattaaaataccaaaatgaagctagtttcctaaataagggtccccttatttttctgcttttcttccaatgaattaagacaagttatttttagaatagtaccatttctttggctttttctctatggtggtgtttcaataaaagttcttcctgttgcaagtcatcttccctggttctggccaatctttgcattttagatataccctcccaaatggaagctgaattttgtctttaatttcttctgtttaattcaacagtcttcacaagttggaagtaagtttaatgtgaaaactagttggagtctttttgacttctctgtaaaattttgtctcctttgtctcagtacgaaaagtacttactgagaacacgctatgtgccagataacgaggataaaacagttaataagatccagtccctgaagtcaatatgctcatagatgtagaaataagaacctgaagaatcagaaacaaacttaaacataaaggaaaggctataagtagtgatatttgaaggtagaaggggaaaaagagagctgtgaggacaagggtaagaggagaattccagcaggcatctaattcataatcttgatcactccaccataacggtaggaattcacaagttctctccttcgtttttgccatccaagactgcagagccatgtggctctcaagtcaaaggtaacttttagtgcaataatttcagcacctaccattaatgaatctatttcaaggctgggagtgggaggaggttaaactcagcagaaaaccctccagaggtttatttgtgggtgagagatttggctccccctcaccaatcccgtaacagaaacagcctgtttttctctggaaccagtgtcctattactgaactctgtagaattggctcagcacagttgaaacacagtcactttcaagctgtctttcctcctctttttcccacacgcatgtaataatacctaagcgaatgtaaggcagataccctctcacttaactttttaattaaccagtcctcacatcatataccctcatatcaaaattaggaaaaggaaacatcctaccacgtaagagttgaaaagttacattcacgcaaaaacctgtgcacagatgtttataacagctttattcgtaattgccaaaacttggaagcaaccaagatgtcctcttggttgacgaatggataaataactgtggtacctctagacaacaaaatattatttagtgctaaaaagctatgagctatcaagccatgaaaagacacagaggaaccttaaatgtatattactaagtgaaagaagccaatctgaaaaggctacatactgtatgaccccaactatatgacattctgtacaaggcgaaactatggagatagtaaaaagataattggctgccagaaattggaggtgagggatgcacaggcagaacacagaggatttttaaggctgtgaaaatactctggataatatcataagaacggatacgtgtcattatacattttccaaacccgtagaatatacaacactaagagtaaacggtaatactaaaaagtctttaatttttttttttttttttttttttttgagacagtctcgctctgtcgcccaggctggagtgcagtggcgccatcttggctcactgcaagctccgcctcctgggttcaagccattctcctgcctcagcctcccgagtagctgggactacaggcgcctgccatcacgcccgtctaatttttttgtattttcagtagagacggggtttcaccgtgttagccaggatggtctcgatttcctgacctcgtgatccacctgcctcggcctcccaaagtgctgggattacaggcgtgagccaccgaatacttagctcagatttcacagtatttga

SEQ ID NO: 655 - DNA, 155 bp, Homo sapiens
gggcatggtggcaggcacctgtaatcccacctacttgggaggctgaggcaggagaatcacttgaactcgggaggcagaggttgcagtgagccgagatggcaccactgcactccagcctgggcgacagagcgagactccatctcaaaaaaaaaaaa

SEQ ID NO: 656 - DNA, 127 bp, Homo sapiens
tgaggcaggagaatcgcttgaacccgggaggcagaggttgcagtgagccaagatcacgccactgcactccagcctgggcgacagaatgagactccatctcaaaaaaaaaaaaaaaaaaaaaaaaaag

SEQ ID NO: 657 - DNA, 870 bp, Homo sapiens
aaaactttgtgtagcatgcctggttgtacgataagagctgagtgaaagatgcagtatcccttttccacacggaaaagccaaatagcatcagcaacaacaaatagaataatgcagtggtttctatcatgctaatttattttgctttggagcaggtacctttcctctatggcattattttcttgcatttctcataaaggggaggatgcatcccaactgaatggctcactggcatgtcttttatgtgttcagttgccattcctagctttggaaagtttctatctgtccatgtgtatacaagtcaatgccccatttttgtttttcttttaaccgaggtgtagataggaaaaggacatttttaattacttaataaccggaaatgcagatgtgtaaggagaatgagaggaatgagttaaagtggttatgcatttttctatagatgagccattacagcaaggaattttacagttgacttctctgaacctagctttaccacagtgattaaatcctatttagaaaggggaatctgatttaaatgtgtgattccttgtatttgctcctatcacaaaagatatattaaaggaggtatgccattaatgaaatccactgtcctgagtattatctttcctcctgttgtactttctcagagactatggcagaatatctggatcttccttggattttgtacacatattgtagtgaaatgtgtcctacatctgaaattgcatgggactcatgcccagcaatctggttctaggcctttgacacctgataatatgagagcaattggccagccaatagccataagcccagaggattttagagcttcatgtgtggcttttaagagcaggtttgaaaaaaaaaaaaaaagac

SEQ ID NO: 658 - DNA, 868 bp, Homo sapiens
aaaactttgtgtagcatgcctggttgtacgataagagctgagtgaaagatgcagtatcccttttccacacggaaaagccaaatagcatcagcaacaacaaatagaataatgcagtggtttctatcatgctaatttattttgctttggagcaggtacctttcctctatggcattattttcttgcatttctcataaaggggaggatgcatcccaactgaatggctcactggcatgtcttttatgtgttcagttgccattcctagctttggaaagtttctatctgtccatgtgtatacaagtcaatgccccatttttgtttttcttttaaccgaggtgtagataggaaaaggacatttttaattacttaataaccggaaatgcagatgtgtaaggagaatgagaggaatgagttaaagtggttatgcatttttctatagatgagccattacagcaaggaattttacagttgacttctctgaacctagctttaccacagtgattaaatcctatttagaaaggggaatctgatttaaatgtgtgattccttgtatttgctcctatcacaaaagatatattaaaggaggtatgccattaatgaaatccactgtcctgagtattatctttcctcctgttgtactttctcagagactatggcagaatatctggatcttccttggattttgtacacatattgtagtgaaatgtgtcctacatctgaaattgcatgggactcatgcccagcaatctggttctaggcctttgacacctgataatatgagagcaattggccagccaatagccataagcccagaggattttagagcttcatgtgtggcttttaagagcaggtttgaaaaaaaaaaaaaaaa

SEQ ID NO: 659 - DNA, 868 bp, Homo sapiens; identical to SEQ ID NO: 658

SEQ ID NO: 660 - DNA, 750 bp, Homo sapiens
cttcaaagcaaggaaataagatgctgtatatgcacacataaatgcattgataatgtaaatatcctattcacgctaatgaattactagatattaaaagtggggggtggaaatcattgtagccctttattgatgacacccattcattctggcttcagaccttgcagaggttggccatatctttttaaaagtgtcattgatgataaaagggactacccaaggctaaagcgtcaacatttttcagaacaattgcttttctcattatttacaacctatataattcaactttgaaataacccttattttgaaaaaaactgttctaggtatggcatgttttgttttttccctcaggtatattcaatacattcttcatatttgggggaactgcttttgaaaaagggatactgcatcttaacagttatcttcagtgtgcatccagtaaagtctgcgtgttgagtatttgagctacattccatatattttggccaccctcataccagaggacagccgtagttcaggaggctctgttttcaaaagcaagttcaaaagcacatgcacattgagggaagatgaaagaaaacaaaaaccaaccatgcccatttaacttcagattacagagcacaaaatgtggagtgccattaacccattgattgattgtggctgtagaatttaaaaagcaaacatggggggggtggggaatcatctgtatccagggtaagaatgaccaatattttcacatgggatcatcctaat

SEQ ID NO: 661 - DNA, 750 bp, Homo sapiens; identical to SEQ ID NO: 660

SEQ ID NO: 662 - DNA, 750 bp, Homo sapiens; identical to SEQ ID NO: 660

SEQ ID NO: 663 - DNA, 13862 bp, Homo sapiens
ttcagaaccaggagaggaagcacaggacgtatgtctatgtgctcattgtcactgaagtgctggaagactgggaagattcagttaacattggtaagccatctccagacagcctggaaagggttcctcacaaccagcccttgccatgccacaggtcatgaccagaaccagaaacaagagcgtaccaggctcagtggctcacacctataaccccagtactttggaaggccaacacaggaggatcacctgagcccagagttctagaccagtcttggcaacctagtaagacctcatctctacaaaaatcagaagacttagctcggcgtggtggcacatgcctgtggtcgcagcttctcaggaggctgaagcaggaagatcatttgtgcttgggagtttgaggtcacattgagccataatcatgccactgcactccagcctaggcaacagagtgagactctgtctcaaaaacaaacaaaaaaacagaacaacaagagctggataaagaatagaaataattgaaggatgtgtataataaaacaagcatgtacattttgaacctgatagtattttgaaatgtttaaatggaatctgaagtgagtacatggtccacaaatagaagcatgacccctaaaaataagaaatgttgcttctaaaatcaaactgggtccttgccaaaagggctatacttctgcacctcctgagcagatactgattgagggcctccgccatgccaggctcactgctggccatggggaccataagtgagagcaggaccctggtcttgttcctcatgacatttatattgttgagaaaactgttggtttggtggtgtgagtccctccagaaatcatttagtagatacagaatagtgcaggtggtttctagttttattcttataaaatatgaatatatctataatatatatttttatattttttcatattttatatgaatataaaaatgataaaatttatgaacttttacaaaaggtgctgtgtgtaccctttaggtacacccaactttctcccaaaggagccattttctttgatctcagatggctgttacgtttacatctttggaactataaactgtggtggtacaaaggttggttcatggtttgattgtttacttctgaaggaaagtatattctagaaaggagaacactaatttccattacaaattggcagacagataaaatttatttgccaacattctcactttaatgttagtgtttgccttgccgccatgcccctcacattgttactctgggcagttcgtagccctttggctcttgatggctttgtgtctagtaataatgcagggtgctcaaggaaataaattcagtgtggatatactgaaaacagactccctaacaggtgtgctagagcttgaaaaggagactgcggtggatgtgtggtgtggccctatcctcagagcactctctgtcaggcaggagtcatacacttgtgatactaatttttttaggtaccattgctctattaatattcaaacaagcctttcaccttgtactcccacttctgagaattgaccctaatgaaataatctaaaatatgacaagctatggagccttccttcagatgatcttactaccattattcttactggttaaaatttgcatcttaaatatataactcaatgaatgacaaatcaatgaatgacatgtgtccgatggaatgttatacagctgttaaacaccatagtttaacaccaccctgttaaactgcagttgcagtggctcacgcctgtaatcccagcgctttgggaggctgaggcaggcgaatcacttgaggtcaggagttcgagaccagcctggccaacatggtgaaaccccatctctactaaaaatacaaaaattagccaggcatggtggcacacacctgtaatttcagctactcaggaagctgaggcaggagaataacttgaacctaggaggtggaggttgcagtgagccaagaatacaccaatgcactccagcctgggcaacagataagactgtttcaaaaaaaaaaatttttgtcaatgttaaagaaaagctaatattggcaggaatgtggtgagactgacatcctgacatacacaagcaggactggggatcagtgtcgcctttctgtaaagcacttttgcagtataaatcaggagcccttgaaagttcagaagctctatttttgtagttcttgtgctagatatctttccctagaaggttaaaaagaaagaaaaaacggggaacgttttaaaaaaatagcattatttataataattaaaatcactgggcatggtggatcacgtttgtaatcccagcactttgggaggccaaggcgggtgaatcacttgaggtcaggagttcgagaccagcctgtccaacatgctgaaaccccatctctactaaaaatacaaaaattagctgggcgtggtggtgtgcacctgtagtcccagctacttgggggctgaggcaggagaattgcttgaacccgggaggcggagattgcagtgagctaagataacgccactgcactccagcctgcatgacggagtgagcctccgtctcaataaataaacaaaaattagctgggtgtggttgtgggcgcctgtaatcccagctacttgagaggctgagccatgagaattgcttgagcctgggaggcagaggttgcagtgagccgggatcacatcgctgtactccagcctgggtgacagactgagactctgtctcaataataataataataataatcacagacaattgatgtccagtgatatggaaatgcttaagtgaatgataatacatccatactagatactatgacataatgcagccataaatgtcttaaaaaaaaagacagtctcactctgttgtccagactggagtacagtggcatgatcacagctcactgcagcctcaacctcctgggttcaagcagtcctcctgccttagcctttctagcaatggcaatgtctcatatttttttcataatatagattgcttaagaaatagtgtgacataggacaggtgtggtggctcatgcctgtaattccaagtactttgggaggctaaggcaggaggatcacttgaggccaggaatttgagacctcatttataccaaaaaaaaaaaaaaaaaaaagaagcagcagcaggtgtggcacgtgcttgtagtcctagctacttggaaggctggggcaggaagatccctcgtgttcgggagcttgagtttgcagtgaactatgatcataccactgcaatccagcctgtgagatcctatctctggaaaaaaaaaaaagagagaaagaaaaagaaaagaaaaaataacatgaagtaaaaaccagtaacaaaaattaaaaagcaaattcagcagcacattcttttagcagccagttactcttcaggtgctttccatactaatagtcataacagacttgtgagataggccctatttattgtctgttttatagatgaggaaaatggagcaggaacacagctacctgaggctgcacagctcattggagccatttatgtgattggagcccagcactttggcttcagagtccttgttcctgaccataacactctagcagagctggtcaggattcagagtacctgaaagcatgatccaattttggttgtctcaagattgtttctttttcaagtatatgaaaaaagggcagttgtgctagggtattgagagtggttttttctggtttataagattatgggtagttattacttttataagataaaaaatataaaggattttaaagcatggactagaaaagagtaagaaaatagactgaaaaataaaagtgtgattgtattgagattatttttacttcttttaagaaatattttctattatgtagataaattcactcttataagaaaacttttaaatgaattactgattacaaaccagccatcctagtaattctggaagctgatgctcgtgttgatttttccccccttgggacagggtctcactctgtcaccctgctggagtgcagtggcgcgatgacagctcactgcagccgcgaccttccgggctcaggtgatcctcccacctcagcctcctgggtagctgggagtacaggcacatgctaccatgcccagctaatttttgtattttttgtagagacagagttttgccatgttgctcaggccagtctcaaactcctgggctcaagcgatccgcccaccttagcctcctaaagtgctgggattgtaggcgtgagccacctcatccggccctcatgtcagtttttacaggagatggggatgctgctgggctttgatccctatgtatgtgcaagcaaggaaagctcagagacgcaggagggcaggaggaaaacactagccgtagttctctctggagggcaggttttacacaattactcttagctctttggttttcaggtttctcacctttctgcattagacattgatataatatttgaagcatatgaagtgtgcttgagttatttttgtaaggaaaaaaagtgttaagaaacattgctttaatgttttctatattttctcaaaagttctaggctcagaaaccttattactcttgtactagtttcttttctctctgcctccacaggaaggaagagggaatggtttaaaatagaagacgccataaaagtgctgcagtatcacaaacccgtgcaggcatcatattttgaaacattgaggcaaggctactcagccaacaatggcaccccagtcgtggccaccacatactcggtttctgctcagagctcgatgtcaggcatcagatgactgaagacttcctgtaagagaaatggaaattggaaactagactgaagtgcaaatcttccctctcaccctggctctttccacttctcacaggcctcctctttcaaataaggcatggtgggcagcaaagaaagggtgtattgataatgttgctgtttggtgttaagtgatggggctttttcttctgtttttattgagggtgggggttgggtgtgtaatttgtaagtacttttgtgcatgatctgtccctccctcttcccacccctgcagtcctctgaagagaggccaacagccttcccctgccttggattctgaagtgttcctgtttgtcttatcctggccctggccagacgttttctttgatttttaattttttttttttattaaaagataccagtatgagatgaaaacttccaataatttgtcctataatgtgctgtacagttcagtagagtggtcactttcactgcagtatacatttatctacacattatatatcggacatataatatgtaaataaatgacttctagaaagagaaatttgtttaatttttcaaggtttttttctcttttaatttgggcatttctagaattgagagcctcacaattaacatacctttttgttttcgatgctagtggctgggcaggttgccctgtcctttctctatttcccagtcattgactgtagatatgggaagagtttagctaccttcatagtgctcccaggactcatggcctttccttctttaagctgtatttccctgcccagaaagaaacaggaagaaacctttttttatttttttatttttttttaaccaagcaaggagcaaatggcctcagcccagatctgtaaaaacaatgatagaaattgaattctgccccacatgttgacagtagagttggaactggattcttgggattacttatctaaaaaactggagcatcaggtccatttctgttctgctggtttggaatcttttccgtaatgctatttattgccaacaatggcctctctttgtgtccatatatgccttacaccgtgctgacctgggtatcgtccatgtgctctgaagcatccaactttactttgcaggtgcatcaatgtagtcctgtccctgaactgagtaaccgtgttcctgaaaagtacactagggaaattcacctgcttgcttgtctttgtattggcatggcacttgtgattgcaccatggagcatgctcagagctattaaattggtctcccatctcccaccaggatatgaaaggtccatatgggaggccacgtaatcacttattacagtggttacataatacactggctcactgcagactctcttgttttttgatacagtttcgtgctggcttcatttgccaattgtgttgtttagttcggaagtaagagggtcttgagattgaggggtagggagggctacactgactgatccgtggcttaagacaggagattatctctgtactccagtggcatctccttagccaagatgtgaaattaaaatcatagttcgcctcatttaaaaattctaataaagcactcaaactttgaaaagcttttacttttccctcctactaaaagaaatgtatgtacctcatagccctgtgtcatttagtgttcagcacttttgggaacatcagttggtgaactttaaattttgctgtctactcactgggcacggtggctcacacctgtaatcccagcactttgggaggctgaggcaggtggatcacctgaggtcaggagtttgagaccagcctgaccaacatggtgaaaccccgtctctactaaaaatgcagaaattaggtgggcgcctgtaatcccagctacttgggaggctgaggcgagataatcgcttgaacctgggaggcagaggttgcagtgagccgagattgcaccactgtcgtccagcctgggtgataagagtgaaactccatctcaaaaaaaaaaaaaaaaaattttttttttttttttgctatatactcttagtttacatcctctcccccaatcttcacacacagagccaaagagcagttatattcttgggataccatgatacctctgggaaaggaattatattcccaaggagaggtcccattggataagaacaataccatgggacttgagtctgaatgccaacttactattcacacatccttcttaaaaacgaacacactgtttcttttcctgacctagagcattctaaagttctgttcaaataaataaagggcaaaataaagtagatttaaccaagtgccaggtggaattcaaaaaacacattcttccagataaattctacctttatggtatggatttgaaagtactttgcaggaaaacagtcagtactctttaaaaagggactgcagggctgggtgtagtggctcacacctgtaatcccagcactttgggaggccaaggcaggtgggtcacttgaggccaggagtttgagaccagcctgaccaacatggcaaaaccccatctctactaaaatacaaaaattagctgggcatgatggtgcactcctgtaatcccagctacttggtaggctgaagcatgagaattgcttaaacctgggaggcagaggttgcagtaagccaagatcatgccactgcactccagcctgggcaacagagtaagactctgtcttaataaataaataagaaaataaaacggaactgcagtgctaacagtaatttatacatttttaaatgttctgagtatgttttgactgggctagtgtaacaatatactaccctgaaagtgcagttttgattgttgttggtgtctttgggtcaggaaagtgaactgtgccaagaagtatttttcagtgacatgaatggattcctgttaatgcaattgactgagagattgtgcttacgctttcttaactgacaaaaagaggctttgtccaacatcagaattgttgaaactggtgctgttttctgttgcactgggattctgatgatctgggattttccctccttggcacagtaaacaccatgactgtctttattgagaatgtcgtcacagtcctttagtgatagattagttagacccatggttgcaatacctttatctccccaaagaaaataatcaaaagaaagcacaaaagctaccctgtttgcagaatatttcactgacattgatttgtcattaattctaccagagctgacctcattcaggcttgatagaaacaggttcctatgtttagggcagatccctagcctctcgctcacagtgagtctgcatgtcctagattctggttattgctggagcatccattaaagtctaccaaactcaggacagaagaagatagcagtggatttgtaaaaatttttagtttataaattacagtcattggggaaacactagtaaggtcatgtgatcttttggaccaggattttctctctgtcttctctctgggtgtgtgtgtgtgtgtatgtacagaagggctaccaggaagtgtcaaccatgttagattttctgtagtcttccagaaacagtgcagcccatacaacaggaatcttaattttcctcacagcaaatataacaggatggaacagttagtgttttgttttcacaagtgtccaccactccatctgccctgcatggagagggctctctcactgctagatctaggctgagccatctggaaggatcaaagggtgtgggagtatcaccccctctcaggctgcagaaggtctcgagggtggcgtcacagcaggatttccgccttctgcattgcactgcacagccccatggaacatgaggcacttgaggccttgcttcttggagcctctggggagcagagtaggtcactgccctctgggagtgttttgcagtagttttgtaaatgtgttgctacatagtcaagttcctttgtggcaaagaaatattttgttttgatattaggagccagcccatgtaatgcctctcaggcttgcttgcttagaagaaaaaagtcaccctttgtggtttttaagaaaaaaattctgtgcagatctgttcctcctcctgctccttcccttttctctacatacagtgctcattggaggctcctgctaaaccttcttaaccagagaaataataggtatttgttagacctgagtgtacatttcacatgttatccttcacatatttctcattttcatctagtactttcttaatgcctttgttggagtccgcatcctcatctttaaaaaaaaaaaaaaaaaaacagcttagcctaagccacattcactttttttagttcacaaaaaggatttaatagccacaatgtgatttttgccacaactgtgtgattttaatattctctaatatcaagggcggatttagaattgcaggaaatacctggagaaatcacagtggaatgaatttttgctttaagagaaatgagagttggctgtctctgtaattgataatacagcttcatcctagtcccatctgcatttcagaaaataaccctcatctttacaaaacacaggacacttgtgggacagttaactcaagcagctatggggagggaggagattattgaatggtgattaaataatgcaaatggctcttctgtttcttaaagactgtggaagaggtcagactgcccagttgaggtgggcagttcatactgctcagttgaggtggcagtcatttattctgagtcctgttggatagagcctatctcctcaaggctacagaggcttccaggatatggagctgtgcatgttaatggctcagccttgcctccatcagggcacctgcctaacttggagcaagtgggagagcaccctagagtcatcctctgtgctgtttcgtgagttttgcagcggagacttcaccatccggaggagctgtgtttctgtgtcacttgggatatcacctaaaaatgaaacatttgatattttaaggtataaaaaaaaagtaaattggggaacattggctgcagtccctaaaagatactgttgtctgtgcatcaggttagcttgaggtcaccacaggtcctgggagcccagagagtttaggcatactctcctttggaggccagcagcctttcacaaaccctgcctctaaaagggcggtttcacatttgaccatgtttttgcattagcctcagaaactcttgtctttagctgataacctttgagggatgtgagaagcctagttggagcatctgagaaaatgatacctctcaccttcaaattaatcaaatagtttgtccttctagtccccttataaattaataaatggagggctggtcatggtggctcacgcctgtaatcccagcactttgggaggccgaggcgggtggatcacaaggtcaggagttcaagaccagcctgaccaatatggtgaaaccccatctctactaaaaatacaaaaattagccaggtgtagtggcacgctcctgtagtcccagctactcgggaggctgaggcaggagaatcgcttgaacccaggaggtggatgttgcagtgagccgagatcccgccactgcactgcagcctaggcgacagagcaagactccgtctcaaaaaaaaaaaaaaaaaaaagaaaagggaagggaatcccattttgtgatgatttgggcacactacttgagctgaggctagcagtcacatgattttggctgtctctgacctgaagcttttgaagtaaggttatgtctcttccctgaagctttgtttatagtggtaatttggtgagtttgagctttgagcttgtcttagaaaataagactgtccacctggggaggggagcttatagggaacccgtgttaactcagaatgctgaagaaagtgcttttagccaacaaaagtaagattactatctagaaggtggaaagaagtcattgcttctgttcctccagcagtcagttgactctaggtttcctttggtttatatccccagttcttaatactaaaacttatttgacttcctatcaggaagcacacaaaaaaagcgtcatttaaaaccctggatataggctttaaaggatacaaaaacagcagcattgtcgttttgccaggttcatcaccattttgatgtgctacccatccttccaccctccctttcctgcccccaagcctcccagccaggccagatgtgaagattctattaatcactgtttcagagaacattaattcttgtatagaataattatctactaaattgcttattatctgtgactaccttgcagagaacatctcaacagtgcagtaaaatagctctcctagacttgagcttccagccaggcatttagatcactcttaagcctttgtggaattctgaggaaaaaaagcaagatgcctcaatgccaatgctgggccataagattctactcccctccctgtagggtggggcgcgtggctcagctttggaaaatcattttgccagtaatattgcctgtgaatccctttaagaagtcgtcctgatctgagcctgtctttctgagcactttggtgctgaattgaaaatggtaagctaaagcagtgacagatccacgtagcctctttaacctctttattatcttgccaaaaaaaaagtttctcaggttaaacctttgtctttaacctccctttgttgtggagaaaatgtgtcactaatcagtggtccaagggatatctagctttggttactcagttcctgcagcataacagatatgacttatgccagggaaggtagaggctgattatggagacacccaggaacaggaataagaagggataggtctgctccacgtagaacctccccagatcggaagttaagtcttggagagtttccaaagtgctgaagtaaaaaggagacttggagggcctttgcttaatgagcaagaggcttgtgtcctcccaagaacatgagggagttcagaagggagctatagctcacagacagaaacctgcccgctcaccccatccctcgtgactgggagcatgtttgctcagaattttctaagaggactctcccttcaaaaatccaatttgctcccagaatgttgtttagcctctgagaatctcactctttcatttccatctgtgaatggacatagatgtgttgctcagggatcagaaacatcagagtccagggcccagtggcatggtgttgcattagtagttagaaaagtaattggtcagctctactgtaaaagaaataagtatgtagtacagttttgtaaatgtcaggtctgttctattgttttgtgatctgaagactgtcaaactggttgataatcaaagaaaaggttggtggttagaataagtaaaatttcagttagaaagatatagcttaccagttttccatgtgcttaaggaagtcaagaatatttcaggttgttgagaactgttgtaaaatggaattgaagctagtgtctctcaccttcttaggtgtatcagagagaggaagtggaaggccagtagtagcatcttcatacttacttttgccagcccagcctccatttcaaagactttgtcttccatcctatccaatgacatggtcagggatgggctctgaggaggcagtgaggccccaccttggtttgctccactgtggtgtgtagtctccaaacagcttaagggtttttaagttttctcacgattacctccactccactcatctactatcagcatcagaaaggttaacatccctgggaccattctacttataaaagagatgaactagtgtgctttctccccttttccaggtgtgccatccatatacaatctcctcttggccaagttcaacaaatgtttccagggaaccccgtgggttgaggcaaagtagccaagatgtattgagttaagtttttctagaggacaaaagtatttcttgtcccttttccctcatgctcatatgttttagctgaggcgtaaatggccaagttgagtaatatctgtggaactgagacagagagccagggacccatgtacccagggaccagtcccctggggaatcacacagtggctcagactagactgctctatcccaccagaactctgctgctgttcatttccatcaggaccacccaggaaagcaaataagttagccttctcatcattaggtcacctaatctcttgggttgcaggatgagagcatatatagatctcctgtttagagagtgtgttcataattgtagaaagggatagaaaatggaataaccaagaggctgtgtcattttttaagaggatggcaaggatgacctcaaatgagctcaacaaaactgggaatccaaggaatggtgcttgtagggaaagagaggtcagttgtggtccttaaacctcttggcaccttgtgcgggttataaaacaaggagctggagtaaaattgcccttacccccaatccaaatgctgtccaggatttaggagctacccaacctgtggttatatggtgttggtttccattttttgtttgtttgcttgtttccaaaatagccttgcttggtactgcatggaaagttcaagcttttcttcttgcccgctcagggctggcctcttccccgtgtcttcacagcgtccctaaggaagatttttgcagcactctctggagctgaggggagtgaaatttggtccagagaaggcggaaggaaatagttttcctgtttccttttctcgaggtggatgtcctcaggcttccttcacacctccttctcatgggtgcggctggcagtacagtcaggctgtggaggagggctgagaagaaaggggcactggtccagccccaggtttggtctgagacaggtacacagcagataccatcccaccttcctctctaaagaacaggccagccacacatataaccctttccctactttactaatgtatcccttatgtggtaccagcaatggaggacaggcagacttaccccctgccatctagagagaatgttgttattacccgtaaaacttgaccacccccatatcccactcctttttgtaaaaacaaatgcttaaacctgtgagcctgccgttcctttctatgtgttaatcagtttccttccatttgagctgtgtgggagggaagggcattgaaattgtaggttgtaatcttgtgccaaccaataaaaaccagtatttcacacacat

SEQ ID NO: 664 - DNA, 13186 bp, Homo sapiens
aggctggagtaaaagggacattgggaagattagttggaatttttgaggtaagtctgttaaaatctttggtacaaatgatatgtattaataaccacacagatattaacataggaaaaatgccatttctgtttcagcgagtttttttttttttagttatttttaactttttgagacaaggtctcactctcgcccaggctggagtgcagtggcacagtcatagctcactgcagccttgaactcctgggctcaagcagtcttctgcatcagcctcccaggtaggtgagactacatggatacaccaccatccttctaaatttttaaattttttgtagagacagggtcttgccatgttgcccaggctggtctcaaactcctgcgtttaagcgatcctcctgcctcagcctcccaaaatgccaggattacaggcttcagccaccatgcccaacctcggtgagttttttaaagaaagcaacaccaacagagaataacatgctttaaaaaaaaaagaaagaaagaaggaaatcccatagtcttgtcccctaaactactagaattatttttaaatattattttaccccattcctacttttctttgtctcctaccaaggtaggaggaaaggtagctaagtgtagagagagagaagaaaaatagaagataagtaactataacaaagagaggaaaaacaaggaaataagctgtgatacaaatttgaaagaaggcagggaaaagtgagaaatcaggagaaatcaagatgagcagatgctgggcgtggtggctcacacctataatcccagcgttttgggaagctgacacaggaagatctcttgagggtagaagttcaagaccaacctgagcaacagagtgagactctatctctacaaaaagtttacaaaataaaaatgtcagaagaaaggtctctgatgaaaaaatagatatgtaaataaatcttttttttttttttgagacagagtcttgctctgtcacccaggctggagtgcaatggtgcgatgtcggctcaccacaacctccgcctcccaggttcaagtgattctcctgcctcagtctcccaagtagctgagattacaagtgcccgccaccacatctggccagtttttgtatttttagtagagacaggtttcaccatgttggccaggctggtctggaactcctgacctcaggtgatccacccaccttggcctcccatagtgctggaattacaagcatgagccaccgcccctggcaataaataaatttttttaaaaggtggctgggcactgtggctcatgcctgtaatcccagcattttgggaggccaaagtgggaggatcacttgagcctaggagtttaagaccagcctgggcaacatggtgaaatcctgtctctacaaaaaaatacaaaaattggctgggtgtggtggctcacatatgtaatcccagcactttcccaggcctaggcatgcggatcacttgaggtcaggagtttgagaccagcctggccaacatggtgaaaccctgtctctactaaaaatacaaaaattagcagggcatggtgatgtgcacctgtaccagctactcaagaagctgaggtgagaagatcacctaagctcaggaaggtcaaggctgtggtgagccatgatcatgccactgcgctctaccgtaggtgacaaagtaaggctctctctcaaaaaataaggtaagtggggttagtgggaaaaggggtgtgggtgggaagaggggtgtgggtgggtgtgtgtgtgtgtcacactcagcttgtttgccttgctggggtcactgaagtttgagacctctgtggtagcccacccatccacagtcctctccctggtggtctagctagttaaatttacatgatgcctttttcttctcatagtattcctgttaagttgtatttaggggaaggggaggaaaaaccaatataattacttggttttagaagtccagccaaagagcacaccctcaaattcaagtgtggcctgctttaaatcatgtagctataactgtaggaccataaaaagtaaaagtttagaatctttgtgtctgagctctctggacatatgcataagagtgtgtttcatttaagtaattccagctttctaaggaaaaactctctctatccttctctctttgcccttcagaaccaggagaggaagcacaggacgtatgtctatgtgctcattgtcactgaagtgctggaagactgggaagattcagttaacattggtaagccatctccagacagcctggaaagggttcctcacaaccagcccttgccatgccacaggtcatgaccagaaccagaaacaagagcgtaccaggctcagtggctcacacctataaccccagtactttggaaggccaacacaggaggatcacctgagcccagagttctagaccagtcttggcaacctagtaagacctcatctctacaaaaatcagaagacttagctcggcgtggtggcacatgcctgtggtcgcagcttctcaggaggctgaagcaggaagatcatttgtgcttgggagtttgaggtcacattgagccataatcatgccactgcactccagcctaggcaacagagtgagactctgtctcaaaaacaaacaaaaaaacagaacaacaagagctggataaagaatagaaataattgaaggatgtgtataataaaacaagcatgtacattttgaacctgatagtattttgaaatgtttaaatggaatctgaagtgagtacatggtccacaaatagaagcatgacccctaaaaataagaaatgttgcttctaaaatcaaactgggtccttgccaaaagggctatacttctgcacctcctgagcagatactgattgagggcctccgccatgccaggctcactgctggccatggggaccataagtgagagcaggaccctggtcttgttcctcatgacatttatattgttgagaaaactgttggtttggtggtgtgagtccctccagaaatcatttagtagatacagaatagtgcaggtggtttctagttttattcttataaaatatgaatatatctataatatatatttttatattttttcatattttatatgaatataaaaatgataaaatttatgaacttttacaaaaggtgctgtgtgtaccctttaggtacacccaactttctcccaaaggagccattttctttgatctcagatggctgttacgtttacatctttggaactataaactgtggtggtacaaaggttggttcatggtttgattgtttacttctgaaggaaagtgtattctagaaaggagaacactaatttccattacaaattggcagacagataaaatttatttgccaacattctcactttaatgttagtgtttgccttgccgccatgcccctcacattgttactctgggcagttcgtagccctttggctcttgatggctttgtgtctagtaataatgcagggtgctcaaggaaataaattcagtgtggatatactgaaaacagactccctaacaggtgtgctagagcttgaaaaggagactgcggtggatgtgtggtgtggccctatcctcagagcactctctgtcaggcaggagtcatacacttgtgatactaatttttttaggtaccattgctctattaatattcaaacaagcctttcaccttgtactcccacttctgagaattgaccctaatgaaataatctaaaatatgacaagctatggagccttccttcagatgatcttactaccattattcttactggttaaaatttgcatcttaaatgtataactcaatgaatgacaaatcaatgaatgacatgtgtccgatggaatgttatacagctgttaaacaccatagtttaacaccaccctgttaaactgcagttgcagtggctcacgcctgtaatcccagcgctttgggaggctgaggcaggcgaatcacttgaggtcaggagttcgagaccagcctggccaacatggtgaaaccccatctctactaaaaatacaaaaattagccaggcatggtggcacacacctgtaatttcagctactcaggaagctgaggcaggagaataacttgaacctaggaggtggaggttgcagtgagccaagaatacaccaatgcactccagcctgggcaacagataagactgtttcaaaaaaaaaaatttttgtcaatgttaaagaaaagctaatattggcaggaatgtggtgagactgacatcctgacatacacaagcaggactggggatcagtgtcgcctttctgtaaagcacttttgcagtataaatcaggagcccttgaaagttcagaagctctatttttgtagttcttgtgctagatatctttccctagaaggttaaaaagaaagaaaaaacggggaacgttttaaaaaaatagcattatttataataattaaaatcactgggcatggtggatcacgtttgtaatcccagcactttgggaggccaaggcgggtgaatcacttgaggtcaggagttcgagaccagcctgtccaacatgctgaaaccccatctctactaaaaatacaaaaattagctgggcgtggtggtgtgcacctgtagtcccagctacttgggggctgaggcaggagaattgcttgaacccgggaggcggagattgcagtgagctaagataacgccactgcactccagcctgcatgacggagtgagcctccgtctcaataaataaacaaaaattagctgggtgtggttgtgggcgcctgtaatcccagctacttgagaggctgagccatgagaattgcttgagcctgggaggcagaggttgcagtgagccgggatcacatcgctgtactccagcctgggtgacagactgagactctgtctcaataataataataataataatcacagacaattgatgtccagtgatatggaaatgcttaagtgaatgataatacatccatactagatactatgacataatgcagccataaatgtcttaaaaaaaaagacagtctcactctgttgtccagactggagtacagtggcatgatcacagctcactgcagcctcaacctcctgggttcaagcagtcctcctgccttagcctttctagcaatggcaatgtctcatatttttttcataatatagattgcttaagaaatagtgtgacataggacaggtgtggtggctcatgcctgtaattccaagtactttgggaggctaaggcaggaggatcacttgaggccaggaatttgagacctcatttataccaaaaaaaaaaaaaaaaaaaaaagaagcagcagcaggtgtggcacgtgcttgtagtcctagctacttggaaggctggggcaggaagatccctcgtgttcgggagcttgagtttgcagtgaactatgatcataccactgcaatccagcctgtgagatcctatctctggaaaaaaaaaaaagagagaaagaaaaagaaaagaaaaaataacatgaagtaaaaaccagtaacaaaaattaaaaagcaaattcagcagcacattcttttagcagccagttactcttcaggtgctttccatactaatagtcataacagacttgtgagataggccctatttattgtctgttttatagatgaggaaaatggagcaggaacacagctacctgaggctgcacagctcattggagccatttatgtgattggagcccagcactttggcttcagagtccttgttcctgaccataacactctagcagagctggtcaggattcagagtacctgaaagcatgatccaattttggttgtctcaagattgtttctttttcaagtatatgaaaaaagggcagttgtgctagggtattgagagtggttttttctggtttataagattatgggtagttattacttttataagataaaaaatataaaggattttaaagcatggactagaaaagagtaagaaaatagactgaaaaataaaagtgtgattgtattgagattatttttacttcttttaagaaatattttctattatgtagataaattcactcttataagaaaacttttaaatgaattactgattacaaaccagccatcctagtaattctggaagctgatgctcgtgttgatttttccccccttgggacagggtctcactctgtcaccctgctggagtgcagtggcgcgatgacagctcactgcagccgcgaccttccgggctcaggtgatcctcccacctcagcctcctgggtagctgggagtacaggcacatgctaccatgcccagctaatttttgtattttttgtagagacagagttttgccatgttgctcaggccagtctcaaactcctgggctcaagcgatccgcccaccttagcctcctaaagtgctgggattgtaggcgtgagccacctcatccggccctcatgtcagtttttacaggagatggggatgctgctgggctttgatccctatgtatgtgcaagcaaggaaagctcagagacgcaggagggcaggaggaaaacactagccgtagttctctctggagggcaggttttacacaattactcttagctctttggttttcaggtttctcacctttctgcattagacattgatataatatttgaagcatatgaagtgtgcttgagttatttttgtaaggaaaaaaagtgttaagaaacattgctttaatgttttctatattttctcaaaagttctaggctcagaaaccttattactcttgtactagtttcttttctctctgcctccacaggaaggaagagggaatggtttaaaatagaagacgccataaaagtgctgcagtatcacaaacccgtgcaggcatcatattttgaaacattgaggcaaggctactcagccaacaatggcaccccagtcgtggccaccacatactcggtttctgctcagagctcgatgtcaggcatcagatgactgaagacttcctgtaagagaaatggaaattggaaactagactgaagtgcaaatcttccctctcaccctggctctttccacttctcacaggcctcctctttcaaataaggcatggtgggcagcaaagaaagggtgtattgataatgttgctgtttggtgttaagtgatggggctttttcttctgtttttattgagggtgggggttgggtgtgtaatttgtaagtacttttgtgcatgatctgtccctccctcttcccacccctgcagtcctctgaagagaggccaacagccttcccctgccttggattctgaagtgttcctgtttgtcttatcctggccctggccagacgttttctttgatttttaattttttttttttattaaaagataccagtatgagatgaaaacttccaataatttgtcctataatgtgctgtacagttcagtagagtggtcactttcactgcagtatacatttatctacacattatatatcggacatataatatgtaaataaatgacttctagaaagagaaatttgtttaatttttcaaggtttttttctcttttaatttgggcatttctagaattgagagcctcacaattaacatacctttttgttttcgatgctagtggctgggcaggttgccctgtcctttctctatttcccagtcattgactgtagatatgggaagagtttagctaccttcatagtgctcccaggactcatggcctttccttctttaagctgtatttccctgcccagaaagaaacaggaagaaacctttttttatttttttatttttttttaaccaagcaaggagcaaatggcctcagcccagatctgtaaaaacaatgatagaaattgaattctgccccacatgttgacagtagagttggaactggattcttgggattacttatctaaaaaactggagcatcaggtccatttctgttctgctggtttggaatcttttccgtaatgctatttattgccaacaatggcctctctttgtgtccatatatgccttacaccgtgctgacctgggtatcatccatgtgctctgaagcatccaactttactttgcaggtgcatcaatgtagtcctgtccctgaactgagtaaccgtgttcctgaaaagtacactagggaaattcacctgcttgcttgtctttgtattggcatggcacttgtgattgcaccatggagcatgctcagagctattaaattggtctcccatctcccaccaggatatgaaaggtccatatgggaggccacgtaatcacttattacagtggttacataatacactggctcactgcagactctcttgttttttgatacagtttcgtgctggcttcatttgccaattgtgttgtttagttcggaagtaagagggtcttgagattgaggggtagggagggctacactgactgatccgtggcttaagacaggagattatctctgtactccagtggcatctccttagccaagatgtgaaattaaaatcatagttcgcctcatttaaaaattctaataaagcactcaaactttgaaaagcttttacttttccctcctactaaaagaaatgtatgtacctcatagccctgtgtcatttagtgttcagcacttttgggaacatcagttggtgaactttaaattttgctgtctactcactgggcacggtggctcacacctgtaatcccagcactttgggaggctgaggcaggtggatcacctgaggtcaggagtttgagaccagcctgaccaacatggtgaaaccccgtctctactaaaaatgcagaaattaggtgggcgcctgtaatcccagctacttgggaggctgaggcgagataatcgcttgaacctgggaggcagaggttgcagtgagccgagattgcaccactgtcgtccagcctgggtgataagagtgaaactccatctcaaaaaaaaaaaaaaaaaatttttttttttttttttgctatatactcttagtttacatcctctcccccaatcttcacacacagagccaaagagcagttatattcttgggataccatgatacctctgggaaaggaattatattcccaaggagaggtcccattggataagaacaataccatgggacttgagtctgaatgccaacttactattcacacatccttcttaaaaacgaacacactgtttcttttcctgacctagagcattctaaagttctgttcaaataaataaagggcaaaataaagtagatttaaccaagtgccaggtggaattcaaaaaacacattcttccagataaattctacctttatggtatggatttgaaagtactttgcaggaaaacagtcagtactctttaaaaagggactgcagggctgggtgtagtggctcacacctgtaatcccagcactttgggaggccaaggcaggtgggtcacttgaggccaggagtttgagaccagcctgaccaacatggcaaaaccccatctctactaaaatacaaaaattagctgggcatgatggtgcactcctgtaatcccagctacttggtaggctgaagcatgagaattgcttaaacctgggaggcagaggttgcagtaagccaagatcatgccactgcactccagcctgggcaacagagtaagactctgtcttaataaataaataagaaaataaaacggaactgcagtgctaacagtaatttatacatttttaaatgttctgagtatgttttgactgggctagtgtaacaatatactaccctgaaagtgcagttttgattgttgttggtgtctttgggtcaggaaagtgaactgtgccaagaagtatttttcagtgacatgaatggattcctgttaatgcaattgactgagagattgtgcttacgctttcttaactgacaaaaagaggctttgtccaacatcagaattgttgaaactggtgctgttttctgttgcactgggattctgatgatctgggattttccctccttggcacagtaaacaccatgactgtctttattgagaatgtcgtcacagtcctttagtgatagattagttagacccatggttgcaatacctttatctccccaaagaaaataatcaaaagaaagcacaaaagctaccctgtttgcagaatatttcactgacattgatttgtcattaattctaccagagctgacctcattcaggcttgatagaaacaggttcctatgtttagggcagatccctagcctctcgctcacagtgagtctgcatgtcctagattctggttattgctggagcatccattaaagtctaccaaactcaggacagaagaagatagcagtggatttgtaaaaatttttagtttataaattacagtcattggggaaacactagtaaggtcatgtgatcttttggaccaggattttctctctgtcttctctctgggtgtgtgtgtgtgtgtatgtacagaagggctaccaggaagtgtcaaccatgttagattttctgtagtcttccagaaacagtgcagcccatacaacaggaatcttaattttcctcacagcaaatataacaggatggaacagttagtgttttgttttcacaagtgtccaccactccatctgccctgcatggagagggctctctcactgctagatctaggctgagccatctggaaggatcaaagggtgtgggagtatcaccccctctcaggctgcagaaggtctcgagggtggcgtcacagcaggatttccgccttctgcattgcactgcacagccccatggaacatgaggcacttgaggccttgcttcttggagcctctggggagcagagtaggtcactgccctctgggagtgttttgcagtagttttgtaaatgtgttgctacatagtcaagttcctttgtggcaaagaaatattttgttttgatattaggagccagcccatgtaatgcctctcaggcttgcttgcttagaagaaaaaagtcaccctttgtggtttttaagaaaaaaattctgtgcagatctgttcctcctcctgctccttcccttttctctacatacagtgctcattggaggctcctgctaaaccttcttaaccagagaaataataggtatttgttagacctgagtgtacatttcacatgttatccttcacatatttctcattttcatctagtactttcttaatgcctttgttggagtccgcatcctcatctttaaaaaaaaaaaaaaaaaaacagcttagcctaagccacattcactttttttagttcacaaaaaggatttaatagccacaatgtgatttttgccacaactgtgtgattttaatattctctaatatcaagggcggatttagaattgcaggaaatacctggagaaatcacagtggaatgaatttttgctttaagagaaatgagagttggctgtctctgtaattgataatacagcttcatcctagtcccatctgcatttcagaaaataaccctcatctttacaaaacacaggacacttgtgggacagttaactcaagcagctatggggagggaggagattattgaatggtgattaaataatgcaaatggctcttctgtttcttaaagactgtggaagaggtcagactgcccagttgaggtgggcagttcatactgctcagttgaggtggcagtcatttattctgagtcctgttggatagagcctatctcctcaaggctacagaggcttccaggatatggagctgtgcatgttaatggctcagccttgcctccatcagggcacctgcctaacttggagcaagtgggagagcaccctagagtcatcctctgtgctgtttcgtgagttttgcagcggagacttcaccatccggaggagctgtgtttctgtgtcacttgggatatcacctaaaaatgaaacatttgatattttaaggtataaaaaaaaagtaaattggggaacattggctgcagtccctaaaagatactgttgtctgtgcatcaggttagcttgaggtcaccacaggtcctgggagcccagagagtttaggcatactctcctttggaggccagcagcctttcacaaaccctgcctctaaaagggcggtttcacatttgaccatgtttttgcattagcctcagaaactcttgtctttagctgataacctttgagggatgtgagaagcctagttggagcatctgagaaaatgatacctctcaccttcaaattaatcaaatagtttgtccttctagtccccttataaattaataaatggagggctggtcatggtggctcacgcctgtaatcccagcactttgggaggccgaggcgggtggatcacaaggtcaggagttcaagaccagcctgaccaatatggtgaaaccccatctctactaaaaatacaaaaattagccaggtgtagtggcacgctcctgtagtcccagctactcgggaggctgaggcaggagaatcgcttgaacccaggaggtggatgttgcagtgagccgagatcccgccactgcactgcagcctaggcgacagagcaagactccgtctcaaaaaaaaaaaaaaaaaaaagaaaagggaagggaatcccattttgtgatgatttgggcacactacttgagctgaggctagcagtcacatgattttggctgtctctgacctgaagcttttgaagtaaggttatgtctcttccctgaagctttgtttatagtggtaatttggtgagtttgagctttgagcttgtcttagaaaataagactgtccacctggggaggggagcttatagggaacccgtgttaactcagaatgctgaagaaagtgcttttagccaacaaaagtaagattactatctagaaggtggaaagaagtcattgcttctgttcctccagcagtcagttgactctaggtttcctttggtttatatccccagttcttaatactaaaacttatttgacttcctatcaggaagcacacaaaaaaagcgtcatttaaaaccctggatataggctttaaaggatacaaaaacagcagcattgtcgttttgccaggttcatcaccattttgatgtgctacccatccttccaccctccctttcctgcccccaagcctcccagccaggccagatgtgaagattctattaatcactgtttcagagaacattaattcttgtatagaataattatctactaaattgcttattatctgtgactaccttgcagagaacatctcaacagtgcagtaaaatagctctcctagacttgagcttccagc

SEQ ID NO: 665 - DNA, 187 bp, Homo sapiens
cacgcctgtaatcccagcactttgggagactgagatgggcggatcacgaggtcaggagatcgagaccatcctggctaacatggtgaaaccctgtctctactaaaaaatagaaaaaattagccgggcgtggtggcgggcacctgtagtcccagctacttgggaggctgaggtgggagaatcgcttgaa

SEQ ID NO: 666 - DNA, 23071 bp, Homo sapiens
agtaaggaagtgcttttgaatgaggtactgagggccaaggtgttggaagttcctaattctttcctcggttaactgtgaaactctgcgtattgggaaggcctggcctcagtcatcaggccaggagaggtactggacgccgcgcacgcactcgtctgccagcgaggcccaaaggggaagcctagcggagctcagtgtggcagctgctggcctctgggccggtaagaattgatggtcccctcccttattccccaggcccaaagctttgacccagttagtgcctgctagtttcgtgtgcctggcttgtgcctttggcgcggaacgtttgggagactcggccttgcggtcttctgacctcacccaccacgtacctagcttggcactgggtccttcatgcctctcactcgcttcctctgaggcacctgggtactctcttgtctcttacccgcttaatctgagtccatgtccaagttcatcattctgtgtctgaccgtgtcccagccaccggaagagaagaaactccgggtgtgacattaatcccactgggggctcgggagaactgccttctaaaatcagagactgtatccatttgtctggagagaaatgaaaaaaataaggacaatgtagggaggtattttaaaggtaaatttatttaaatgaagtgatagtgtcattacttttcctgtttgattttaaatagtctttagctgaacgatgacctgtagtaggaaggtggtggcgaagtgattgctttttttaaaattatttttttaacacttttatgtcagtagtcagtactttatttgtccataaaatccaaaaataactacctttggattttacagtagtctttgactgaacctcagagagatgagattccttacccaaaatgatgaatctgaaattattacccagttctcttgactctggaataagtgcttttttctactataccacttctgcttttattcttggggctgagagtacaggctgtggagcacgacggggttggcattttggcttccacctttttctgcttgtggtgacctgtctgagccagaatttctttatgtgtagagcgataataatagtacttaaattacaataatagcacttaaatagcacttgatacatgtaagactctaagtttacagtgttaaactctacttgtaagatgtgtttatttacctcctcaatataatcagcttcagtattcagtatttagatatatcagttgataaataggtttcttctcttcatttttttcttacctgatttatcttacctggacaattttttaaacgttattttttctccaccttgggccagagacattttttgaaatattttatttttaaaattacttgtattcattattattgcctttttttaaaaaaaaataaatgaaattttggttgatatttataaataagtttttgtatttgaggaacagtaagtacattgaaaacttcttcatcaaaataatccagcgttaaagaccaagtaattgtctcaaatcattttatgaaacacattttttcttcaaatctttgaaacctaatgttatgttcttttctagctacttgtcaataccatgctttcctgtaatatttgtggtgaaacagtaacctcagaaccagacatgaaagctcacctaattgttcacatggaaagtgaaattatatgtccattttgcaagttgtcaggtgtgaattatgatgaaatgtgttttcatatcgaaacagctcattttgagcagaatacacttgaaagaaactttgagaggataaatacagtacaatatggaacttcagataacaagaaagacaacaccctacagtgtggaatggaagttaattcaagtattctttcaggttgtgcatctaatcatccaaaaaattcagctcaaaacctgactaaagatagtactttaaaacatgaaggcttctattcagagaacttaactgaatctagaaaattcctgaaaagtagggaaaaacagtccagcctgaccgaaataaaaggatctgtttatgaaacaacatacagtcctcctgaatgtccattctgtggaaaaatagaggagcacagtgaagatatggaaactcatgtgaaaacaaagcatgccaatcttttagacattccattggaaggtaaagttttcatttcattataaattataagtttacagcctcaatttaatatgtggtattttaaaagttggtttgtaagtcagcttactacagatgtgttttgaaatccattttatgtctataacatttttcatttgctgttactgaaatataaaagtacattatggaaaagaattttaatgcagatataaaatgtttcagctacattgagagtagttttggaactttctgtctagtttccagagggtattctttttattgtcactaacccagtagcatctggactgtcctggactctctgactttgcattgagttctattttgactccattattctgttatgattggagaacaaactctctgtgatatcagttcttttaaatttgttgaggcctgttttatggctcaagacacgagctatcttggtcatgttctgtggatacttgggaaaaaaaagtgtattctgctttgttgggtggaatgttatatgtatgtcactagatcctgttgtttatgttcagattatttatatccttgcttgttttctatagtagtactgtctagtagttctatcaatttttgagaaggggttgttgaaatccctgattataattgtaaatttatctatttttcctttcagctctgtcaggttttgtttcatgtattttgagactctattgttggtgtgtacacatttaggatcttatgtctttttcttattgttgaactttaagaatttgtggagccaggtgttgtggctcatgcctgtaatcccagcaagttgagagtccgaggtgggcagatcccttgagtccaggagttcgagacgatcctgggcaatgtggcaaaagctcgtctcttcaaaaaaaaaaaaaaaaaccaaaaaactagccaggcctagtggcttgcgtctgtagccccagctatttgggaggctgaaataggaggatcacctgagcctgggaagtggacgctgcagtgagccatgatcacactactgcactccgcactccactctgggtgactgaataagaccctgtctccaaaaaaaaaaaaaaaaaaaagaaaaatttttctgtattttggatacaagttcttttttggatgtgtattttgcagatattttctcttagtctgtggcttgtctttttattcttttaacagtgtctttcatgaagtagaagtttttaattttaatgaagtgcaacttgacaatttcttctttcatggatcatgcttttggtgtgtctaaaaactctttgccaacttctagaagtttgatagttttgtattttacatttagatctgtgatacatttgaattactctatgtaaaaggtatgaagtcagtgtctacattcttttttaatgcatttctctgattatgaaatcaatctttttttgtatagttattttaatttcctctattatgaactgcatattacattttttgtacacttgagttacatgcatttttcaactgtatattgtcaaatattttttgagtttttttcagttgcttttaaaatatattttcaatactaatccttcagctgtattccataagatgttgcttatccttgaattttgtgcagtatttgaattttatttttgttttctatgtattgtctaaaaaagtattctttactctgaattcaaaaagctattctcatatattctaaaaactttaatgttttatattttcactttttaaaattttttctggattgtgtgtgtgtgtgtgtgtgtgtgtgtctgtacttgtgtacatgtgtatattttgtgaacttgggatctaatttttagtttttccctgtacagaaaccagatatatctctgatttataatatggtttctgttttttattacattttcatatctgtgtgggccagtttctggtctcttacttctgctgtatttatctatgtgacttttgttcccttattacaccaccactttaatagctattttgtaaaatgtcatcaacatcagataggacagtttttccctcgttcttcattttcatcatcaacttagaccttctcattctttcttttctttgagttttaaagccatattatcaagtttcataaaaactctgttgtcattttgttttaaattagatcaaagtacatctccccattaattcaggtcatcttttgtatcctttaatacaattttgtgtgtgtgtgttttttttttttttgatggacttttgccctgtcacccaggctggagtgtaatggcacgatctctgctcactgcaacctctgcctcccaggttcaagcaattctcctgtctcagcctcccaagtagctgggattaccactgcccaccaccaggcccagttaatttttgtacttttagtagagacagggtttcgccatgttggccaggctggtctggaactcctaacctcagatgatccacctacctcagccccccaaaatgctgggattacaggcgtaagccaccgcgcccaggcttgtgttgttttttcattgcacatttgtgttagctttatttctgtatagtttatattttctgttgcttttgtaaattagatttttttccctctcatctaagaaacttttgcagttttatagaaacactatcaatttttatagatagttgaggtatctagtcttattcaactattactaatattattttattttatattttttgagacaaggtcttactatgtcacccaggctggagttcagtggcatgatcatggctcactgcagccttgatctcctgggctcaagtggttctcctgcctcagcctcccaaggggctgggactacaggcctgcaccaccacgcccagctaattttttttttttaatatttaatagaaatgaggtcctgctatgttactcaggctggtcttgaactcctgtgctcaagcagtcttccttcctcagcctcccaaagcattaggattgcaggtgggagccactgcgtctggcctgttaacgaattttaataattctacattaattcccttgagtattctaagtagatcattttattatctgctaataatgaaaatttatggactgctgcaaggaaaaaaaacaagtgtattgaaaaatgcctgacaatcctttgctgacacaacatttcctgtaagtttctcaggaccagtaaactggtgaattttggtagtcttaggagtctgaatgtttagttgcggttaaaaaagacctgttgtcattagaagtacagaagtgaaataggtaaatagctagatttaaccaatgttcagttatagtaaatggaacaggtggatttgcaggtgtttttaagggaatgattatcatatagagaagatatgtggaatctgggctggaaagtaaagaaaaacatgaggggggtaatgaatgacagaaaaatagggtttgtatattctatataggaggttttagttaggtcaaacactttttagagtggtagaattaaaagaagtgaggtagaaggataggtgtttgggagtgatatttgaaattgagatttcagagattcacttagtgataaattaagggtataatttttgtcattcggttggtaaattagggtaaaggaaaagattgttggaaatgaaggcatagaactatttctatggatattgaagttgctaagaatgatcatagtataggggctaggaaaagaaggttttgatccaggtgttaacatttttagtaaatgaaaggagtgtctaagacttcagaaaatattaggcactaagaaaggtagatgatgccatattatggtgacatgagttattacaaaaatggggcttaaaacaggtttgacagtggtgaaagggagcaaaggggatgcctcttctacttctagggccctgaattgtgaaagaaaagttgcctgtgtgttagggggctgtagagaaaatggggtgtcatgaaccaaccagattttagttaagtcaagaaggtgaagtgaatatccagagaaagattttgtgtatagagaagctgactgatgaccgatggtatttctgagggcattgtggtaggtattgggagaataggaggggtaatagcttgggtcagattagcagatgtccttcaggtatttaaagattgttaagacactgccactgaacaattagattggattcattgacacaacagtgttggtggttacatcagccctagatgactccattggatgatgatggctaacctctgaggcttagtttagattctggtggtaaaaaatgtatactgggatatgaggtgtagtgtggtctaatgttgaggaaggttggttatcacttaaaactagaaggggtggagggattggcttgcagtagtgtgatgatcaaagcgataagcaaaggcctccttggcattggctctggctctaaggcattttatggtagagaactggctgaaagacttctcttacatccgccagcattacttatggaagctgtataccattatttcttactgctgcttttggaaatattttctgagtacttaatacttcattttctcttgagctttgccattgaattttttattccaatgattacatcttaatattttcattttcttcatctttctattttttcttagtaactttctgtcctggtttcaaagattcagttccctcctttatttcagtgagcattttgaacatacttattttacagtttattatggattactgtagctccatttcttcacaggtaactttttcagtttgtagatttcttagctgtttttcttggcattgcagcccccagtgagtttagcaattcaaattttagtgttcatctgttatgggagttttatatgatcccttccctgtgaagcagtttcatggttccttcacactggctgttcacagtctctgctttcagaccaggccttacatatacagattgctctatgctttcactctgtgtatatgcacaattctgggtccctcttctatgtcccttatctgctaggtcttggtcttatagaggaacaatttctgtttttggcaagctagacctgtctgcctgcagtgctatgtgatggatgcagctctttaatctcctgctcctgtgtagacagtattaccccaattcccagctttatgctggatgtttaagttcagcaccttaccactctgttgggtgctgagaatttagtcctaaaaacccatatccagactgggccctacttaccactttggttttcctttctgcttctcttgttttgactacagatctgaatatttattattaatatttcctttttttttggagtggtatgagaggtttgtgctatgctcagccttctatctcgaccctagaagtagaaaaatagcttttaaatccactacaaagagcttttacttatataaggttaataggtggtagacagtctttgacatggggtgaaaaaatctaaaagttataaaaataaaaccaacttggctgggcatggtggctcatgcctgtaatcccagcactttgggatgctgaggcagaaggatcacttgagtccaggagtttgagaccagcctggacgacatagtgagatctcatctctaaaaaaaaaaaaattagctgggcgtggtggcgcatgcctttagccccatctacttgggaggctgagatgggaggattgctgcagtgagccgtgatggtgccactgcacgccagcctgggcaacagagtgagaccctgtctcaaaaaaaaaaaaagcaaagaaaaaaattaaaataaaaaaataaaaacaacttaattatatctctgatacagactgtgatcaaccactctatgattgtcctatgtgtgggctcatatgtacaaattaccatattcttcaggaacatgttgacttgcatttggaagaaaacagctttcagcaaggtatgtttatatgtttgaagataaaaatatcatttaatttctactttctaggacacatatctaatttttagatttgtgatatggaaaaaatattttaaaatacatcttttcctttaaaagtgttttatttacaagttgaggccatttctttagcagctagaagtatctgaatattgtatttggtcagcgaaaattgttgaactagaaaactgccatatggcacataaaattttacaaatgaatgtgaactatataaccaaaacatctttcagtgcatcttgagctgcttgaatagcttctaaatgacttactggttttattgtgattctataaaagttttcctttctcccctatgttttttaatagtggcattgtttaaataatcattatggtggcttagaagtggaaaaatcctatatgaatgttagaagcccactgaacgaaaataaaaagtagatcccaagagaaaccaattgtgttttaccctatttcagttttttaaggtacgtagatagcttctgttaaggcagaggtctttagtgtccagtatcaatgatcctagtaccagtatcggtgttcatggacaatgttactgctcactcaccctaagccaaatatgagattattggggcaaagatggaaaagttccctgctctggtggtttctgaatgtctgctaattcttactcttatttatgataggctttgtatgagcacgtatattacagtgtaaacctatagtgggtaataagaaaaagatatggtctaagtaaatcactgtagataacctcaggggacactaaacattgagtgtgacttgtatatccccaagaatggaagggtgaccaaataggaagatgtagcagcagctgagaactttgaaaggaaaggaagaatagtcagtgatataattaaaccatcaggtcatggggttaaggagacaagatagtggccagaagccactgacaaatggatctgggggacaccgagtagagaagatgcaggatgagatgttgcaaagttttaccatttttgggggccaaactgtaattaaattattatctaacacctgcactttgtaaatgtgtatttttatgctctttatttttttttttttctcccctagtatttctttgaaaaatcaatctgccttagttatgttaaggagtatcaatgcaggatgttacttaacgttttaaaattctggtttcctcagtaaataataataactacttcataagattgttacaaagatcaaatgatataattaatgaaaagtgcttgtcacagctttaaacacttagtgaggctgggcatggtagctcacgcctgtaatctcagcactttgggaggccgaggctggtggatcacctgaggttaggagtttgagaccagcctgaccaacatggcgaaactccatctctactaaaaatacaaaaattagctgggcatggtggcaggcacctgtaatcccagctactcaggaggctgcagcaggagaatcacttgaacctggcaggcagaggttgcagtgagctgagatcgcaccattgtactccagcctgggcaataagagcgaaactccgtctcaaaaaacaaaaaacagtgactgttagttgtcatttagatggaggttattccttaccaaagcagttctaagttttgctaaatttgtactcagttccatatcatcacagtcatgaataaatggcaaataacagcatttactctattttaaaaacatatattaaataataaataatctttgattgcaacagttattttattctgaacattaacaatacctaacaggcatggatagagtccagtgttctggtgatctacaattggctcaccagcttcagcaagaagaagacagaaagaggagatctgaagaatcaagacaagaaatagaagaatttcagaagctgcaggtacaaagattaataacaattataatattttgatttggtaaagttatttttcaaatatgctttccagtgtattatttttgtccttgttattattcaaaaaaaatttatacatgtttgtaacagacaccatttataaatattcattctagtgaggcacaggggtaatcacttcacatacaatatctcaaaatctttgcaacatattcatgaagaagttactttaggccctcccacgcccccttttttttcagatgaagaaatggagacagagaatggttaagtaatttgctcagtgtcaggcagctaattagtgataaagcttgcattcaaacctgtgtaagttgatgggacaaattaggaaaccaagactcagaatttaagtgtttgtatagatgcttggaagcgaaatttatacttagaattaatgtctcctgagtcttaaattattttacagattgcaatttcaaacatttacaactattttatgggaaaatgctttttttaaatgatatttgaggcttcatttatcttaggtgggtggttttacctgttggactaaactggtagcatctgttatatttttaatgcatttaaaattttaatgtctgtttttccttttttcagtcctaatttgtagactgtagtgttatctgtgctaataatgctcatagattcatagattttgttgttgttgtttgtttgtttgtttgagacggagtttcactcttgtcgcccaggctggaatgcaatggtgcaatcttggttcactgcaacctccgccttctagggtcaagtgattctcctgcctcagcctcccaagtagctgggattacaggtgtgcaccaccatgcctggctcatttttttgtattattagtagagacagggtttcaccgtgttggccaaactggtcttgaactcctaaactcaggtgatccacctgccttggcctcccaaagtgctgggattataggcatgagccaccgtgcctggcctattgcttatagtttttaaatgttctttttttagtgatgataggatagtgcatacataaaaagggtttacagttgaataggtttgaaagtgttcagttaaacaggtttgtatactttgggacttctcaaagcctttaatatactaatgtgcatgtacatatcacaatttccccagacttgtttgacctctctttttttctcagacatctcacatgagtattgttgcttagaatgtgctttggaagacctaatgtaggatttttttctcactggtgactcacaatacttgcaaaataggaaagaaaattggcttttcttaagacttttatgccttatgtaatttaaaacatgatcaatacaaaaagtttccaatatttaaggaggttatgtaattttgcaagttagttgtttagatctcagaaaatttttctgtagaaaagtttccgtgaaaacttttccatagacaatttttccatagttttatacatactatttgagatttctgtccagtgtacaaaacatagttcatttactgtgtaacatgactgactaaatgaattatggattaagtaggcctttatggactagactgggaaccaaataacaaggactgacaagtttccttgaaaaaatcagcaatgcattcagaactcttctgcatctcccaatacctgaggtagaaagacaggatcctctgctttccctactacaggaaaagcaagtctcttgccctggagattgattataaagaagtggttgcttattaagtcaataatttttttttgtgtgtgtgtgtgtgtgtgttattagtttttgtaaaaatctttaagttaacttgtataaagtctataaaccagaatgtttcaacatgtttccaaataaaattttaataagtttccatcctcatagagttacagggatgtaaaaattaagtcatttatttttatgttcaatagagacaatatggtttagataattctggaggatacaaacaacaacaactacgaaatatggagatagaagtaaataggggaagaatgcctccatctgaatttcataggagaaaagctgatatgatggaatcattagctcttggttttgacgatggaaaaacaaaaacttccggtgagtatttaaacatcagagtcattgttttaatattgcttataccactgaagtaataatcagaatcattttaattttgcttaattttcataatctgtgcacaaatatttttttaaaaatgtattgttttaaaacttctgaattatttttatgataaataattcacttaaaaatttacttttatattatgttacttgacatttaaaaagctatgctctagagagtgctaagagaaatataatgtgagccacatatataattttaaatttcctggctccacattaacaaaagtgaaaaggaggctgggcgcggtggctcatgcctgtaatcccagcactttgggaggctgagacaggcggatcacctgaggtcgggagttcgagactagcctaaccaacatggagaaatcccatctctactaaaaaaaaattacaaaattagctgggcgtggtggcacatgcctgtaatcccagctactagggaggctgaggcaggagaatcgcttgaacccgggaggcggaggttgcggtgagccgagattgcgccattgcactccagcctgggcaacaagagcgaaactccatctcaaaaaaaacaaaaaaaaaacaaaaaaaagtgaaaaggaacaggggaagttaatttaaatagtttaaaccagtgtatccatgatattattatttcaacatgtaatcaacattaaaactattactgagacattttacattgtttatacattcttcaaaatccattgtgtattttctacttcacagcacaactcaattgggcagccacatttcaaattctcgatagccacaaatggctattggctattttattgtttgtacatttttagacactaacaactctatatacattgtatcatttaactcaaaacatcctctcctgtactgttatatattccaaatgaggtcactgttgcttagagaagttacagtgactttgccaaagcaaggttacacagctggttattcctaatcaaatcttccttgccccataatatggcttttttctgatgagtattaaaatttttttctttgtatatattagtatattaacagactttttatggaaacaactttgttactgtcacccagattttttgaatcttaatgttttgccatatttacttaaaagtttttaaagcttcaacacctttgataggtattcaaagccctttatgtacactttttctaattctaatttgccctccccacaagggaactattatcccaagtttgatatttatcagtctcatacatgctttagtactcttaccatgtatgtacatttccataaaatattttgcaggtgtttatatataaatgggatacaacatgtatgctataaattgttttgctcaaatatattggttcttacagttctacttcattcattttagctgctgtgtagtatttccttgtatgaattgtagctaacttatcttgttttcatattgataaacatttagattgtttccagttttctactcttataatttatgaacatgtctacttcaggagtttctctagtattacatccagaactggatgtagctaattatagctaacttatcttgttttcatattgataaacatttagattgcttccagttttctactcttataatttatgaacatgtctacttcaggcgtttctctagtattacatccagaactggaatgctaagttaaagggcgtgcaaatcttcaacgttgttaaggttattatagaattgttttccaaagtgcttgtaatctacattcacaccagtgtatttcacacatagtatggtgacacttttaaatttttgctatttaacaggttatgagatgatacatgttttaatttgcattttctggattactcctgagttagtttcctcttgaacgaattacctgttctcttcctttctctattctctattgagttgtttgttcttactgatttataggagactgttaagtattcagaacactattctttcattagttatatgaaatccaaatatctttttcaggcctgtggtttgtgtttaaatgttatatatagtgcctttaattagacagaagttttgaatttgaatgtaatcaaagttctcaatctttctatttattatttgtgtcttaagtaactcccccatctttaagatcacaaatatatacctttatgttttcttcaaatatttatattttgcatttcatattttgattttaaatccacccagaatttatttgcatgtgtatgttggagggaggagggagaagataggaatctgattattttctccttgtttataacagtccttatagcaagtacatattatgcttatttatttcactaccatttattgaatctgcattttctccacctatttgtgatactatatattatagattttcatatatccatgattctgtttctaaaggctgcctttatatttcttcaggggtctccatgtaaaaaagttctcactatagcatagagcatcctccagatgtgtgatatgattcattaggatacaggaagaaaatattaaatatgtctgtaaaaaagcacactgtcctgtaatatagaagtgatttagtggcagagatttttatttttcgttaattatgcaagtgttaatttaagcagctatcatttaaagagtcttcacttatatactgcaatcttgttataattttaacaacagaatataatttaactgaagataaatttactgtggaaaatatctaaagacatttaggtgctaaggaataaaaagtataaggaaatttccccctaaagcagttgcatgatgttgctaagacagtgttgctctccatctgatatgtaacatatatactaaaatgtactagaatgtttattactttcctttctattttttctgtcccctactccacctcattcttaaagggctgcctcaaatcttgatctcttcatcaaagtctatgatattaaaatctacatttagctttctttctctgaattcctagggtacccattcattccatgctacaacatttagtactcagttatatactattttaattgttgtttttcttgaattcaagtctttctaagttctttggaagtggttacagtgatcagtatttcaccttttcatggtgcaaggcacagctacaactattggttcatttaactgtttttatttattgatcttttattgtctttattaaagacaaaaacccattttcttctaggaaacccttcattcaagcaaaaagaatttagttattgtctttggtgccacatgctatgagaaagttatggggcatataataagatctccctacccataggcttcacagagtctgtagagtatgtaaatatacacaaagaattatagtattctgtgactgaatgttgctggtaccttggggacacaaaaatagggtagaatcagaaaaagggtctatgaagacagtagcatgtgaaggatctataattttgaaacataaggagaatatactaaaagcaggaaaggggccgagtcagatgtcccttgtcctaacaccttgtttttccatattatagcacttgttatagttggggtcgatgacattttaaaggatattatcatatttatctttttgtacttagcatttagatagtgccaggtgtattaaaaagtacttagcaaatactgaatttgaaaatttaataaaactctatgggccaaattatgtttaatgtgttcagttaggccacagccaaaattacagcaagaagagtagtgtgaaataaagataagacagtggatagctttctgtagacttcatataacatagattagaactattctaattaggtttataaggctattaataagattcctaaacctattgttctgccttaagaaaagttgtcttctgttgtctcaaacaaattaattaatctccccaaatagcaaaatggaatatgttactaaagggttgaaatttagcgtattggagtatgagatatgtttattattcatgaagtcaagagtttttaaatgaaaacatttgtgtattctcatgcttcgaaaattgcaaaatctgcaaaataaaatcttaaattacaaaaaaattaaaactattggtaatagggagctattaatattttttgattgggagcaaattgattaagactgagtgatctccagtagtctatacaataaaatggagacacaagaagaacattcattcaacagttgtactttatgtgctgggccctgcagatgcagaaaatttcaatgaactgtaataaataatatgctagtgttaggaaacttggactgtagtaacaagcaaggacacaaactaaggttatagcaagaagaaggtgaagaagatggaattaacaggatttaggtatggtgcgtgaaggagaggttgatattaaaaatgtatgagatagcaatataaaggtgataatgactgcttctgaatctcttttctactttaggaattattgaagcacttcataggtattatcagaatgctgccacagatgtgagacgggtgtggctttcttcagtggtggatcactttcattcatctttaggcgacaaaggttggggttgtggttacagaaatttccaaatgctactttcatcattattacaaaatgatgcttacaacgattgcttaaaaggtatgtgaaatctagtactctgaacttgtcatctgataaaatacatatgatatagaatgatatagcatacacaattaatagctttaacagttagtggatatttatataagaaacctgaattctggttagaggaagagaaaatgatagaagatgtcaggaataactgtcttaaaaaccgtaaagttccccgagtacataatacactgctaaatattattcagtactttattaacagtcatgtaacatgtttgcttgtgtaattttaggtatgttgattccttgcattccaaaaattcaatctatgattgaagatgcatggaaggaaggttttgatcctcagggggcctctcaacttaataacaggttacagggaacaaaggcctggattggagcatgtgaagtatatatactcctgacctccctaagggtaaagtatgtaccttaaaacctaaataaatgttatttccttatcggggagctttgttttgtaaaattttattttttagcaaagagatagtttaaaaataaaattaagtagcactaaattaagtagcaatgaaaatcagcagcctattcactatcttgtgctcttctctaccctcaagttctgtctctcagaggcaactgtcacttccattgtttttaaatggtatgctttcatagctgtttcttggtttatgagtttcagatagtctgttttaatatcttatacctgtttaccttcaatccttctgatatgattaaatcttggtttttattaaaatcagagtttacatcattttataaagtcagattttattatacaattgtgtaaatattgcttgttgctgattttttctaaaatcatttataatttttcttgagttaataattgtgtttccttttctcttttactataatatgtgacgacatcatggcctcaagtttttgcactctacctgtcatgtaatctgaggctctccttattctcggacacatccttcttgagcattctgtcctctttgctccaatctggactttttgccttctagatctacagctattgtcatgtagcattttttcactgttttgtgtgtgtgtgtgtgtgtgtagtctcatttttaaaatgtataacctatttattttctgtggaagttattccaaccttctcttagcccatcataatttcacgatattatgaaatttcaccatggggtgtggggctttgattcattgtgttgggcatttgtttttctctttgaatctggaattgtgagttgtctaagatcttagttccatctaggatagtaggtaagagcttgaactttggagcgagactgcctaaccttgattcatagctttcctacttaatagctgaatgaatgaacttgtctgtacttaggtctactattgataaaagaaggtattaatagtagttagacaattaaatgggataataaagtacttagaactgtgactggcatacagcatgacttcagaggttaactattgttgtttgataattataatgtctctgttttctttgtggaactattgatagttggccactgaactaatctttttttttttttttttttttttgagacggagtttttgctgtgttgcccaggctggagtgcagtggcgtgatcttggctcactgcaagctccgcctcctgggttcaagcgattcccctgcctcagcctccctagtagctgggattacaggcttccgctaccacgcctggctaatttttgtatttttagtggagacgaggtttcaccatgttggccaggctggtctcaactcttgaccacaggtgatccacccgcctcggcttcccgaagtgctaggattacaggcttgagccacggcgcccggcctgcttctttaccttctaagtttatcatgtctcttttttaaaaatctttgctttttctctattttctagatttactcaactttatcccccaattactgtattgaaatttttattttacccattatgttaaggggtaatttcatagcatcattttctttatggttgcaaaatttcttccaatgttttctttctattgcctgcattttgtttgttcgatattagtattttttcatatctgtttgttttagtcttttctattttgaaggctttcttttaattttggaaatccttagttgtccattcagagagtgaagaatgaaacattaaaaagctgattagagtgctgtaggactgcacagagcttgcagattagcagacttatttaaaagtcttaggtggaaggcggaaggttactatttggttggggaactctcaaatatcgttatatagagagatcttttcccagaagttatccagagaagagtttttcactctcttacctagagttcctacattagtggaggggagagttaaggtgtgatttgccttctaagcaaacttttaattaatctcatatttttagcctcactgttctcaaaccttatgcttctaagctttcagcctctctctgattttgaaacatacggtctccattttcttttatttacttttatatgttctctgtggtgctttccattttctgaagatgtgagctcttttcctgtctattcccattctctttgtccttgggtgtttaaatcattttttccttcagtattatgtcattgggtttttaagaggaaatagagatagatgtctgtgatcgtgtttaatggaatgtttgcgttaagctttatggctttatattttcttttatgtttgtttctaagttatttaaccagtgtatcacattctttttaccacattgattgattagattcagaaataaaaatatttctttcattaacatagaaaaactaatgttgtgtgtatgtataataactttcttgaattatttaaagaactattttaatgccctctaaatttattcctgcttttctcctttttctttttgccaatgtgttcacactttgagattatttatactctatcatgttttgagttttaaagtaatttttttctttttctttttctttttttttttttgagacagagtctgtctccagtctgtcacccagaccagagtgcagtggcgcgatcttggctcactgcaacccctgcctcccaggcttaagtgattcttgtgcctttgcctcctgagtagctgggattacaggcatgtgccaccatgcctggctaatttttttttttctgcatttttagtagagatggggtttcgccatgttgtccaggctggtcttgaactcctaggctcaagcgatccacccgccttggcctctcaaagtactgggatcacaggcgtgagccactgcacccagccgtaatttttgtccagcttctttcttggtaccttaaataatttagaaagcttttttattaatatatcctgagtgtgtttagtagttatttacatgtctttctgttgctctctctatgagttatatcctgtagggtactgtttaattagtattctaaatgtaaatatgcaaactgctaaccccaaaacattctttttaaacggtttatccagaagtttatttgagcacttaaaacccagtaaccaactgtaagttaccagcattaaatttgctgaggctgaggttagcaattcggatgttttagagattttattgccaagagaaacaagaacaggatatctgtgctgtagtttaaagtgatgataaagctatcaaatgcttttagttatacccgaccttttaaaaacagttgttgagtagtataaacagtgtttctggttaaaaaaatgtttattcaagggtgacttcctcttgaaggaagaataccacggtggtccggtggcaaataggagatagatgtatagattgagtacacacacatttttctatgatttacaagtattttctgttatagagatttgagagaccgacaggaaaagtatttaggatctattttatatataccaatggctactgaggaattaaaatcagaaatcagcttctgatcatcagggttagaaactagaataaaagctgtgaaaaaattatgtgtagatgactttttaaaaatcaagtatggtcattatttactattcatggagattttatatatcagagaatgtttgtaacctttaggttagtcagcagacttattatgaagttatttaaatagttagctagttagaggaatagttaaatagttaaatagggagaattgttaaatagttatcccccacaaaaaggagttttttagataagtaataaaaatttatatttacttttcttcttttataggaaagtaatggctagaaacagttagttctaaactaagaatttgttgtatttgataactccatcgatgaaaatattttaaaatgccctttaaatgtgcattttgtcaatttttaataggtgtcatattgttgattttcacaaatcaactggtcctttgggtacacaccctcgcttatttgaatggatattgaactattattcttcagagggagaagggagtccaaaggtagtgtgtacatctaaacctcctatctatcttcagcatcaaggttagtattaatataactcatatttgacaatgttgtttataagataacaaattgttgctttcagacaggttaaggttttttgtttgtttgtttgtttttttagacagaatctcactctgttgctcaggctggagtgcagtggtgcaatcttggctcgctgcaacctccaccttccaggttcaagtgattctcctgcctcagcctcctgagtagctgggattacaggcgcctgccaccatacctggctaatttttgtatttttagtagaaacggggtttcaccatgttggccaggctggtctgataatagcagggagtattatgacattaatctgtttaatttttcagagctcctttgacagtacaatactttcttaggtaattaagattgatatttctacaatacttcattgggtaattaagactgatattcctgacatcttcaggaccttttgcacttcttgttttctgtgtttagttcacttgtccttcattgttcatcccttaccttcttgggtctttacccacatgtcacttgagtgaggccttccctgaccttaccttaccttaaaagtagaactcaaggccaggcatggtaactcatgcctgtaatcctagcactttcagaggccaaagcaggaggattgcttgagcccagcagtttgagaccagcctgagtgacatagtgagaccctgtctctacaaaaacataagaaaattagccaggtgtggtggcacatgcctgtagtcctagctactcaggaggctgaggtgggagggtcacttgagccttggagttgggggctatagtgagccatgattctgccactgcactccagcctgggcggcggagtgaggctgtgtcaaaaacacgtacaactcatcccagcatcccaccgctggcattttcttcacttatttacctcatttatagagtatctcttcctattagaatataagttccaagaacacaggcacgtttgtctgttttgtttgctgttatataccttcgtgcttggagtagtacccggcacatagatacttggtaaattatgaatgatggtttggattgacaggaataaacagaagtaaatgttaggaatttcattgtttaggaatataaactataagagattaagctccctccactgatattctagcatttatgggtttacttttgtttaccttttggaatcatgagagttttgttctagaacagtttttgttctttcatttgagataatttgaataagaaggatcaaaggattgggaaaggaaaagtaaaatatttggcagaataaaaatgttttttttggtaatgaagcctttagaaaactaaagttaaatgaaaaaactgaagtagaactaaactcttacgtcttaggagaacttagatacatatgtgtcagagtctgactgtatttatattctaaacacacatatgatcacacaacatacatacagagactatttgtataactgtaaatagatgtgacgtatgtataacttaaaaatcttttgataggtcacagtcgaactgttattggaattgaagagaaaaaaaaccgaacattatgcttactaatacttgatcctggatgtccttctcgagaaatgcagaaattattaaagcaagacatagaggctagcagtctcaagcaacttcggaaatctatgggaaatttaaaacataagcaataccagatattggcagtagagggtgctctttctctagaggagaaacttg

SEQ ID NO: 667 - DNA, 6181 bp, Homo sapiens
ttctttttttattatttattattattattattatcatactttaagttttagggtacatgtgcacaatgtgcaggttagttacatatgtatacatgtgccatgatggtgtgctacacccattaaatcgtcatttagcattaggtatatttcctaatgctatccctccccactccccccaccccacaacagtccccagagtgtgatgttccccttcctgtgtccatgtgttctcattgttcaattcccatctatgagtgagaacatgcggtgtttggtgttttgttcttgcgatagtttactgagaatgatgatttccaatttcatccatgtccctacaaaggacatgaactcatcattttttatggctgcatagtattccatggtatatatgtgccacattttcttaatccagtctatcactgttggacatttgggttggttccaagtctttgctattgtgaatagtgcagcaataaacatacgtgtgcatgtgtctttatagcagcatgatttatagtcctttgggtatatacccagtaataggatggctgggtcaaatggtatttctagttctagatccctgaggaatcaccacactgacttccacaatggttgaactagtttatagtcccaccaatagtgtaaaagtgttcctatttctccacatcctctccagcacctgttgtttcctgactttttaatgattgacattctaactggtgtgagatggtatctcattgtggttttgatttgcatttctctgatggccagtgatgatgagcattttttcatgagtcttttggctgcataaatgtcttcttttgagaagtgtctgttcatatcgtttgcccactttttcatggggttgtttgtttttttcttgtaaatttgtttgagttcattgtagattctggatattagccctttgtcagatgagtaggttgtgaaaattttctcctattttgtaggttgcctgttcactctgatggtagtttctcttgctgtgcagaagctctgtagtttaattagatcccatttgtcaattttggcttttgttgccaatgcttttggtgttttagacatgaagtccttgcccatgcctatgtgctgaatggtaatgcctaggttttcttctagggtttttatggttttatgtctaacatgtaagtctttaatccatcatgaattaatttttgtataaggtgtaaggaagggatcgagtttcagctttctacatatggccagccagttttcccagcaccatttattaaataggaaatcctttccccattgcttgtttttctcaggtttgtcaaagatcagatagttgtagatatgcggcattatttctgagggctctgatctgttccattgatctatatctctgttttggtatcagtaccatgctgttttggttactgtaaccttgtagtatagtttgaagtcaggtagcgtgatgcctccagatttgttcttttggcttaggattgacttggcgatgcgggctcttttttggttccatatgaactttaaagtagttttttccaattctgtgaagaaagtcattggtagcttgatggggatggcattgaatctataaattaccttgggcagtatggccattttcacgatattgattcttcctacccatgagcatagaatgttcttccatttgtttgtatcctcttttatttcattgagcggtggtttgtagttctccttgaagaggtccttcacgtcccttgtaagttggattcctaagtattttattctctttgaagcaattgtgaatgggagttcactcatgatttggctctctgtttgtctgttattggtgtataagaatgcttgtgatttttgtacgttgattttgtatcctgagactttgctgaagttgcttatcaacttaaggagattttgggctgagacagtggggttttctagatgtacaatcatgtcatctgcaaacagggacaatttgacttcctcttttcctaattgaataccctttatttccttctcctgcctaattgccctggccagaacttccaacattatgttgaataggagtggtgagagagggcatccctgtcttgtgccagttttcaaagggaatgcttccagtttttgcccattcagtatgatattggctgtgggtttgtcatagatagctcttattattttgagatacgtcccatgaatacctaatttattgagagtttttagcatgaagtgttgttgaattttggcaaaggccttttctgcatctattgagataatcatgtggtttttgtctttggttctgtttatattctggattacatttattgatttgcgtatattgaaccagccttgcatcccagggatgaagctcacttgatcatggtggataaggtttttgatgtgctgctggattcagtttgccagtattttattgaggatttttgcatcaatgttcatcaaggatattggtctaaaattctcttttttggttgtgtctctgcaaggctttggtatcaggatgatgctggcctcataaaatgagttagggaggattccctctttttctattgatcggaatagtttcagaaggaatgttaccagttcctccttgtacctctggtagaattcggctgtgaatccatctggtcctggactctttttggttggtaagctattgattattgccacaatttcagatcctgttattggtctattcagagattcaacttcttcctgatttagtcttgggagaatgtatgtttcgaggaatttatccatttcttctagattttctagtttatttgcgtagaggtgtttgtagtattctctgatggtagtttgtatttctgtgggatcggtggtgatatcccctttatcattttttattgcgtctgtttgattcttctttttttctttattagtcttgctagcggtctatcaattttgttgatcctttcaaaaaaccggctcctgaattcattaattttttgaagggttttttgtgtctctatttccttcagttctgctctgattttagttatttcttgcctcctgctagcttttgaatgtgtttgctcttgcttttctagttcttttaattgtgatgttagggtgtcaattttggatcttttctgctttctcttgtgggcatttagtgctataaatttccctctacacactgctttgaatgtgtcccagagattgtgttatgttgtgtctttgttctcgttggtttcaaagagcatctttatttctgccttcatttcgttatgtacccagtagtcattcaggagcaggttgttcagtttccatgtagttgagtggttttgagtgagtttcttaatcctgagttctagtttgcttgcactgtggtctgagagacagtttgttataatttctgttcttttacatttgctgaggagagctttacttccaagtatgtggtcaattttggaataggtgtggtgtggtgctgaaaaaaaagtatattctgctgatttggggtggagagttctgtagatgtctattaggtccgcttggtgcagagcttagttcaattcctgggtattcttgttaacttcctgtctcgttgatctgtctaatgttgacagtggggtgttaaagtctcccattattattgtgtgggagtctaagtctctttgtaggtcactcaggacttgctttatgaatctgggtgctcctgtattgggtgcatatatatttaggatagttagctcttcttgttgaattgatccctttaccattatgtaatggcctcctttgtctcttttgatctttgttgatttaaagtctgttttatcagagactaggattgcaacccctgcctttttttcttttccatttgcttggtagatcttcctccatccttttattttgagcctatgtgtgtctctgcacgtgagatgggtttcctgaatacagcacactgatgggtcttgactctttatccaatttgccagtctgtgtcttttaattggagcatttagtccatttacatttaaagttaatattgttgtgtgtgaatttgatcctgtcattatgatgttagctggttattttgcttgttagttgatgcagtttcttcctagtctcgatggtctttacattttggcatgattttgcagtggctggtaccggttgtgcctttccatgtttagtgcttccttcaggatctcttttagggcaggcctggtggtgacaaaatctctcagcatttgcttgtctgtaaagtattttatttctccttcacttgtgaagcttagtttggctggatatgaaattctgggttgaaaattcttttctttaagaatgttgaatattggcccccactctcttctggcttgtagagtttctgctgagagatccgctgttagtctgatgggcttccctttgtgggtaacccgacctttctttctggctgcccttaacattttttccttcatttcagctttggtaaatctgacaattatgtgtcttggagttgctcttctcgaggagtatctttgtggcattctctgtatttcctgaatctgactgttggcctcccttgctagattggggaagttctcctggataatatcctgcagagtgttttccaacttggttccattctccccgtcactttcaggtacaccaatcagacgtagatttggtcttttcacatagtcccatatttcttggaggctttgttcatttctttctattcttttttctctaaacttcccttctcgcttcatttcattcatttcatcttccatcgctgataccctttcttccagctgatcacattggctcctgaggcttctgcattcttcacgtagttctcgagccttggctttcagctccatcagctcctttaagcacttctctgtattggttattctagttatacattcgtctaaatttttttcaaagtttttaacttctttgcctgtggtttgaatttcatcctgtagctcggagtagtttgatcgtctgaagccttcttctctcaacttgtcaaagtcattctccgtccagctttgttccgttgctggtgaggaactgcgttcctttggaggaggagaggcactctgctttttagagtttccagtttttctgctctgttttttccccatctttgtggttttatctcctgttggtctttgatgatggtgatgtacagatgggtttttggtgtggatgtcctttctgtttgttagttttccttctaacagacaggaccctcagctgcaggtctgttggagtttgctagaggtccactccagaccgtttgcctgggtatcagtagcagtggctgcagaacagcggattttcgtgaaccgcgaatgctgctgtctgatcgttcctctggaagttttgtctcagaggagtacccggccgtgtgaggtgtcagtctgcccctactgggggatgcctccccgttaggctgctcaggggtcaggggtcagggacccacttgaggaggcagtctgcccattctcagatctccagctgtgtgctgggggaaccactgctctcctcaaagctgtcagacagggacatttaagtctgcagaggttactgctgtctttttgtttgtctgtgccctgcccccagaggtggagcctacagaggcaggcaggcctccttgagctgtggtgggctccacccagttcgagcttcccggctgctttgtttacctaagcgagcctgggcaatggcgggcacccctcccgcagccttgctgccgccttgcagtttgatctcagactgctgtgctagcaatcagggagactccgtgggcgtaggaccctccgagccaggtgcaggatataatctcctggtgcgccgtttcctaagcctgtcggaaaagcgcagtattcgggtgggagtggcccgatgttccaggtgccgcctgtcacccctttccttgaccaggaaaggggactccctgaccccttgcgcttcccgagtgaggcaatgcctcgccctgcttcatctggcgcatggtgcgctgcacccactgtcctgcgcccactgtctggcactccctagtgagatgaacccggtacctcagatggaaatgcagaaatcacccgtcttctgcgtcactcatgctgggagctgtagaccggagctgttcctattcggccatcttggctcctcctcctccaaa

SEQ ID NO: 668 - DNA, 861 bp, Homo sapiens
ggccgggcacggtggctcacgcttgtaatcccagcactttgggaggccgaggggggcggatcacgaggtcaggagatcgagaccatccgggataacacggtgaaaccccatctctactaaaaatacaaaaaattagtcagacgtggtggcgggcgcctgtagtcccagctacttgggaggctgaggcaggagaatggcgtgaacccgggaggcggagcttgcagtgagcagagatggcaccactgcactccagcctgggcgacagagcaagactccgtctcaaaaaatatatatatatacatacatacatacatacaaaccaagatatttgttatcttgtaaccttgaggaaagaacctggtatcctttaccttcggtgcatagctgggagcttgatacctagcagcattataaaccctttattgatactaaaatagagtgctactcagcaggccctagtgtagactgctatttgccccaggacctgccctgtgaactcattcagattaagtatgaatgacctcagagcccggttttctctcctagcaattgagtggcaggaaactcgatgggagaaggaaaaactcggaaatgggaggaatgcaaaaatgactacatctctcaggagatcgagaccatcctggctaacacggtgaaaccccgtctctactaaaaatacaaaaaattagccaggcatggtggcgggcgcctgtagtcccagctactcgggaggctgaggcaggagaatggcgtgaacccgggaggcggagcttgcagtgagccgagatcgcgcactgccctccagcctgggcagcagagcgagactccgtctcaaaaaaaaaaaaaaaaaaaaaagactac

SEQ ID NO: 669 - DNA, 13191 bp, Homo sapiens; identical to SEQ ID NO: 608

SEQ ID NO: 670 - DNA, 1316 bp, Homo sapiens; identical to SEQ ID NO: 609

SEQ ID NO: 671 - DNA, 309 bp, Homo sapiens; identical to SEQ ID NO: 610

SEQ ID NO: 672 - DNA, 1048 bp, Homo sapiens
gtggatatatcacattttgtttatctgttcatcagttgatgaacttttgggttgtttctgctttttctggctattgtaaatagtgctgttatgaacactgatgtacaattttttggggtgaacatttgtttttattcttttaggtatatagctcggtgtggaattgctggatcatatatggtaattctgtctttaacttaatgaggaactgccaatctgttttcctcagtgactgtaccattttatattcctattagcaataaacaagtgtcccaatttctccacatttttgccaacactgttttccattaaaaactttttattatagtcattctagtgggtgtaaagtggtatctttttgttttgatttgcatttccccagtaactaatgacattgagccttttttcatgtgcttgttggccatttgtatatattctttggagaaatgtctgtttaagtcctttgcccactttaaattgtgttgtctttgtgttgtagagttgtaagagttctttatacattctgggtactagacatgattttcaaatttagatacatgattttcaaatcttttgcctctagatgttttttacttttttatttttgatccttgaactcatctatattctatggttgtgatgtaatgatgacagaattggtgtcatttgtgtttatttaccaggttatttggaaggattatattttaggtgctctcctctcccccagtaaatggtattacgacacaagggttataaaggactgataagaaattacttaagacagaaagggaagttggcctgcttccaaaatgtggtcccagcagaagtgaagttagttacaccaataactacagtcaaaaagctatttttaaccatgataatgtacttgttgttattaatattaaagattatatttttccaggtgcagtggctcacatctataatcccagcactttgggaggctcaggcggatggatcacttgagctcaggagtttgagaccagccagggcaacatggtgaaaccccatctctacaaaaaatgaaaaa

SEQ ID NO: 673 - DNA, 1048 bp, Homo sapiens
gtggatatatcacattttgtttatctgttcatcagttgatgaacttttgggttgtttctgctttttctggctattgtaaatagtgctgttatgaacactgatgtacaattttttggggtgaacatttgtttttattcttttgggtatatacctcggtgtggaattgcgggatcatatatggtaattctgtctttaacttaatgaggaactgccaatctgttttcctcagtgactgtaccattttatattcctattagcaatacacaagtgtcccaatttctccacatttttgccgacactgttttccattaaaaaatttttattgtagtcattctagtgggtgtaaagtggtatctttttgttttgatttgcatttccccagtaactaatgacattgagccttttttcatgtgcttgttggccatttgtatatcttctttggaggaatgtctgtttaagtcctttgcccactttaaattgtgttgtctttgtgttgtagagttgtaagagttctttatacattctgggtactagacatgattttcaaatttagatacatgattttcaaatcttttgcctctagatgttttttacttttttatttttgatccttgaactcatctatattctatggttgtgatgtaatgatgtcagaattggtgtcatttgtgtttatttaccaggttatttggaaggattatattttaggtgctctcctctcccccagtaaatggtattatgacacaagggttataaaggactgataagaaattacttaagacagaaagggaagttggcctgcttccaaaatatggtcccagcagaagtgaagttagttacacaaataactacagtcaaaaagctatttttatccatgataatgtatttgttgttattaatattaaagattatattttgccaggtgcagtggctcacatctataatcccagcactttgggaggcttaggtggatggatcacttgagctcaggagtttgagaccagccagggcaacatggtgaaaccccatctctacaaaaaatgaaaaa

SEQ ID NO: 674 - DNA, 238 bp, Homo sapiens
cttcttgattctgttgccatctctttgattccttattgtttctgataaattttcctaagtttaatttccgagagctctttggaaaagtatcgattttttttcatggatggagtatctactcttttgacacagggtcttgctctgtcgtggctcactacagctttgattgctcaggctcaagcgatcctcctgccctagccctcccagtagctggtactacaggcctgcaccgccaaac

SEQ ID NO: 675 - DNA, 135 bp, Homo sapiens
aaagtactttttcttttataatatgcaacaataactttctgtttagttaattagttttaaaacaagcttaaacttataatttataaagaatcatatttgctccctatcattgttttatagctggggctatactga

SEQ ID NO: 676 - DNA, 238 bp, Homo sapiens
cttctttattctgttgccatctctttgattccttattctttctgataaattttcctaagtttaatttccaagggctctttggaaaagtatcgattttttttcatggatggagtatctactcttttgacacagggtcttgctctgtcgtggctcactacagctttgattgctcaggctcaagcgatcctcctgccctagccctcccagtagctggtactacaggcctgcaccgccaaac

SEQ ID NO: 677 - DNA, 136 bp, Homo sapiens
aaaagtactttttcttttataatatgcaacaataactttctgtttagttaattagttttaaagcaagcttaaacttataatttataaagaatcatatttgctccctatcattgttttatagctggggctatactga

SEQ ID NO: 678 - DNA, 9740 bp, Homo sapiens
ttttctgctacaggattatagctggacagacatccgctgcccctttgaaaaacgaagagatgcagcatgcgtgttttgggacaatgtagtatacattttgggaggctctcagcttttcccaataaagcgaatggactgctataatgtagtgaaggatagctggtattcgaaactgggtcctccgacacctcgagacagccttgctgcatgtgctgcagaaggcaaaatttatacatctggaggttcagaagtaggtaaggacttcttaagtattttggtttggggcatatgctttaaagccaagtatcttggctttcatatttaaataaacagctggtattatttgtccagatactttcttggtaatttaaatatgtgtttgtcacattttagagctcatctccctgaaggtttatgtcgttgctttacaaaccattaaattacagaactttagcttcctagattaatggcccattttttttatcataatgaagcattagttgacattatctgaattatagttctaaattatttgggctgcataatattatttgttttaaagatttcagagttcaacttatagactctttaagaactcgttactatattcaggcttttaaaatttgtattatatttgctttctttttattagaaaaaagaatgctctttttcatttgttttattctttaagtttttaatgactgtagtggtatttatgcttattgagcagaatgggatgtgggtgtggatataaaaaccttattggatagtgtgttagtgtccagtagtgctctttttctaaatgaataatttttctaaatgaataggtgcaggctagatacataatagcttttgtatgctttcattttcaagtaatttctttagcttaaataatgggctaataaagaaaactagggagaccgtaaatggttatacttttggtctgcatacttatgtttttaccctcaactatatgtcaaatgaatacaagaaaaatcactatttcctaaatgtaaccatttcctctctttaaaagcattcttcacagactgttataatgtagaatatttcaaatacaataaatcctaaagatgatagacggtaactgttctgtggtactgcagataacttcatttcttcagcctttgctaagtgtgtttttagcttaagtagtagtttttttttaatctactatatactatatattttcctatagtgtccacccactgaacctaccaaatcaggaatgtttaaaaagttaaaaataagttatttttggtcatgaccattgcttcttctagttgttattttctgatctttacttttcacagaccttagttgcaacgcagaattataaaggtgttgtcgtttttaaatcatttgatattagcccagaatggtgggagatgagaaatagtttggtaacttctaaaattttttgtccttgggaaggaaaaaaaaaagcacttaaactttaatagtatcatttctaaaattttttattgaactcctacagtgtgtagaagtttcaaaacatgatgaatgtatgttttgcctttaaattgtgtaatcaaaatacatcagaaatatacatcaatattttgagaatatactcaagcagggaccagtgtgatttcaggatataccacactaactgagaatagttaggaaatataattttgttaatggtgctgtagctattccagaatattaaataagaatatgatcagatagtagttttcatattttaaggtatgggtctaccatctgtaaggaactattatgcttttccactttatataaacatttgaagtatggataattcccgtcatgcataatggggcttgaagacatatataaggcttcttatttaatttttcttttgaaatcaaatttatttttctaaagtttaattaccaataaataagtatttccaacagatccttttaaggatgttttccagggtctatacaaacaggattattagcgttttcttaaactattcctacactttgttgttgttgattgagtatgaaaatggccgtatgaccctaaattcttccttccttaactaataagatctacagtcagttctttccaaacccccgcacacactaaagttaagcatgatggggcctttttcttttacaggaaactcagctctgtatttatttgagtgctatgatacgagaactgaaagctggcacacaaagcccagcatgctgacccagcgctgcagccatgggatggtggaagccaatggcctaatctatgtttgtggtggaagtttaggaaacaatgtttctgggagagtgcttaattcctgtgaagtttatgatcctgccacagaaacgtatgtatctatttaaaatttattttacagttaactgtattctataagctctgtaggagatgtcaaaagaccagaggaacccaacagaagaattttgtccttgagtgaagagtgtatataaacttttgagtgtgctagggtcagtggcatatttatgacctggacctttcccttacaccagaaatggcttgaacttacaccccatgggaacctctttctttctggttctgcgtgcaataaatgcctatgaatgagacacatctgattgattcgtcaactcataaaatgtttttgtttgagcggtcaggaaatgtagaggaggaggggggagtttatgaccagcaataaatttatccttaagtagaaatattagatattggctcatggcattaataaatcatgcctccctagttctttttaggtgtaaacttcctaagtacatttagattcatgtttattaaataaaattattcttaaatcaactgcttttaaaaaggcaaagtgtgtcaaaaaggtaaaatgctaaagaaataactggttagccagtttttctgaccttgtagttaatgatggaacacattcaatgtagccaaaggaaatgtgctaatcattgaataatggagagggcatgagggcacgggttgtgagtagtgacattaaagctgatgaggacataaaacagatgataccctagtcgtaccttttatggaaacatccaaagagctttgataagaaaagtcacttgatcatatggctggattgcccatcgttcttcccttactagaacaagttactgggtgaatacgttcactaaaatgctatgccagagttgcatcaaaactctcgtgcttaaagttttatatttaggaaatattgccaaactacaaaacatggaagtcttcaactccagctactgctttttttaaaattaagaaataagatgccaggcatggtggctcatgcctataattccagcactttgggaggctgaggcaggcagatcacttgaggtcaggagtatgagatcagcctggccaacatggcaaaatcccgtctctactaaaaatacaaaaactagctgggtgttgtggcgcgtgcctgtaatccactactggggaggctgaagcaggaaaattgcttgaacctgggaggcggaggttgcagtgagccaagattgtgccacagcactccggcctgggtgacagagcaagactccatctcaaaaaaaaataaaaaataaaaaaataagagcttaattataaaatatgattaattatgtgcatttatctatgattcccacatatttttaaaagatttaaggaagcataatcaataacttctttccagtgcaaataatagaaaagcaagttgtcttgaaatttgtcttttgctaaagatgtttaccaactttgctcccttttatgtgaacctctaccttacttcccataaaccctaggctcaaaaagtgttacagcatactagttggaaaactgattcattctgctaattattttttatttctaaaaaatctcttaaaagagaagccataaccataaaaactctaggtttctaaatttttacatctttattcaggcactatcaatgtaaattaatattgattttttacttacttttttgttcaaagtaaaaatataaaggagttctgcagcttctgtattttttaaaactaggtgaatattcagtttcaggaatatttaaaaacttacaagacctagcatttctttcattttatatatattgagcttaaatttgaattctctatgttcccttcaatgcccttaaattttcacaaatgaaaagctagtgtgaatataattatccaactctcaaaataaatgttatattatttccttttaaaaatgttacctagtccaggtgtggtggttcatacctgtaatcccagcactttgggaggccgaggctggtggatcgtctaaggtcaggagttcgagaccagcctgaccaacatggtgaaactctgtctcgtctaaaaataccaaaaaaaattagccgggcgtggtggcgcgtgcctgtaatcccagctattcaggaggctgaggcaggagaatcatttgaacccgggaggtggaggttgtagtgagctgagatcgtgccattgcactgcagccagggcaacaagagcgaaactctgtctcaaaaacaaaaacaaaaataaaaacaaaaagttatctagccagccaagttttttttaataagaatttcttcccaattttgacattttaagtgtttgataattagaatgtgtttaattggaagctgaaaaactaagcctatggaccatagaaacacaaataacacatgttgtcactcatgtgggagctaaaaatgttgatctcatggaggtagagagtagaatgatggttatcagaggttggttaacaagtacagaaatacagttagataggataagttctaatattcagtagtacagtagggagactatagttaacaataatttattgtatatttcaaaatagctagagaagaattggaatgttcccaacacaaagaaaagatattcctcagcagcaacatgggaggcctgggttccttccctagcccaaaaagaaacaaaaggaaagataaatgtttcaggtgctggatatcccagttactctgacttgatcattacacattgtatacatgtgtcaaaatatcacaggtaccataaaaatatgtacatgtattatgtatcacatttttaaaatcagttttaaaaaagatggagaggagcagaagctcataataaagtaactgaagaaagaaagaaattatgtctatggaaacaatgtgacacagtttgagcggtcagaattttaagaaatgactttttttttttttttttgtgagacggagtctcactctgtcaccatgctggaatgcagtggcacgatctcagctcactgcaacttctgcctcccaggttcaagcgattctcctgcctcagcctcctgagtagctgggattacaggcgcacgccaccacacgggctaatttttgtattttcagtagagacggggtttcaccatgttggccaggatggcctccatctcttgaccttgtgatctgcccaccttggcctcccaaagtgctgggattacaggcgaaaaaacgcttctaaacattaaacttcagattgcagatagcggggacctagtatgtactctgcatgtgaattataggaggaaggggaatttgtgaaagttttttctaaaccttcaggagatttagatatacataaagacatgctgtctttttatatcattaacattatatttggagaagaaagtggtatgtaaatggaatttttccaagtcaaatactgtgttttaatgcatgatgatagctgagtctataaatctcactacgtgcagggcagtgaagacctagtttttactgctgtcccacttccgagctgtatgccggtcacttcacctggatgagcgtgtgtgtttttcctaaaaacaggagccatgctgtccacctcaccttaacagagaactttgaaaatgagagtggtgactgtcaaaccatttttaaaacaatacataaatgtaagacaaaagaattgttaatacttcagagttaatcattgtgccttaattatgttttataaagttgaattcatcaaattgttttttgttttttgagacggcgtctgcctctgtcgcccaggctgcagtgcagtggcgtgatctcagctcactgcaagctccgcctcctgggttcacgccattctcctgcctcagcctcctgagtagctgggactacaggcgcctgccgccacgcctggctaattttttgtatttttaatagagacggggtttcaccgtgttagccaggatggtctcgatcgcctgacctcatgatccgcctgcctcggcctcccaacgtggtgggattacaggcgtgaaccaccgcgcccggccggccatcaaattattttaaagaagagatataaacaataattatagagagttactcttatgccaagtttcccttttgttgttgtccttactgttgtttggcgtctcttggtttaagttagctgctgaaagcacaagcctgtgtgccagtaccaccttcacaatcacaaatgtcagtcttgggagtgtatgcagaagaatgtattaaatctcagaaaaaaataactaaactcgattgtctgtgtatatatgcataatgctgcaacctgtgaattaatatcctttaacacttgggtccacatttatattctcagtttcattatttatatattagtggctgtgaacagagcaacatgaggtattaaacttgacagaatgatagtacttttttgttaccagagcagcataaagttcttagtgtagatttaaagatggacatgtgaatagtaacagatactattaatttcctgattgcctgaggcccattataagtttgtgttttacttacgcatatataaataataattaaagctaggtgtgatagaactagttaatatttcctgccagcagaggtgtgaagaaagaaaaaagaattatttatcttcgaagcatcttcctcttcttttttgttcccatattacaagtttttatgaacctcaggaaatggatttcctctaaaaacgtgttttttaatagatatcctcattttcttatatcctatcagaattgaaaggaataaaatccatgttttccccgtgtattaataaattacccataatcattgttcaacttttgttttctacccttctagacattttgtgcgtatatgtacacatatgtgagtagtaaatgagcacttaattagaataatagacctttctcattagtatgagttcttttacttcctgtaaacaagcacactaaaaactttaattttttcagatggactgagctgtgtccaatgattgaagccaggaagaatcatgggctggtatttgtaaaagacaagatatttgctgtgggtggtcagaatggtttaggtatgtgatgttaattcactgttccactttcctgatgagtttgctgatacttccttaaattattgaagcatttttaaaaatctagatagaagcatttaccatgtatattattatatctatttttatagtttctgggaattaacatacttgataaaatatcgcaggatgttaaacattcctgtttatgaaatgtcgcagtagtcaccagtcattgtgacaattttagatggctcctatacattcccagatacctcctggggaatgatgtcgcaccagcttaagaactattgagcaatagaaatatttgaactttaaaaaacctttaaaaactttttaaatacaagttttaaggcttgtatccaggtcctaaatggtaaagtttcctaaatatttttaaacattgcatgaaaatatcaatattgtaatttttaaatgactaaatttggcattttgttttcataaataatgtactaaagaatcttaaataattgtcttaaatgaaagggagtcggaactgaatctagacacaagcttcaatttagtcagtactttaagcatcacttaagtgtaccagtaacttcttttccttcttctgtccctgtccattgctattttccataaagtgctaaaaggaggaaaaagaaggacatttgagtaattataatcaaagttaatcagaggggaaatcaccgattggtttattttgcatttttccagaatagataaaacatgtttaattttgtagaaaaaaatcaatatttaaaaagaaatattaaatgtctattgtgttaagagtaagaatttaggtggtggctatgtggacattcactgtaaaattattacagtttttctgtgtgtttgacatttttcacaataaaatattggaaaaatacaaaaagttattactttaagaaaccttagaattgttgatatagtttttcatgttgttcatgttttattcttttgaaggtggtctggacaatgtggaatattacgatattaagttgaacgaatggaagatggtctcaccaatgccatggaagggtgtaacagtgaaatgtgcagcagttggctctatagtttatgtcttggctggttttcagggtgttggtcgattaggacacattctcgaatataataccgaaacagacaaatgggttgccaactccaaagttcgtgcttttccagtcacaagttgtttaatttgtgttgtcgatacttgtggagcaaatgaagagacccttgaaacatgaaaaatgagtggacttcagactcatcagagactctaaaatatagccaccagtgctttgttccaggagtttggtgacaaagttttggtttggtgttttggtaaagaaagtttcaagtgaaatgaggttcctataaaatagatgtttcttttatatggatttccttaattcaaagatcatattttagctggccacaaaaccaagaacatatctagcaagaaaacttgaaaaagtataagcatttgttaaaaatgtgaatttcttgaatgaatttcacatttgtaactatgattttggcagaatagaagattggctcatcagtgaagcgcagtatcttagctctagattctattttcatgcatcacagaagtgctatacggttaggtctgtttgtgctcagtcaagaactaagaaatagtatgaattgtaagtcaagatgggcaactcagatggagcagcttagtctcacagtttgcttgtctatttattttatttagtgccaaatgtattccattttaaaagtaagccagagtgagtcaaggcatatacacactttctcacaaaacttcctaaacagatttgggggtttaatatgtccaactcctcatgaaatatattcaatccacttaaatatattccatctttttaacataaaatgtaaagcttagcacccatcattaatttatgtctctgttttatccagtggttaaaaaaggattctgcctctttagtcctcactgttaaataaaacccaatcatagtaagtgattaactagcaaaaagtaaagctatttatagcaaatttctagatcattagaaaagcactggtagttgtacaatatcagtgttgactttgaacttctttaacgagatcatgaattcttttcccttagccaaaacatgaaatatttaacctagttgtctctaaaagttttgtaatcatgagttagatatatgtcatctcctattcattgcttttatgtgatcaataaatcttttacaaacccaactactcatttccttcctagtaatactttgcctttttcactgtgtatggaatgaaacatgtaaagctgtcacaatcaatgtttttatctgataatattaaatattttttaacttaaaatag

SEQ ID NO: 679 - DNA, 2636 bp, Homo sapiens
gttcaacttttgttttctacccttctagacattttgtgcgtatatgtacacatatgtgagtagtaaatgagcacttaattagaataatagacctttctcattagtatgagttcttttacttcctgtaaacaagcacactaaaaactttaattttttcagatggactgagctgtgtccaatgattgaagccaggaagaatcatgggctggtatttgtaaaagacaagatatttgctgtgggtggtcagaatggtttaggtatgtgatgttaattcactgttccactttcctgatgagtttgctgatacttccttaaattattgaagcatttttaaaaatctagatagaagcatttaccatgtatattattatatctatttttatagtttctgggaattaacatacttgataaaatatcgcaggatgttaaacattcctgtttatgaaatgtcgcagtagtcaccagtcattgtgacaattttagatggctcctatacattcccagatacctcctggggaatgatgtcacaccagcttaagaactattgagcaatagaaatatttgaactttaaaaaacctttaaaaactttttaaatacaagttttaaggcttgtatccaggtcctaaatggtaaagtttcctaaatatttttaaacattgcatgaaaatatcaatattgtaatttttaaatgactaaatttggcattttgttttcataaataatgtactaaagaatcttaaataattgtcttaaatgaaagggagtcggaactgaatctagacacaagcttcaatttagtcagtactttaagcatcacttaagtgtaccagtaacttcttttccttcttctgtccctgtccattgctattttccataaagtgctaaaaggaggaaaaagaaggacatttgagtaattataatcaaagttaatcagaggggaaatcaccgattggtttattttgcatttttccagaatagataaaacatgtttaattttgtagaaaaaaatcaatatttaaaaagaaatattaaatgtctattgtgttaagagtaagaatttaggtggtggctatgtggacattcactgtaaaattattacagtttttctgtgtgtttgacatttttcacaataaaatattggaaaaatacaaaaagttattactttaagaaaccttagaattgttgatatagtttttcatgttgttcatgttttattcttttgaaggtggtctggacaatgtggaatattacgatattaagttgaacgaatggaagatggtctcaccaatgccatggaagggtgtaacagtgaaatgtgcagcagttggctctatagtttatgtcttggctggttttcagggtgttggtcgattaggacacattctcgaatataataccgaaacagacaaatgggttgccaactccaaagttcgtgcttttccagtcacaagttgtttaatttgtgttgtcgatacttgtggagcaaatgaagagacccttgaaacatgaaaaatgagtggacttcagactcatcagagactctaaaatatagccaccagtgctttgttccaggagtttggtgacaaagttttggtttggtgttttggtaaagaaagtttcaagtgaaatgaggttcctataaaatagatgtttcttttatatggatttccttaattcaaagatcatattttagctggccacaaaaccaagaacatatctagcaagaaaacttgaaaaagtataagcatttgttaaaaatgtgaatttcttgaatgaatttcacatttgtaactatgattttggcagaatagaagattggctcatcagtgaagcgcagtatcttagctctagattctattttcatgcatcacagaagtgctatacggttaggtctgtttgtgctcagtcaagaactaagaaatagtatgaattgtaagtcaagatgggcaactcagatggagcagcttagtctcacagtttgcttgtctatttattttatttagtgccaaatgtattccattttaaaagtaagccagagtgagtcaaggcatatacacactttctcacaaaacttcctaaacagatttgggggtttaatatgtccaactcctcatgaaatatattcaatccacttaaatatattccatctttttaacataaaatgtaaagcttagcacccatcattaatttatgtctctgttttatccagtggttaaaaaaggattctgcctctttagtcctcactgttaaataaaacccaatcatagtaagtgattaactagcaaaaggtaaagctatttatagcaaatttctagatcattagaaaagcactggtagttgtacaatatcagtgttgactttgaacttctttaacgagatcatgaattcttttcccttagccaaaacatgaaatatttaacctagttgtctctaaaagttttgtaatcatgagttagatatatgtcatctcctattcattgcttttatgtgatcaataaatcttttacaaacccaactactcatttccttcctagtaatactttgcctttttcactgtgtatggaatgaaacatgtaaagctgtcacaatcaatgtttttatctgataatattaaatattttttaacttaaaatag

SEQ ID NO: 680 - DNA, 546 bp, Homo sapiens
ggcatatcacagcagaggcaagaaaggctgactaggaccaaggaaaataggactttatacatggatgtgtccacatgtgtacgtgtgtataatgagagatatatcaaaatttaagaaatccttctacccatatcttttccaggctttccaattttccgcatttcacatctcagcacctaagtataagaacttgcatggaatagatactcagtaaaacttaagtgaattaaatcatatttttagggtaacagctccctgaccctgcccacacacatataccgtcccatctgtgactctactgttatttgtccatcttcttgctaacatgagaactgcatattcctctagatttccctgtagatttccctattgcagggagcaataaatagcactgccttcacctgcaagcccaggttggaactagtttcatcactagggtaatgcccaacagtcatagccactgagctgacaagactgacttcccatctattcttccccaccccaccccccgccaactacatacagtatctaggtactataatcagc

SEQ ID NO: 681 - DNA, 282 bp, Homo sapiens
aattgttttttgttttttgagacatagtctcactctgtcgcccaggctgcagtgcagtggcgtgatctcagctcactgcaacctccgcctcctgggttcacgccattctcctgcctcagcctcctgagtagctgggactacaggcgcctgccaccacgcctggctaattttttgtatttttaatagagacggggtttcaccgtgttagccaggatggtctcgatcgcctgacctcatgatccgcctgcctcggcctcccaacgtggtgggattacaggcgtg

SEQ ID NO: 682 - DNA, 7710 bp, Homo sapiens
ttgtatcttaaatacaatcaaaacttcatgtttaatagggattcatctgtttcccatactttttacatgttcagttcagacagaactcatggaagaaaagacttttctgtgagatagaacagaccatctgcttgaccggatggctctgagggacagccaaactcccaatggccaaagggctgtgaggaagggcaacacatatcagaagaattttcagcaagggctgaaacacagtaaggttagccacaaaatggaatgagagaagccctaacccaatgggagtttgcctaattttaatgaacccaaactctaacattgtactggaaaagcagcattaaaatccagcctgattatcacaatttacagaatttctcaccagaggcccacaggtgaaaaagctgcttactctaaagcccttagaaccgtattgtgaactgcgcatgcgagggatctaggttgcgtgctccttatgagactctaatgcctgatgatctgaggtggaagtttcatcctccaccaccaccccgtccatggaaaaactgtgttccacaaaactggtccctggtgccaaaaaggttagggactgctgctttagaatataagaaacaactcaagcagccaacgggtctggagttaacacttccagccctcccctttgtacacactcaacacttcttgctgaactggccgttaataaccacttgtgaaatccctccccacacctgcacttaggcgtttgtctcttcctaccttcctttactgagtagtggcaaaataataggagagtggaagatggtgatgggcaatgaagagggacctatttctgaagaggagatgttttaaagatattttatttttcaataccagtaatgactgaaaattaaagaattaaagcaggaagcaaaacaaaaacaaacaagaaacccaaaacttgcaacctaaactctccgggaaaaaaaaaattgctataaatgttaaaagacttaaagagaacattgacaatgcagccctgatgtacctaatcatacttcaaactgctggatgttttaagctgagaatctccccagtgcctttctagtgctctaaaatcatctcccaaacagatgagaaatgaaacaaacaggtctcccttcttgagtacataatttttataaattgcgtcggacccacagtgaatgtattttagagagtttcaccaaaactatcaaagatcaaatggcagcaaaagatcagggaaagaaggtagaaaaactatgcagtcacagagctaacccgcaagctgcccttagtcctatacacctgaaatcaaatccatagccaatggtgaggaagaccacatcagaggttagctgcatgacagcacagctgggtcctatctccctgccaggggtctcaactgtaactcgcgctccaactgctctgcagtcagggtgccctggatggcttcacagcctggattgaacacagagtaggcgctcttctctccctctttcttctcttcagggcctcgtgtcccgacgtacatccaatagaacaaggacaggacaaaatatgccaggccaaattccagttccacaaacagtcccagcaggaccaaccagagaagaaccttcaagaaggtgatattggtcaggaaagactggtcccagcacgacggcagaggaatggctgtgttccatggtgtctctgatgtgctgccctggggctgagccgcttcctaggatacacaaacaaacaaaagaaagaataaagggtaatggagctgagatgatcaaaactaatctgaaaaggcagttttcattgctctgagaaggctgctggctcattgatttctattctttcatgcaactctctaaaacaatcatctccaaagaacctatgtgctctactccaactgaatcaaaactgatcagcacttagtgagatgtgacctaataaaagccctacgtattcagacagattcttattcgtgggagtcatttcttcagattagtctgctgctaagaagagctaatttgtgccccatacagaaactcctgaataactgataatgcaacagtcatgacaaatgcttcaaatacagagtcaatatacctttgttgattggattagatgacctaaaatattacaagtgacatgattctaaaatagagacaggaaacaaaaatcctttttacgtttaaaaaaaaaaatcagccaggtgcacacctgtaatcccagcactttgggaggctgaggcagacagatcacttgagctcaggagtttgagaccagcctggccaacatggtggaacctcatctctactaaaaatacgaaaattagccagcatggtggcacacgactgtaatcccagctactcaggaggccaaggcatgagaatcgctcaaacctgggaggcggaggctgcagtgagctgagattgcaccaccacactctagcttgggcaacagaccaagacactgtctcaaaaacaaacaaaaaccactgttacagccattactgggcccccttaccttcccatcccgtgattaacctacacaggtcattgtcactcacccaaggcccagccaatgtctcctaactagactccctgcctcctatctcttccctccccaagccatcctatgtacaactgctaaatgaattttcttaaagacctattaccctcctgttcacaaaccttcaaaaactttcactgtctacaggataaaatccaaactccttgggctggaacccaagaccctcaatttgttcaacagattgaaatgccagtagacaggcccctgtgccagatgctaatggcagacacaggtatttagacagctctgtgtccagtccactgttttcggaactcttttgaacatgacctacaataaggaatacattttagactgtaatccagaatacatatatgcaacaaagtttcacaagtcaacacttaccctccctgagacattctcttgtatttcctattctactttaaaaacatttttaatagggaacaagatcttctatattaatttcaccatccactaatgggtcacagtggtctaggaaattccatgacaacacgatccacaatcttttgttccataaatgacccttcttctccagcttaactggtcttattacccaaagatattctcagtcctcatctcaagcctagaattccgtccacttcctctttcttccttaactctttgccttccttccaggcaagcaccgttcatgaactgtcagccctgacctccctgggcatcagggagggtgccccctctgcctcccccagaactagctctcccgttcattaagcaccaaactattcagcactacagtgtctctcttttactataggtcatgtcatgtatgatgccagattgtttaagtaccaggaagccacgtgtctccagatccaaacatggcatcccatacttaggttctcaattcatagcagaactttcagttcatctcttcagttacatcccctattcttcttcacgtgcatatttaaaaggggatcacaaatactggtcatctgatttatgatgtttcagaagttctattttgtcagaaccttcttttttagcatcaacattgtaattattatcttttcagttagattagaaagtctgattggagaggcccttatattatcagccacatccctgacccctgatactcattaaagaaagaaatgtctgtttcagatttgacatgcatgcacagtatgcgttctggcccaagaagaatgcatctgggcagtgttctgggcaaaggggagagtagcatgagatgacggggctaaggagggagggcatgagggtgggagccagataaagtagggccaggcaggttgcagtgaagattctggaaatgggaaacagctgaaggtctaagcagggaactaaccaaaagcatgaaatccctggtgctaaaaaggttggggaggaggcctagcaagagagagccagacattgaccagggtggtgacagcagtcagatggaaatagtggactgatggacacaaaatacattctgaatatacatgctgagattcacaataaactaaatttatcatttagggagtataaaaagaagaatgttcctatgtcaccatttactgagagccttccaatgtatgaactctggtaatccaggaagcaggcattattattcccaacttactgataagaaaacactgagaggttaagtaatttccctaaagccataaaactagtgataggcagagatgaggtcagtctcggatcctaggatggtctcctccaaaatatattttatttaattaggggcctttatggggggtggcaggagaaaggttagggagctagaggtagatgggtgtgggggtgggggggtaaacaaactgacgaagggaacaaacaagaggagagatacggacattcttctgcctcatttggaacttgtcggagtaccagttcccttctgctgtaaaacctgggtgaagaagtgtttgtgactgttacatcacacacaggcatggcccaaggaaggcactgccattcctcaaatatcaagctgcttcttaccttagggcctctgcacttgtggttccctctgagaggaatgctcccttcccctcatatcacttggttgacccctcctactacaaacggcaaaaatgtcaccgtatgtgcccttggcttagtccccgtttttgccagggtggttccttcttgttaaatgtctcctccttagtgagttctccctgctcagctgatttaaaatagtactctgctcccctcacccctaattcactatcacagtctactggttttatcttttttctttcatagcatttatctggttttgtttattgtcctcctttccctgctgccccaagctcaaatgcaagttgtacaagagtaggacttgtgtgtcttaattacactgtctcccaggatttagaacaaaagctggaacacagcgggcacatgacaagatttttgttgaatgaatgaatgatagtgagggaaaggaagaaattcaagatgactactagattttgcgggggtgaggcacagctgtgcttagccaggcgactccaaaggagagcctttgagcagaaggccagcctgagccaaggcctggaggtcaggagtggtggatgggtatgggaaatgggttctggggcagggtggtgtgctgggggcttgcctgggatatggctggagagggaagcaggaggtttctgtaggaatttttaaaagttaccagcatttttgtcctaatgtggaagaagctcgtcacagaattatttcaggaaactgcttttctccaagcaaaatctggtagtgggaaggaggatgtagatacttcctcatcaatgactgctgaaaagatgcagcggcattgtcagtcacagcgaggcccgggtcggggcagaggcatcattgcagtcagagcttggcccaaatggaggccgcagtggctttgttgctccaaatgacatggtttagttattttgatggccaaagagtattctttgtgcatatacattacagtttcttgatcccttcatctgtagatggacaggagataaagtttttggaatctccatgcctgagattaaaaggtgtgggacttcctctaccaggctcatttccttggacctaatatcctctgggtttcttgggtttctccacatggctgtggatgacaggatttcccaaagctttatggctgaagcatattccatagtgtatctgtatggtggtttctttatcccttcagctgtgggtggacaggacaggtcatttaccatgatgtcctctaggttcaacagtgtggctgcaaatgatgtaatttcattacatttttctggatgaagagtattccatttgtgtatatatactacagtttctttatcccttcatctgcggatgaacaggtttctccacatggctgcaaatgacaggatttcatccacttctgtcgtggaagggtattccattctggatatatatttcagttttgtcatcccttcatcaagggatgaacaggttcaactgtgtggctccaggtgatatgatttcagtatatgtgcacagctgaagggtattccattgtgaatgaatactacagtttctgtatcccttcatctgtggatgaacaggtctctctccacgttgctggaagtggggtgatgtcctaaagtttgatggctgaagagtattccattgtgcaaatatcctggagtttctgtattccttcatctgtggatgaacacgactgctttacatttggcctgtgccaatggccatgtggaagtggtcactctccaggtgaactgaaagtgccagactgacattggtgacaaatgaaacaggatgcctttgatgaaggctgtacattgccaagaagagatttgtgtcatcattctgctagaatgtggcaccaacccagatcttatggatgtctatagcaacaatgcactacactatgctgtgtataatgagaatacactactggcagaaaaactgccctcacaccatgtgaatactgaagtgctgaacaaggatactgaagtgctgaacaaggatgcaaacacaccacttttacttgctatagtttgcaaaacacagcaaaaggtggaattttagtgaagaaacaagcaaatgtacatgctgttgataggttgaaaagaacagctctcatgcctgttgtacattatggcttgtcaggtatagttagcattcttcttcaacaaaatattgtctttactcaagagtatgtatgaacagactgcagattatgctatttctggtggtctgacaagcactcacaacaaattttgcaacattaaaaaaaaaagatacttgaaaatggtcttcaaaatgacaacccagaagaagcatccaagaagaatgcaagtttgaaaacaggaggagcaagtgcaaaagattctgggagttctgaagcatctgcattcagtatttaaaaaaaaactgtgtgttgactcatggcctaaaccagatgatgaagacttgacttttactaccaagcagtgtatccctgagagtgtttcaaagtctttacttggaccttcatataaaaaaggaaaaaatatatagtaaatggaaagggagaagggcctcctgaaaaacatccttccctaaagcctaccatggaaatgaaagattctgttgtgaagaaagcaatagaaaggaagaacgaacaaacatccaaagcagaacaagaagtacaagtgacatcagaggaagaacaggaaaagcttgaaagtgaaaataaacagccacaggttgaagaagctagaaagaagcacgaaagttaaaaaaaaaaagtatcaaaaaaacgtatatgatagtacatctgctgacgatgatgataaattaattcaacaaagaaagagtggaaaaacttaccatcagcgatttcctaggaaggagaacaaagagtatgctaggcctgcaaagaaaatgtcaaatgaaaagaaaaaggtcaaaaagcaaactcatttagagatgaacctgatgacttaactcggccctctgaaacagcttcagaggatcatgagaaaccttaccctcattgtaagaagtttatgatgctcattaagcaatatggaatggattgtaatgattctcgtatcctaatggaagtccagaatgcatttctttcatgtgaaaagtcactggaccttaaaaaaa

SEQ ID NO: 683 - DNA, 2149 bp, Homo sapiens
ttgtatcttaaatacaatcaaaacttcatgtttaatagggattcatctgtttcccatactttttacatgttcagttcagacagaactcatggaagaaaagacttttctgtgagatagaacagaccatctgcttgaccggatggctctgagggacagccaaactcccaatggccaaagggctgtgaggaagggcaacacgtatcagaagaattttcagcaagggctgaaacacagtaaggttagccacaaaatggaatgagagaagccctaacccaatgggagtttgcctaattttaatgaacccaaactctaacattgtactggaaaagcagcattaaaatccagcctgattatcacaatttacagaatttctcaccagaggcccacaggtgaaaaagctgcttactctaaagcccttagaaccgtattgtgaactgcgcatgcgagggatctaggttgcgtgctccttatgagactctaatgcctgatgatctgaggtggaagtttcatcctccaccaccaccccgtccatggaaaaactgtgttccacaaaactggtccctggtgccaaaaaggttagggactgctgctttagaatataagaaacaactcaagcagccaacgggtctggagttaacacttccagccctcccctttgtacacactcaacacttcttgctgaactggccgttaataaccacttgtgaaatccctccccacacctgcacttaggcgtttgtctcttcctaccttcctttactgagtagtggcaaaataataggagagtggaagatggtgatgggcaatgaagagggacctatttctgaagaggagatgttttaaagatattttatttttcaataccagtaatgactgaaaattaaagaattaaagcaggaagcaaaacaaaaacaaacaagaaacccaaaacttgcaacctaaactctccgggaaacaaaaaaattgctataaatgttaaaagacttaaagagaacattgacaatgcagccctgatgtacctaatcatacttcaaactgctggatgttttaagctgagaatctccccagtgcctttctagtgctctaaaatcatctcccaaacagatgagaaatgaaacaaacaggtctcccttcttgagtacataatttttataaattgcgtcggacccacagtgaatgtattttagagagtttcaccaaaactatcaaagatcaaacggcagcaaaagatcagggaaagaaggtagaaaaactatgcagtcacagagctaacccgcaagctgcccttagtcctatacacctgaaatcaaatccatagccaatggtgaggaagaccacatcagaggttagctgcatgacagcacagctgggtcctatctccctgccaggggtctcaactgtaactcgcgctccaactgctctgcagtcagggtgccctggatggcttcacagcctggattgaacacagagtaggcgctcttctctccctctttcttctcttcagggcctcgtgtcccgacgtacatccaatagaacaaggacaggacaaaatatgccaggccaaattccagttccacaaacagtcccagcaggaccaaccagagaagaaccttcaagaaggtgatattggtcaggaaagactggtcccagcacgacggcagaggaatggctgtgttccatggtgtctctgatgtgctgccctggggctgagccgcttcctaggatacacaaacaaacaaaagaaagaataaagggtaatggagctgagatgatcaaaactaatctgaaaaggcagttttcattgctctgagaaggctgctggctcattgatttctattctttcatgcaactctctaaaacaatcatctccaaagaacctatgtgctctactccaactgaatcaaaactgatcagcacttagtgagatgtgacctaataaaagccctacgtattcagacagattcttattcgtgggagtcatttcttcagattagtctgctgctaagaagagctaatttgtgccccatacagaaactcctgaataactgataatgcaacagtcatgacaaatgcttcaaatacagagtcaatatacctttgttgattggattagatgacctaaaatattacaagtgacatgattctaaaa

SEQ ID NO: 684 - DNA, 732 bp, Homo sapiens
gatctgatgcatgaaaattgcttgttgaagagagatattgcctttattgtgtatgtaagtatacacaataaaaaataggaacctcgaaagggaaaaaggacattgaaattgttaaagaaatgaatgatgaccttcaagagactataaaactgaatggaaaaacattaacaaaaacagtatcccagtatggtcaacagcttaacgacctcaaaactgagaatacaatgctcaagtctaaactggagaaggaaaatcaaaacaaggaaagactggaagctgaagttgagtcattccatgctagactggctgctgctataagtgagtgtgatcaaagtgtgaaaacaaaaagagacctagaacttgctttacagagagcacaagacgtttctttacaagaaagaaaatgagttctgatatttctgaactaaaagataataatgagtttttaactgagcaactttccgaagctcgaattcaataccctaaaaagtaaactccatgacacaagaaattctctcagagaaaaggttttggttttataaagtgtacaaaaggacctaagccaagtaaatcctttggaaagtgggactacgtagaggagagaatatctcaactacaacatgaaaatctgttgcttcaacaactagatggtgctcataagaaaggggataatgaacaaaaggtaattaatatccaaggatgctgtcttgagagtgaaaaggaaggtcttct

SEQ ID NO: 685 - DNA, 566 bp, Homo sapiens
ttttcttcctattttaacatttattgtttacgtcagcggctcttaatctttattgtgccagagatcacacctgggaggctgttaaaatgcagattctcaggattctaccctcagacattctgagtcagtgggggccctggaatctgcattttaacattactacaggagattcctatgcaggtgcgtggtctatagaccatacttttcaaaacgttcatccatgacttgttaaggaaagagtatttttcacatagaagtgaaaatcctatatagtatagaatttaggactgcaagtgatctctcccttgaacacacacacacacaccttacacctttataaacattcacattatgtcctgtactttataatacagtttgtgtgcactcatcttgtcttctctctcagatttttgagaatgggatccaagtctttatgtagcctagtgctccaaagttgtgaaataaaattatgtgtgatagaaaccaaagcatatggttcaaaagttactttctttggcttagggagttggttttctctgccaactatgtaaattcttagtcattcc

SEQ ID NO: 686 - DNA, 686 bp, Homo sapiens
  misc_feature (95)..(95): n equals a,t,g, or c
caccaaggccagtttggaagcgaacggctaccccgaaattaagatactacagcgtgagttatgagaaagcgccacgcttcccgagggaagaaagncgggacagttatccggtagccggcagggtcgaaccagaagagcgcacgaggagcttccaaggggaaaacgcctggtatctttatagtcctgtcgggtttcgccacctctgacttgagcgtcgatttttgtgatgctcgtcaggggggcggagcctatggaaaaacgccagcaacgcggcctttttacggttcttggccttttgctggccttttgctcacatgttctttcctgcgttatcccctgattctgtggataaccgtattaccgcctttgagtgagctgataccgctcgccgcagccgaacgaccgagcgcagcgagtcagtgagcgaggaagcggaagagcgcccaatacgcaaaccgcctctccccgcgcgttggccgattcattaatgcagctggcacgacaggtttcccgactggaaagcgggcagtgagcgcaacgcaattaatgtgagttagctcactcattaggcaccccaggctttacactttatgcttccggctcgtatgttgtgtggaattgtgagcggataacaatttcacacaggaaacagctatgaccatgattacgaattcgagctcggtacc

SEQ ID NO: 687 - DNA, 1796 bp, Homo sapiens
attcaacatttccgtgtcgcccttattcccttttttgcggcattttgccttcctgtttttgctcacccagaaacgctggtgaaagtaaaagatgctgaagatcagttgggtgcacgagtgggttacatcgaactggatctcaacagcggtaagatccttgagagttttcgccccgaagaacgttttccaatgatgagcacttttaaagttctgctatgtggcgcggtattatcccgtattgacgccgggcaagagcaactcggtcgccgcatacactattctcagaatgacttggttgagtactcaccagtcacagaaaagcatcttacggatggcatgacagtaagagaattatgcagtgctgccataaccatgagtgataacactgcggccaacttacttctgacaacgatcggaggaccgaaggagctaaccgcttttttgcacaacatgggggatcatgtaactcgccttgatcgttgggaaccggagctgaatgaagccataccaaacgacgagcgtgacaccacgatgcctgtagcaatggcaacaacgttgcgcaaactattaactggcgaactacttactctagcttcccggcaacaattaatagactggatggaggcggataaagttgcaggaccacttctgcgctcggcccttccggctggctggtttattgctgataaatctggagccggtgagcgtgggtctcgcggtatcattgcagcactggggccagatggtaagccctcccgtatcgtagttatctacacgacggggagtcaggcaactatggatgaacgaaatagacagatcgctgagataggtgcctcactgattaagcattggtaactgtcagaccaagtttactcatatatactttagattgatttaaaacttcatttttaatttaaaaggatctaggtgaagatcctttttgataatctcatgaccaaaatcccttaacgtgagttttcgttccactgagcgtcagaccccgtagaaaagatcaaaggatcttcttgagatcctttttttctgcgcgtaatctgctgcttgcaaacaaaaaaaccaccgctaccagcggtggtttgtttgccggatcaagagctaccaactctttttccgaaggtaactggcttcagcagagcgcagataccaaatactgtccttctagtgtagccgtagttaggccaccacttcaagaactctgtagcaccgcctacatacctcgctctgctaatcctgttaccagtggctgctgccagtggcgataagtcgtgtcttaccgggttggactcaagacgatagttaccggataaggcgcagcggtcgggctgaacggggggttcgtgcacacagcccagcttggagcgaacgacctacaccgaactgagatacctacagcgtgagctatgagaaagcgccacgcttcccgaagggagaaaggcggacaggtatccggtaagcggcagggtcggaacaggagagcgcacgagggagcttccagggggaaacgcctggtatctttatagtcctgtcgggtttcgccacctctgacttgagcgtcgatttttgtgatgctcgtcaggggggcggagcctatggaaaaacgccagcaacgcggcctttttacggttcctggccttttgctggccttttgctcacatgttctttcctgcgttatcccctgattctgtggataaccgtattaccgcctttgagtgagctgataccgctcgccgcagccgaacgaccgagcgcagcgagtcagtgagcgaggaagcggaaga

SEQ ID NO: 688 - DNA, 912 bp, Homo sapiens
tactcatatatactttagattgatttaaaacttcatttttaatttaaaaggatctaggtgaagatcctttttgataatctcatgaccaaaatcccttaacgtgagtttcgttccactgagcgtcagaccccgtagaaaagatcaaaggatcttcttgagatcctttttttctgcgcgtaatctgctgcttgcaaacaaaaaaaccaccgctaccagcggtggtttgtttgccggatcaagagctaccaactctttttccgaaggtaactggcttcagcagagcgcagataccaaatactgtccttctagtgtagccgtagttaggccaccacttcaagaactctgtagcaccgcctacatacctcgctctgctaatcctgttgccagtggctgctgccagtggcgataagtcgtgtcttaccgggttggactcaagacgatagttaccggataatgcgcagcggtcgggctgaacggtgggttcttgcacacagcccagcttggagcgaacgacgtacaccgaactgagaatacatacagcgtgagctatgagaaagcgccacgcttcccgaagggagaaaggcggacaggtatccggtaagcggcagggtcggaacaggagagcgcacgagggagcttccagggggatacgcctggtatttttatagtcctgtcgggtttcgccacctctgacttgagcgtcgatttttgtgatgctcgtcaggggggcggagcctatggaaaaacgccagctacgcggcctttttacggttcctggccttttgctggccttttgctcacatgttctttcctgcgttatcccctgattctgtggataaccgtattaccgcctttgagtgagctgataccgctcgccgcagccgaacgaccgagcgcagcgagtcagtgagc

SEQ ID NO: 689 - DNA, 706 bp, Homo sapiens
cagcggtggtttgtttgccggatcaagaactaccaactctttttccgaaggtaactggcttcagcagagcgcagataccaaatactgttcttctagtgtagccgtagttaggccaccacttcaagaactctgtagcaccgcctacatacctcgctctgctaatcctgttaccagtggctgctgccagtggcgataagtcgtgtcttaccgggttggactcaagacgatagttaccggataaggcgcagcggtcgggctgaacggggggttcgtgcacacagcccagcttggagcgaacgacctacaccgaactgagatacctacagcgtgagctatgagaaagcgccacgcttcccgaagggagaaaggcggacaggtatccggtaagcggcagggtcggaacaggagagcgcacgagggagcttccagggggaaacgcctggtatctttatagtcctgtcgggtttcgccacctctgacttgagcgtcgatttttgtgatgctcgtcaggggggcggagcctatggaaaaacgccagcaacgcggcctttttacggttcctggccttttgctggccttttgctcacatgttctttcctgcgttatcccctgattctgtggataaccgtattaccgcctttgagtgagctgataccgctcgccgcagccgaacgaccgagcgcagcgagtcagtgagcgaggaagc

SEQ ID NO: 690 - DNA, 631 bp, Homo sapiens
ccccacttcaagaactttgaagcgccgcctacatactcgctttgatatcttgtaccagtgctgctgcaggtggccaattaagtcgtgtctttaccgggttggactcaagcgaatagtttccggataaggcgcagcggtcgggctgaacggggggttcgtgcacacagcccagtttggagcgaacgacctacaccgaactgagatacctacagcgtgagctatgagaaagcgccacgcttcccgaagggagaaaggcggacaggtatccggtaagcggcagggtcggaacaggagagcgcacgagggagcttccagggggaaacgcctggtatctttatagtcctgtcgggtttcgccacctctgacttgagcgtcgatttttgtgatgctcgtcaggggggcggagcctatggaaaaacgccagcaacgcggcctttttacggttcctggccttttgctggccttttgctcacatgttctttcctgcgttatcccctgattctgtggataaccgtattaccgcctttgagtgagctgataccgctcgccgcagccgaacgaccgagcgcagcgagtcagtgagcgaggaagcggaagagcgcccaatacgcaaacagcctctcgccgcgcg

SEQ ID NO: 691 - DNA, 87 bp, Homo sapiens
ctggggccagatggtaagccctcccgtatcgtagttatctacacgacggggagtcaggcaactatggatgaacgaaatagacagatc

SEQ ID NO: 692 - DNA, 4813 bp, Homo sapiens
gcgcggttgtgagtagtaccgggagtggggtgatcccgggctaggggagcgcggcggccgcgatcgggcttagtcggagctccgaagggagtgactaggacacccgggtgggctacttttcttccggtgcttttgctttttttttcctttgggctcgggctgagtgtcgcccactgagcaaagattccctcgtaaaacccagagcgaccctcccgtcaattgttgggctcgggagtgtcgcggtgccccgagcgcgccgggcgcggaggcaaagggagcggagccggccgcggacggggcccggagcttgcctgcctccctcgctcgccccagcgggttcgctcgcgtagagcgcagggcgcgcgcgatgaaggcggtgagcccggtgcgcccctcgggccgcaaggcgccgtcgggctgcggcggcggggagctggcgctgcgctgcctggccgagcacggccacagcctgggtggctccgcagccgcggcggcggcggcggcggcagcgcgctgtaaggcggccgaggcggcggccgacgagccggcgctgtgcctgcagtgcgatatgaacgactgctatagccgcctgcggaggctggtgcccaccatcccgcccaacaagaaagtcagcaaagtggagatcctgcagcacgttatcgactacatcctggacctgcagctggcgctggagacgcacccggccctgctgaggcagccaccaccgcccgcgccgccacaccacccggccgggacctgtccagccgcgccgccgcggaccccgctcactgcgctcaacaccgacccggtgagaggccgggcgccggccgtgggcggacgccgcgggggatgggaggttggtggcgtggtggcgggacgcgggcgctcaccgtcctccgggcaggggcgggccaggaatgacagccccctccccctgctcctccgggctcccccgggccgccagcagccggccgggctcggcgagcgcgggtccgggagaacgcgcagggcgggactcggggctgtgggcgccctgggctgtcaagtcccgcctgagcccggaggggcccccccggctacaggctggggtgggggcgtcggcgcgccagcctgatttccgaggacaatccaggaccgtgtcgagcgcgttgtttgcgcctgctaacctttcccttggtgttcggttgctgttccaggccggcgcggtgaacaagcagggcgacagcattctgtgccgctgagccgcgctgtccaggtgagcgcgcatttcccgtctcgggtggccggtcaccagagacgcccgtccccgagggcttccggggccaggcaccgcggtgttctttgcccccagcgtttctgagagcaaactcccaaggaagtaaatcccctctctccctgccacctaagtagcaagtaaacccgtacttagccttagaactcgaggttcagtctcggtggagacgggtcagcccttgtccccgccgtccccgtgttttttctggtggtcagcgggctcttctgccttccctagttcccgagggagggcaccctcgtgggcatgggagctgccccggtgtcctcccgtgcagtctgtcacccacaaagggggacgcgggcagggcgccggagtgggtcccctctccgggcttcccgagggccgcagctgcctgctcggcgcctggcccggccgcgggcgggtgttgtctgacctggtggtttgttttgggttgttgatcaagcatgtcttgagtttggtcggtggcgccagttagtctgcagcgagaaggttcacacaccccctctattcattcctcttccacaggtgtgcggccgcctgagcccgagccaggagcactagagagggagggggaagagcagaagttagagaaaaaaagccaccggaggaaaggaaaaaacatcggccaacctagaaacgttttcattcgtcattccaagagagagagaggaaagaaaaatacaactttcattctttctttgcacgttcataaacattctacatacgtattctcttttgtctcttcatttataactgctgtgaattgtacatttctgtgttttttggaggtgcagttaaacttttaagcttaagtgtgacaggactgataaatagaagatcaagagtagatccgactttagaagcctactttgtgaccaaggagctcaatttttgttttgaagctttactaatctaccagagcattgtagatattttttttttacatctattgtttaaaatagatgattataacggggcagagaactttcttttctctgcaagaatgttacatattgtatagataaatgagtgacatttcataccatgtatatatagagatgttctataagtgtgagaaagtatatgctttaatagatactgtaattataagatatttttaattaaatatttttttgtaaatattatgtgtgtgtttttttttaatctatgggaatatttcttttggaaaatcatttttcagctcaattacagagctcttgatatcttgaatgtcttttctgtttggcctggctcttaatttgcttttgttttgcccagtatagactcggaagtaacagttatagctagtggtcttgcatgattgcatgagatgtttaatcacaaattaaacttgttctgagtccattcaaatgtgtttttttaaatgtagattgaaatctttgtatttgaagcatacatgttgaaaatacaccttatcagtttttaagtacagggttttatagtgtaatatatacagagtaagtgtttgtttttgtttttcaactgaggtcaaaatggattctgaatgattttgcatatgggatgaggaaatgcttggatccttaaggagtttacgaaatctgctgttttatcaaagtgaaaaaaaattgcttattactcttcattttacactaaagcttaatgtcactaagtttcatgtctgtacagattatttaaatcatggaaatgaaaaaaatgttctctgcttgctaccaaaggacaaactcttggaaatgaacactttctgctttccttcctccaaagaattaataggcaacagtgggagaaaaaaaaggcataatggcaaatccttcaagcagggataaaagtcgatcttcaaacattaacttaagcagaccaaaaattctgatgaccgcatctagattatttttttataaaaatgattttcactatagctatgttacgctaagctactgtccaatctcttgtgatgtgtaacttttacatgtgaatattaaagtagatttctctgtcttgtactgtgatttctggtctcatttctttaaaaccttactcttatttttcttttaaggctcttttttctccttaaggaaggtaatattttctaggttagataggactatcagggtttgtgaacattatgcatttaatgttatgggtactttacacacaagttagatggaatttttagagtgaaagaattaagtaggatttaattgggtgctttgtaaatagtcaactgtgtgtataacgtggtctgtttgatttttaaaaggaaaggatttgtttcagattatacaagaataaaagtattatagacccaagggacttcttatgaggtcaaattcagatatttatatgaatatgaaataccatggtccctagtagtcagttgaagtggcaatgtctaaacagaaatgaacaaaactaatgctagcaggttaaaatcaatcaaaatgtttaaaaattgattctgtcctcagcatgttatttcctcagctctgataatttactggtcttgagtattttgagaatttgatgttgaacgttataaagtcaaagaactgcttgtttagatgaggtttatttttatttttgatattattcattcttgtcacacatcaagaagaaaacactagagtgctgctggaattccaaatctgaagaattctaacgactgcattctttgttattaaaaagggcacaatccttcctttttatttggcagtttaatttcagtaggaagcatgtcacatgtgcactgttggttagaattatgcatctgtcatgcctgactgctgaaccctacctaagccttttggcgcagtttaaaacttatactggtggactgtgaacctcaaaacaaatgggtatttttgggttttgaggatagatgttactccttaaagtttgtatttggggcatgaaaaactactgaaagaagaaaagtgctacagatactacatttcaaagagttggcattttccctttggccactcaagcagcatttgatgtatctaaagaaacaaagtcattgtttattttttaaaaaattatatgcagttgtacaagatactacattccattgaaatgttggctatgtcctaaccaggcaaccagataacaaaaacattttgagtcttttatctaggtagttctaattattcagctacttagtttaacaaaggaaaatatcctgacttctctcatttcatttgtagacttttcattgtataggcacaaccaaagagtcagactggtttaaaactccagaaggaaaaaaagtatcccacacagtggatgttgtttctaagaatgctacaaaatcctgacatctcagacatctcaatgttaaaggaagaaaaaaaataccttttcatttcaaagaactaatatactttgatattgtgtaaaccttactcaagtttattgtcaagctttaactgcctttttagaactttttaaaatttcgagcccacaaatctattgtattagttgccttctataacaataaatcttcactgagcaaaaggc

SEQ ID NO: 693 - DNA, 509 bp, Homo sapiens
ttgctaagctttagcattttttaaaaagaaaacggaaaggctacacattccattccatcattatggtttcggcaaatgtgaaaaggcgaataatgaaacggaggagggaaatatagaacagaatgaacgtgccttcttgaacagcgcgtctttcttaaggcactggaatcccacggatggagtgatgggtggcggagggtccctgggcgccgtgctattaggagtggcagggtatccgcgagcagggcccaggcgctccctcagcagcctagtcgggataaggggggcggtggagagtgaattccggccgcacattcccgcagttcttcgcaggaacttcgctctctcttttcccctcccttgggcacacatcagcctggcccgactcccactcagctctcttttctcagaaccccgacccacagcgttgacggaatggagtgcccttcccattggcccgagcgtcattccccgaggtggcactgcccgcctgattggctggccactcc

SEQ ID NO: 694 - DNA, 2017 bp, Homo sapiens
gattttactgtttaatagtacaaaatttttgcaaaattagcagataatactcatcatttctaacttctgaaatcttttgtttaggtgagacatggaatccattaaaattgcattatcagttaagaaatgtacgggaacgattagctaaaaacctggtggaaaagggtgtattgacaacagagaaacagaacttcctactttttgacatgacaacacatcccctcaccaataacaacattaagcagcgcctcatcaagaaagtacaggaagccgttcttgacaaatgggtgaatgaccctcaccgcatggacaggcgcttgctggccctcatttacctggctcatgcctcggacgtcctggagaatgcttttgctcctcttctggacgagcagtatgatttggctaccaagagagtgcggcagcttctcgacttagaccctgaagtggaatgtctgaaggccaacaccaatgaggttctgtgggcggtggtggcggcgttcaccaagtaactctgctcggggtgaaccattctcctttctctcaagtaaaccagtagtttttcttctgttgacttctggttttctgtaatttgtactttcccacactataattggcttctgttttacaaaatggtgggtggctttttcttttttgtacgtgtacaggattctgctggtacgagaggccttcctctttctgtttttaaaaaaagttttactgccatattggcattccattccctgttgccatcctcactgttacctgttttgggtttctggtctactttgactttcaaagtacctccagcctcctcatacgcacagcttttggatgacctcagcttgagtttctccatatgtgcatgtacatctagcattctgcctacagttcagacagaagtcacaaaaaggccttcaactcaccaaaggtaaatatctgtatctattaggacattttttacatagacttcagttgagatgtatacttagcaaaattatttttaaattgaaacagcacagtaaatacttaatataaaatgtcccttggattttgcttcccatgtaaatctattgtattattacacttgttataattttaactataaaggtccaattgtttcacagagccagtttgggatgggctgcattccatttatgctgtatatagtttgaattatatataaattaccccttcttctggccacccctgctcccatcttagtattttgcaagatctaatcagttgtacacctggtgcccctcgcttgcttcaatcatggttatttgatggcaaaatcgacctcttgtcgctgaaggagagagaaaagatgtgtgtctgattggtcctgggattttttgagctgtgccatttatggtactctttgcctatgcatcccctttttagattttttttaaattttatcttactgtttttataatttctattgggaagaggcttgtgaccagtaccaatcttgagtttctttttctgtccacaagtaaattaatatctgctctgaaatgtcatttatctactcacacattcttggggaaaaaaatcaaatgtcagtcctagcagatgttgcatgtaaattggtagcaagtaatgattacaacccagaggattaagaattttgtaacagaaagctctatgttttaattttttatatacaattaggataattagcattgtcagactataaacctttgctttttaaagtttatttttactatttctttatcactttattgtatcatcaccattggtttcataatgtaaatactatatgttgaacaaattaaatgtcaaaattttttattaccatagtccatgttaatagtggggctttcaggtgtttagagattttttttgttgttgttaacattcattgcaaaagtactagatggtgtataactctagagttgaattttaagggattccctaatatgtatactatctttttatctgaagtaataaataaacaatgatcttgaaagtgcctgaatcagagcaagca

SEQ ID NO: 695 - DNA, 2017 bp, Homo sapiens
gattttactgtttaatagtacaaaatttttgcaaaattagcagataatactcatcatttctaacttctgaaatcttttgtttaggtgagacatggaatccattaaaattgcattatcagttaagaaatgtacgggaacgattagctaaaaacctggtggaaaagggtgtattgacaacagagaaacagaacttcctactttttgacatgacaacacatcccctcaccaataacaacattaagcagcgcctcatcaagaaagtacaggaagccgttcttgacaaatgggtgaatgaccctcaccgcatggacaggcgcttgctggccctcatttacctggctcatgcctcggacgtcctggagaatgcttttgctcctcttctggacgagcagtatgatttggctaccaagagagtgcggcagcttctcgacttagaccctgaagtggaatgtctgaaggccaacaccaatgaggttctgtgggcggtggtggcggcgttcaccaagtaactctgctcggggtgaaccattctcctttctctcaagtaaaccagtagtttttcttctgttgacttctggttttctgtaatttgtactttcccacactataattggcttctgttttacaaaatggtgggtggctttttcttttttgtacgtgtacaggattctgctggtacgagaggccttcctctttctgtttttaaaaaaagttttactgccatattggcattccattccctgttgccatcctcactgttacctgttttgggtttctggtctactttgactttcaaagtacctccagcctcctcatacgcacagcttttggatgacctcagcttgagtttctccatatgtgcatgtacatctagcattctgcctacagttcagacagaagtcacaaaaaggccttcaactcaccaaaggtaaatatctgtatctattaggacattttttacatagacttcagttgagatgtatacttagcaaaattatttttaaattgaaacagcacagtaaatacttaatataaaatgtcccttggattttgcttcccatgtaaatctattgtattattacacttgttataattttaactataattgtccaattgtttcacagagccagtttgggatgggctgcattccatttatgctgtatatagtttgaattatatataaattaccccttcttctggccacccctgctcccatcttagtattttgcaagatctaatcagttgtacacctggtgcccctcgcttgcttcaatcatggttatttgatggcaaaatcgacctcttgtcgctgaaggagagagaaaagatgtgtgtctgattggtcctgggattttttgagctgtgccatttatggtactctttgcctatgcatccccttgttagattttttttaaattttatcttactgtttttataatttctattgggaagaggcttgtgaccagtaccaatcttgagtttctttttctgtccacaagtaaattaatatctgctctgaaatgtcatttatctactcacacattcttggggaaaaaaatcaaatgtcagtcctagcagatgttgcatgtaaattggtagcaagtaatgattacaacccagaggattaagaattttgtaacagaaagctctatgttttaattttttatatacaattaggataattagcattgtcagactataaacctttgctttttaaagtttatttttactatttctttatcactttattgtatcatcaccattggtttcataatgtaaatactatatgttgaacaaattaaatgtcaaaattttttattaccatagtccatgttaatagtggggctttcaggtgtttagagattttttttgttgttgttaacattcattgcaaaagtactagatggtgtataactctagagttgaattttaagggattccctaatatgtatactatctttttatctgaagtaataaataaacaatgatcttgaaagtgcctgaatcagagcaagca

SEQ ID NO: 696 - DNA, 2017 bp, Homo sapiens; identical to SEQ ID NO: 694

SEQ ID NO: 697 - DNA, 2595 bp, Homo sapiens
caattatgtttgaaaataggatttgcactgctttattttaggtggctgggagttttgattgcatattttgttatagttcatagttggaaatatttgcgtaaatggttttcaacaagcctgaaagtaatttcaagaatgtttcagttatagaggtaaaatttgcacacaaaacatcttaggcactttttaacattctcaatcatgggaattttaacttttgggatttgttgaaatcttttttattatccttcacaatttcaatgcttcttttagtcagaaatgattcagggttatttgaggggaaaaaaccccatagtgccttgattttaattcaggtgataactcaccatcttgaagtcattgtccggtttccgtagcagttttgaaaccttagtacctttttaacagcatgtgggtgtcagtgtcattattagtctcctaataagttcctctgaagactgctatcagtctcttggactggaggtacaaataatttagaaataaaagatgataacctaacactatcatagttattaatgtgatcctaaaattgtttcctaaatcagcatttttctttagtcatttaagaatttaccagaaatatttgctcaatatgatcttgatattcctacaaagaaaaaagaaggggtagggatttggctatgccttcactacaacattagaatattgtaactcacatgccttctaaacgtgaactaagatttcctttggcaatatcatattctaaaagtaataaattccaatacaagttacatacatttaaaaaacattttacagattttatggtactaatgaaatttacagtgatagaacaaaagaggattagtagaaaatacattattagaatataaaaaatgttattactgaggaaagggaggagaggacaagtgtaataaatcaaaattgacctcaaaagaaaatgtgtaacagagttgaggttgttaaaacagaaaaggttctgaataatgaagattaacctaatgcagaattgctaggtaaagaggtcaggggaatgctaagccagttcttaagacttctctgtcctctgctttgctgttatccttaaggcatatactttgtctttctgcagaaaattctacctggctacaattactttgaacattaatgttgaaaaagaaaacaaccaaagaaaattggtacttacccttctacaaaagaagtgtgactagatatcaatcagtaattaacatatcaaggagctcttctagctaaatgaccatccagtagagatttcccacattcccatgaatatcaagaatagttgtcagaatatgtatgtacctgagcatatgtacacagacaagggggatgttgtggaatatggcaatagcattgttcttctcccctttcaaattgcctttcttgaccttatgccattccatatatatctgagttgtgcctcatttatttattggcaatacctagtgatacggatttagctaacaaaagatatgaagaactattatattgaggcctgtcctctacataccacacttaaaagatggtgaactgtgagtactacttaggttgacagcaacaaagcataagacaagccccaggtaaacgtctaaactgtttactcacattgtcctactccagccccttcaattatttcccatctccacaaatagtcgggggaaaaaattaaaattttcctttatgattcttactgttcttcgcagctcatcttttcctgcttagaattaaccattgctaatttaaaggagcagctagctgcttttctgtcagtctgaagcgtagtagtggaagaggtagtaagcaccagctgcctctttgctgctttgttttcctcctgattctcttaaatttgggttgcaaagctatcccgccccccaccctgccccatgaaacttgagcattcaaatgaagattcagcagtgtctgttcttcatttctatagccaaagctgttagttaaaatcccaaatctatagcatttaaagataccaaatagaaacaccttccagctttaaaaaaaaaaaaaaaaaagtcttccctctgctttattctcactttcttaaaaacacttattctgggtggtactttttaggtaagaaactactgagtttcaggaaaaatgctagctactctgcagttaccgtgctttggacttgcagttatcatagttttgggagagtcagtattgtttaacaaatgcaagtgagaactagaagggttaataaagttgctccttagagtggtgtcaaaccagaaccgagacacttaaaaagtacttcattttttgaatggaaaatattggagaaaagtatgggagatgcaggtagcatgtgagtaaatactacggtctagccttcgagcatcccaaattccgggggtaacttgacagtgctgtgctctcctttgtcatttatatctggcttaggaatggaatagtaataacaagatgccagtgatttggaatagtttgttatagaacattcagtgcaaaatagtgaaaatgtttggtcttcagaagtgctgtagttgttggtcattgccttaaagcagtctgcttgacgctaggagcactgaa

SEQ ID NO: 698 - DNA, 3998 bp, Homo sapiens
gaagggagaagaacccttgttcaggaagccttagaaagggatccttaaaatagtactctacgcagacaagtgaaaattcttttaaactggatattactcaacatgttttcagatgtttccactacattgaggcaaactttttaaaagtggaatgcaaatagcattttactttagtatttctgcttttttctttctgtttctttggtaattgaaagtttgttgatgaatatttgtgtaaaacgcattcaagtctataacctttccaattacctgtggcccttagtcccacaggagtccctgttggaagggggtaaacactggatattaatgttgctgagtgagtctttctagccaggacaagctgattggaatttttgaatggtagagaagaaacagcacaaaggcacttgccattttaagtgtttggagaaagagaaccttttaagtttggattgggtgagctttcttctaaaaggagcttctgaagtaattgcaaaggaatagaatcgactatttttatagtatatttaatatatttgtatataactataataggaaccctctacatgcctcccacttttctaatttacttccccttttgccatagcactagtatagcctcatccgcatgggtaatgtgcctattgtcagcctaccaaaagatagtgctgctgctttatgagacaggtgagaagacccaactctcatgcctggggatcctttacggaaggaatagcacacacttttaaaacaacataccacagtctaaaagcatcattttgaaatgtaacaagcactttattgcaattactcattttgataaagtttattcttaggcgttaaccatttctaaaggatccccaaatcatcacttacttaggtgaaattatataaaatgacacatttctgagaaatgtttaggtccagtgaaccgtagttggtttatgggagtgatttcaagatagccaaatgaactttgatttttgttttgaatgtggtggagtcaagagattgtagatgcctagtttgatttaaacactattgtaaacctatcttgcctattgtgtggacaccaaaagagaccaatgagcctgtttatttttcagaggtctaggaaaattgcatccgtgtgagtagatgtacagaactaatctaaaagtgattgctagtaacattttagaatataataatttcaagaattattctgagtgttttaaatgtgccctgaaatgttggcatgtcatttcagcatttccatttgaattgctcttgtaatatttttgcacaaaaaggactgagaaaaagaatactttggttaaaggaaaaaaatagtataatttggtctttaattttaatgtctcctgtggaaacactggggatgaattttgttggcacagttattcaggatatttaaaacagtgttgaacagttcacaagaaattaagcaaacttggattttaaaaattaaaatactttctttccatgtgactgttttgcatagttttttccccctatgtcataacactacattccttgtttttcttaaataaaatactctgcaggttttgttgtgagtgtttataacagtattttgtaagctgcctgggtttcctcagggaaacattatttagtggaataggatatagtttatggagagacaactaagtgaaattccatcaccaccaccagcaaacactgaggtgctgcattaagtgacaatcaaactagtaagtatttatgaaagaatttagaaaggggttcaaagaagcaattgcttttaaagcagttctctggggttcttgaataaaaatggctaaatgtatttatttatattttaaaatacctgtgtgttctgttttctcatcaaagtgatttcggtgtcatgtatttaatgtgtggtttgttttgttttgcaccatattcttcttagggaactggctctgatttggggtgcagtcaccaactctcatgataatctttacggacagtctgaatctactttacttcaggacggcagtggaggggccaactccagatgcccctgcacttccctcctcaagtcatctaagaaagaattttagaaataactcctttcaaatctgattcatacagttccaacctttttctagtttcacttgctgccttctttgttttatgggcactttttgtgtgattacttccccaacacagtcaaaggccagtatgacagaaccaatggcacatgatgcctctattttgcccatttggggaaatgttagtaaaagaaatagcatcttttaatggctgtcattatcatatccatattaaaatccatttaaagttcttaaatttggcggaataatgtatacaggctgtaaacttctacaaaaaatgtttgctgtctttaatatggtgtcaagttacttggtcctttgaaaacaaaacaaaacttccatacacagcactgcccagtaaagcagtgttggaatattggaaacctagacatttgaggatccttcttgctcacaagcattggaacagaatcctccactttaggactcagagaagctatggagtcccacaggctaggtatagcacacaacttagagaacggtagttaaagcacgtcaaccacaattgaatttaatgatctaaaaaatatttcttaactctgagggttaaactgaagatacgttttcaaataaaagcttttaaatttcttaggaaacaaactgtgacatcgcttttaaaaatgacattcaaatgtttataatgtgtgtttttgagttggcttggactagtgcaagttcactgctggcaatggttatgccagtagttaagttaaaataagttgttaccttcagattgatgtcttgtataaccagacaatcatcttcaagcaaaaaaattggccaggaaatgtctttttaaaaaaaaaaaaaaaaaaaaagatgtgtcagccagaacagttaccattcagaccatactggaatgattttgaaatctttactatggtttaagttggggaaggcctcagtatggcattttcatattcactctatgtaaagattgaagcccaaagatgagttaaattcagtgctgtattgaaccagtcagtgcaaaaaaaaaaaaaaagtttacctttgtaatttttcatggtaacatcagttggtagtgtttaaaacatgcaccaaatcctttataatgttctgtgtggtcctcaatgtgatattcttgacattgctgtccttactgcttggttcttggttttaaattaaaaagtagatgtagctcatcatttttacttccaaaacggtggagctaaaaacggctaattgatcttgagataagaataccctttactaaggcaaagatttaattgaaatccaaaatgatttatagaaacgaaaggcattttccatttgttgtcttctgccgaaattctgaattgcatacacacatgaaggataatgaatggtttcaacggtgctatattaggttctctgattttcatgacctatgtatgtttggaaatacaatattgtataaaatgtggatcgttttgttaccgatttaatattgccattttaatttggtgtaacaattggttacacttgtttttcaaagctatcctttgaggagaaagtcaaaatgtgttgttagcctacctccactcaggcctcttgctgtgtaatcattattccaggttatgatgtgcatagcttttaaaactgcgtgtactattattctgctctttcccatactcttgtcatgtattcagaacctaaacttatagcaaaagagccaagcagtagcagtttttgtaaatgtaaaaataattagatccagactttgtttccttcaattttaaaaataaaaaatacctcagtgctatgtttttcagttatcacctgcatttctcaaaaaataacacctgcttcatgtggcacataacttgtaagaatcacattttggattttaaagaaagactattaaatattttaagatcactatcaatg

SEQ ID NO: 699 - DNA, 777 bp, Homo sapiens
tttttagacttctaggttgctccatgggaatccctcaactcaactcattctctctgctgcatttcctctacaacagagcaccttccctcagtcacatcaccagcaacatcagtctcagcaacagcagcaactcagccggcacaggactgacagcttgcccgacccttccaaggttcaaccacagtagcacacgtgcttcctctcttgacatcaagggaggaaggggatggcccattaagagttactcagatgacctgaggaaaggagggaaagttccagcagtttcatgagatgcagtattgagtgttctagttcctggaattagttggcagagaaaatgctgcctagtgctacagatgtacattaaataccagccagcaggaggtgatcataggggcatagccagttctgacagtgttttaggtgcctggatattttttgatggaaaaagaatatattgccaaatattaagaagctcagctatgaaatgacctccagggaatcagaaaggcactaatgatgttagtaacttttagtggttctgtgcctcttatcaagtgttacagaggacataccactgccatgtcaggggtttgcttacagtgatgccatgaagacagtccagtagacttggtagcgaccccctcccccaacccctctcccttttcagataatgatggaacagtaattactttcagaatgttgtgtgggttcaaattctctatgtacagatgatgtaaaaatatgtatatgtctagataaaaggagagaaagcaa

SEQ ID NO: 700 - DNA, 2632 bp, Homo sapiens
gaattgtactgtataaactcgaattattcttcagctattttcttctcatttgtattatgttgtactatatttgggctttggtacttaaggtctgatctcagcaatctgaaacagcctttgcaccgcaagagtcttccccaaacattcctttttttttttttttttttttttaaatattgctcccattatgcccaagaatcaaagattcttttgtttgggtggaggactctctgtccacttagctccctcccaactcagctacagattaggtttgtttcaataacataaggactgttctccaaaagctctggcaactgtggacaaaaagggcttcttcgagctattacacaacatgtgactttgctaaatcaaacctttatttataagatatggaagaatcagttatttgtgtgataagacatgcgaattctaggatagtaggacctaggcagatgtccacatgaacttgagggactttaaaaatcttaggattttaactataacccactttactccaacaaaatagaccaaatagctaatacttacagaatacttaccctgtaccaggcactaagtactttatatgtgcgaaattaatcctctcagctctaactttacaaacgaggagacggagacacaaagcagataaggaacttgcccaggatcacaggtgaagtggcagaggctcgccctagctgccaacagacaccgcccccatgccaggctgctgcccatcgtgagcagcagtcccatgctaccaggctccgggtagtcaagaggccagcagtgttacaggtaggctgcatcatacagtcggcaggcttttgtgagctagcctgagaatctttcacaacactaaaatttgactgcgtcttcccacaggaagaaacactggacttccaatactgataataacagcagtagctaacattctaagagcattacctacgttaattctttgaatcctcagaataccatgaggtaggtgttattattacccctattttacagatgaagaaactgaggcacagagagtctttgtaagtaaccaacagtttagtaagtgggagatttgagattccaacccaggcagcctggcttcagagtcttggctaccggagtttttaaccctcacattatgctgccctcagaatgcttatttaacctttctccacatgtatggaggctaaccggacaaccacgttagcaattatgaacacaacagtccgtagacaagatgcgtaaccccactcaccgttgggaagtcctccagcacctggcgatccttctccttgctctccatgaaccgccagtctggttggtaaaggaaagagtgaaagttgtgtaacagcgggaccttcttttccacactgatggtcatgtcatcttccagtgtgtccagagctcggagaaccagataaaatatgcacactgcgttgctgtaaaaaagggaaaactattaatatattggaacaaacagccaaagattttttattttaaaataacttgtgcctggccactttctaaacccatctcacccttaactctaaagaactataaggatatccaacgcttttcatacttaacgaaagttacattagttttccttccttacatgagagtaatgaacttctgtagtttattaaaaagcctactagttgaatgtcaccactactcccagaagtgagttgcatttaaccaatgtagaactatggagaccagaagaccaaacgtttagaccgaactaatatgtagcaaatagaaaagaaagtcaaaaaacacagtaacttctcagtataaatacgatcatacataaaggcaactggtctaagttcatgggtgtaatgtgcacagaggcagcttcaaaagaatcaacccaatatgctagaaatagaaatgcaaagttggataagggaagccgagaaatacacgacctgctcacaggcaggttcagctgccaagactaaaaaaagttaataaacatcaccccctccgccctcttctctgaaaggctgggcccgcagggactctactagatggcaaagagcctggaagggctttctaaagtaaacacgtagggccgggctatgttctggataagccacagcaacgaggctgcaacgctgagcgctatatcaaaaggtagcttccaacacactcaaaggtcccggacaagctttcctccaagccagaggcgctgcctccatcactcaccgcatttccccatccagcgcctggataacagctgcgaaactgcgactggtctgattgagatacttgtagcaagttttcaggctgctgctgagcgagtcctgcgggcagacaacacacacggcggtgggagacgtcgaggagcaggagtgggagtgggagtgggagtgggagtgggactggggcaggcggctccacagcctgccgccctctccccgaggccagtccttgcagggccaggcggcaggaggcaagcagcagccccgcggggcggtgcctgcgcccgggcccctgggcgccgcggcgggactcagcaccaaggtgcgcttgaagagggccatggccttggtgccgcaggcggctgcggccatgggaatcgcggaccccgcggagtttttcctccatagactcaagcagatct

SEQ ID NO: 701 - DNA, 8852 bp, Homo sapiens
gaattgtactgtataaactcgaattattcttcagctattttcttctcatttgtattatgttgtactatatttgggctttggtacttaaggtctgatctcagcaatctgaaacagcctttgcaccgcaagagtcttccccaaacattcctttttttttttttttttttttttttttaaatattgctcccattatgcccaagaatcaaagattcttttgtttgggtggaggactctctgtccacttagctccctcccaactcagctacagattaggtttgtttcaataacataaggactgttctccaaaagctctggcaactgtggacaaaaagggcttcttcgagctattacacaacatgtgactttgctaaatcaaacctttatttataagatatggaagaatcagttatttgtgtgataagacatgcgaattctaggatagtaggacctaggcagatgtccacgtgaacttgagggactttaaaaatcttaggattttaactataacccactttactccaacaaaatagaccaaatagctaatacttacagaatacttaccctgtaccaggcactaagtactttatatgtgcgaaattaatcctctcagctctaactttacaaacgaggagacggagacacaaagcagataaggaacttgcccaggatcacaggtgaagtggcagaggctcgccctagctgccaacagacaccgcccccatgccaggctgctgcccatcgtgagcagcagtcccatgctaccaggctccgggtagtcaagaggccagcagtgttacaggtaggctgcatcatacagtcggcaggcttttgtgagctagcctgagaatctttcacaacactaaaatttgactgcgtcttcccacaggaagaaacactggacttccaatactgataataacagcagtagctaacattctaagagcattacctacgttaattctttgaatcctcagaataccatgaggtaggtgttattattacccctattttacagatgaagaaactgaggcacagagagtctttgtaagtaaccaacagtttagtaagtgggagatttgagattccaacccaggcagcctggcttcagagtcttggctaccagagtttttaaccctcacattatgctgccctcagaatgcttatttaacctttctccacatgtatggaggctaccggacaaccacgttagcaattatgaacacaacagtccgtagacaagatgcgtaaccccactcaccgttgggaagtcctccagcacctggcgatccttctccttgctctccatgaaccgccagtctggttggtaaaggaaagagtgaaagttgtgtaacagcgggaccttcttttccacactgatggtcatgtcatcttccagtgtgtccagagctcggagaaccagataaaatatgcacactgcattgctgtaaaaaagggaaaactattaatatattggaacaaacagccaaagattttttattttaaaataacttgtgcctggccactttctaaacccatctcacccttaactctaaagaactataaggatatccaacgcttttcatacttaacgaaagttacattagttttccttccttacatgagagtaatgaacttctgtagtttattaaaaagcctactagttgaatgtcaccactactcccagaagtgagttgcatttaaccaatgtagaactatggagaccagaagaccaaacgtttagaccgaactaatatgtagcaaatagaaaagaaagtcaaaaaacacagtaacttctcagtataaatacgatcatacataaaggcaactggtctaagttcatgggtgtaatctgcacagaggcagcttcaaaagaatcaacccaatatgctagaaatagaaatgcaaagttggataagggaagccgagaaatacacgacctgctcacaggcaggttcagctgccaagactaaaaaaagttaataaacatcaccccctccccccccttctctgaaaggctgggcccgcagggactctactagatggcaaagagcctggaagggctttctaaagtaaacacgtagggccgggctatgttctggataagccacagcaacgaggctgcaacgctgagcgctatatcaaaaggtagcttccaacacactcaaaagtcccggacaagctttcctccaagccagaggcgctgcctccatcactcaccgcatttccccatccagcgcctggataacagctgcgaaactgcgactggtctgattgagatacttgtagcaagttttcaggctgctgctgagcgagtcctgcgggcagacaacacacacggcggtgggagacgtcgaggagcaggagtgggagtgggagtgggagtgggagtgggactggggcaggcggctccacagcctgccgccctctccccgaggccagtccttgcagggccaggcggcaggaggcaagcagcagccccgcggggcggtgcctgcgcccgggcccctgggcgccgcggcgggactcagcaccaaggtgcgcttgaagagggccatggccttggtgccgcaggcggctgcggccatgggaatcgcggaccccgcggagtttttcctccatagactcaagcagatctgggaagcgcccgacgagaggcgggacgggctcgccctctactcgaatacgcgctgggccgacccacaacgggcccgccccgcagccccgcagccccgcccccggcctcccgctccgcaccggcgcctcctcccgctgttgcccttctcaccagaacccactggccgctaagagaacccagcgcacttccgagcggctcgctcgtcctcccagtgacagagtctccctagaccaaactctactcgggctccgctgaaatcctcttcccaataaggcctggactttgtactcaacgcatctgtctttgcatcgcccaattttaccaagaatcctgctaaattgatttgaccagaatcccccaacttcagtatctgatcaccctagacagccgattaggttccacatccccctccatccctcaggtgatgtctgataactctggcctgccttcagcaagaacgcacacccctgtgtttcctcgtaataattttccatccactgacatccggctcccccgccatcaattcctacttttctttgtattcgcagtggagcagttctgtaccgaggtctctctcctcttactgcagtagtttttctgaataaaatctgttttgccgttttactaccactgtccaaccctggtttttctatgacacctattaagcctctactattctctagaaagccagccattcctttcaagatgtcttctcatctttcccttcgaaattaatgcaatgcagcgcactgacctttattcttccctaaagcaaacaaggactgtgtttttccaaaagggagaaaaagcctgattttaaatgcaagcatatcagaaagagttgctgtttgtactatgtattttttcatggactatttttagagcagttttaggcccacagggagtggaaaatacggcgggttcctatttgtcccttccctcccctcaccccacagtctcacaacagttctttttgggagagactggaatcatttatccaacagggccgggtgcagtggcgcacgcctataatccctgcacttcggaaggccaaggtgggagaatcacttgagcccaggagtttgagggcagcctgggcaacatagtgagacctcgtgttcataaaaaattttttaaaaagccagctgtggtggcgcccacctatagtctagctactgaagactagctactcaggaggctgaggtgggaggatcgcttgagcccaagagatacacgttacagtgaactatgatattgtacactgcagagtgggaccccatctcaaaaaaataaaaaacaaatatccaataggagtggttaaaaaaatatggcatatccacttctaggaaattccagtcacttcagaatggtaacagtgaaccctgggctctggtgggaggtttaagtgaactatgttgtatatatttcctatcatgaatacgtattttgccaaaagggtcaatcttttaaatcacataatcctgaaaaagtcattttattgccataaaaaatattagtaaaaacaagtatttactgggcaccataatattagtaaacttcagcgtctggcacataaatatattcagaagtggtgtcatgaataaatgaagacattcatcgaggattttaaaacaattcaccaactccttccttctcaaaatatcgagaggcaggatttcagagtgaaagaaacagaatacccgctctggactgagctccagagcagctcttcacatagcctgaccattaccaggctacagcaggaagtgtttttaactgcactgccaaatgtcatgttcagtccaactaacagtttcggggtgatgttaagccaggagtttcaatcaatgccaagacacggtccccctagatttaaaccccaacactcttcaagaacactacccctcctttccatacagccctccattctgaaagagagcaagccaagccacttactcctccagctcgtacccctgctgctctttttcctgtcacctatttgtttcagtcccttaccttgtaaacaggtttcttcaaatcaccaagaacaaaacaggaagacacaactagtaagcatactatggaaaacaacactcactaaaaatttctactgcttgattcccatgagccaggggagaaagcaagctcaggctactggtgcctgtccctcttgggtttatctattgcagtctgagattcagcacactcccaaaagctcgcaagcgggagaaaaacagggatggagggaatttagaggaagggtgtgggggtggtcaggaagacgacaagaccagactcccaggaaggggctccagcctcaggctgaaagttccacaagtgaacagctaccagctaccagccctccacggagccttcctcactttaaaatagaatagatttctccaggaggggaaaaaaaccacaaacttgagaactgaatttacataaatttacataatcagattgataaccaccatttatcaagcacttaactccatgccaagcacaatgcggacatcacctgtgatccttactcaatcaaccctttaaggtctcaaaggcccatagtccactgaaacatctgtggcaagacctggggcagaatttagcatttttagtgttttagaaaataggcaataaaatgcatatacaaccctagtcagtgtgaagtagcacctcataattatttctttagcaaaacatttgaatatactaagtgggatgaatgaagcctcaacttcaagtcaggttttgctgccaagtgattctgagccaaactcagaaaaaattcttttcagaccatcttagagttgggaagttgtggttaaaaaatcgttaccatacatacatccctattttacagatgaagtaactgtggttcagaggttaagttaccaaggttgttcacctaacttaatagcgtcagaaatcggacttaataacagacttaagatattagtctaaataacaggatttagattggacaggagccagatctgcctgattactaacagcctgctctttccattactctcggcttttgggtgatgccacacaacttgcaggcggcatatgcccgtagatttactgatatgcacctaaaaattcagtgtaaatcaagtttactaaaccctgaaattctatagccaaatgcttctgtgatagaaataatcagccctcaatatctgctaagcgtaaattttttccctagtttgcagagagaaactggttgggtgcagtggctcacacctgtaatcccagcactttgaaggctgaggtgggaaaatcgcttgagctcaggagttcaagaccagcctgggcaatgcagcgagacattgtgtctacaaaaaaaatttaaaaattagccatgcattggtgacacgtgcctggagtcccagctactcaggatcaggaagccgaggtgggaggatggcttcagccaaggaagtcaaaactggagtgagtcatgttcaggccacagcattctagcctggacgatggagtgagaccccccccctcaaaaaaaaaaaaaaaaaggccgggtgcagtggctcacgcctgtaatcctagcactttgggagaccaaggcgagcagatcacttgaggtcaagagttcaaaaccagcctcgccaacatggtgaaaccccgtctctactaaaaataccaaaaaatcagccgggcgtagtggcaggtgcctgtaatcccagctactcagcaggctgaggcaggagaattgcttgaacccaggaggcggaggctgcatctagctgaggtcccgccaccactgcactccagcctgggtaacagagcaagactccatctctataaaaaaaaaaaaaaaaaaaagagaaactaagataatgttaagtgaagggaaatgtatttttccaatttatttcccctaattaaaggttcaggtatttttttaacggctcatggggatgtaaaaactgcccagaaagactacaactaacataacaaatactgcaccatattatcagagctagaatagctcaagtctcgcttttaaaaaaattcaaaatgtacaaaaacagtatactgtgaagtctttctctacccacttaccatgaccacccactttccctcccaacaggaaaccaatgctaccattttctctaacagtctttctgtagaaaggaaagagacatagaggaatgaagtctggacccaaatgaggtctgactgcactcagatcccttgccctgctagtatcttcctctgcagtgcttttctccacgtgaaaaactgtacattcgcttttttaaattgtctctcttccactaaaaagtaagttttataaaatcaaggtcttcacctagcttgttcactgttgtacctccagcacctagaacactatctgatatacaactggtcgtcaaatatttgttaaataaatgaatgctatatctaaatataaaaagtgacatctgccatatcaaataatagaagttattctgtagcaaaataattcaaataatgtagcaccggcaaagaaaagatgaagaaaactgaatgttctacaaatagactgaaggatgtacctgtattaaagatagcacgtgaaaaataacaccaaatgagggtgtagtctactggggacaaaaaccagaaatttattttctagtgtgtttactgaagcacatggacactgaaagaaagactccgatgttcaggcacctatcaagcctcggcctgagtcacatttgctactgtcctgttggcccaaaaaagttacagaaatcagccaggctggtccagaccagaagaacttggctgaatttgtctattcattcaataatcgcgtacgaataattttcttgttggaataaaaacacctcctatgcattcattaaacaaatagtacaggcatgaggcagataaaaatctaagtaaaaccaagttctgaccttccaccaaccacctagctaatccatagacgttagataactcattggaacttggaagcgtagataggcgattttaaaactcaggaagcaccgaggatgaagcgatggaagacagcaaggcggggagagctccggaagaggtggtgaaactggaggagtcagacttcattccagaaacggccttcatgtgatgttatctgcatagttcattccgcttaccaaaaaactcactcgtcctctcccgcgtaacccacccacattgcctcagatgtgtaaccctcgggttaaaataccggtaagcgccgatgctcacggaggggacgaaacggggagcgcaaccaccgggaaccacgcaaaagtcgctcatgcccagggcggcttgcgggggcagggacaggtcagccaggacggccacgtccacccgggccctacagggggaaggctcgaggaaagggggacgggaacacccaggcgtcggccctgctcgccgcgccccttgccccagatccgggcccggccgctcaggccctgaggccggcccagcgagctccttccccgccccgggcaagcagggaggctcggcccacctggtccatcttgggcatcaccttccgcttgcccccgatccggaagcgcaccaggttgtagaactcttcggggtggccaaggcatttcacgaactccatcctggcgcaggcggcggactcccgggcgcgactctcacctctgcggtccccaggcgctcaccggccggctggacctgtggagtaggtgcttcgaggggctggccggacagggggcaggcctagtacggcgacgccccgcccgccgctccgcccacttcaaccggcctcggccgccagcggggctagctgcggcctcgtggggtgggctgacgggcgctgattggccagggccgctcacactaggaagaccccggccaatcagtcgcggaaggagactggcgtgataacaccctagaagctcattggaggccgagaaagaggccgacgagcgggattggtgccctgatggagccgggcctttgttttcttccgcttaccccggctgggagcgcgaacgctgtggggactggaggtgaggcggtggggcttaggatgcgcatgagcccaacggtggtccgcagtcgggagagcagtgcggggctgcttcctccccacttggtcaataagtcgcccacgtgtccggcctcggtggctcctgccagccgggtgagctctgcagccgctctctgtagagcctaaaaccgtgaaaaggccgggccagcg

SEQ ID NO: 702 - DNA, 8877 bp, Homo sapiens
gaattgtactgtataaactcgaattattcttcagctattttcttctcatttgtattatgttgtactatatttgggctttggtacttaaggtctgatctcagcaatctgaaacagcctttgcaccgcaagagtcttccccaaacattcctttttttttttttttttttttttttaaatattgctcccattatgcccaaaaatcaaagattcttttgtttgggtggaggactctctgtccacttagctccctcccaactcagctacagattaggtttgtttcaataacataaggactgttctccaaaagctctggcaactgtggacaaaaagggcttcttcgagctattacacaacatgtgactttgctaaatcaaacctttatttataagatatggaaaaatcagttatttgtgtgataagacatgcgaattctaggatagtaggacctaggcagatgtccacatgaacttgagggactttaaaaatcttaggattttaactataacccactttactccaacaaaatagaccaaatagctaatacttacagaatacttaccctgtaccaggcactaagtactttatatgtgcgaaattaatcctctcagctctaactttacaaacgaggagacggagacacaaagcagataaggaacttgcccaggatcacaggtgaagtggcagaggctcgccctagctgccaacagacaccgcccccatgccaggctgctgcccatcgtgagcagcagtcccatgctaccaggctccgggtagtcaagaggccagcagtgttacaggtaggctgcatcatacagtcggcaggcttttgtgagctagcctgagaatctttcacaacactaaaatttgactgcgtcttcccacaggaagaaacactggacttccaatactgataataacagcagtagctaacattctaagagcattacctacgttaattctttgaatcctcagaataccatgaggtaggtgttattattacccctattttacagatgaagaaactgaggcacagagagtctttgtaagtaaccaacagtttagtaagtgggagatttgagattccaacccaggcagcctggcttcagagtcttggctaccggagtttttaaccctcacattatgctgccctcagaatgcttatttaacctttctccacatgtatggaggctaccggacaaccacgttagcaattatgaacacaacagtccgtagacaagatgcgtaaccccactcaccgttgggaagtcctccagcacctggcgaaccttctccttgctctccatgaaccgccagtctggttggtaaaggaaagagtgaaagttgtgtaacagcgggacctttttttccacactgatggtcatgtcatcttccagtgtgtccagagctcggagaaccagataaaatatgcccactgcgttgctgtaaaaaagggaaaactattaatatattggaacaaacagccaaagattttttattttaaaataacttgtgcctggccactttctaaacccatctcacccttaactctaaagaactataaggatatccaacgcttttcatacttaacgaaagttacattagttttccttccttacatgagagtaatgaacttctgtagtttattaaaaagcctactagttgaatgtcaccactactcccagaagtgagttgcatttaaccaatgtagaactatggagaccagaagaccaaacgtttagaccgaactaatatgtagcaaatagaaaagaaagtcaaaaaacacagtaacttctcagtataaatacgatcatacataaaggcaactggtctaagttcatgggtgtaatgtgcacagaggcagcttcaaaagaatcaacccaatatgctagaaatagaaatgcaaagttggataagggaagccgagaaatacacgacctgctcacaggcaggttcagctgccaagactaaaaaaagttaataaacatcaccccctcccccctcttctctgaaaggctgggcccgcagggactctactagatggcaaagagcctggaagggctttctaaagtaaacacgtagggccgggctatgttctggataagccacagcaacgaggctgcaacgctgagcgctatatcaaaaggtagcttccaacacactcaaaggtcccggacaagctttcctccaagccagaggcgctgcctccatcactcaccgcatttccccatccagcgcctggataacagctgcgaaactgcgactggtctgattgagatacttgtagcaagttttcaggctgctgctgagcgagtcctgcgggcagacaacacacacggcggtgggagacgtcgaggagcaggagtgggagtgggagtgggagtgggagtgggagtgggactggggcaggcggctccacagcctgccgccctctccccgaggccagtccttgcagggccaggcggcaggaggcaagcagcagccccgcggggcggtgcctgcgcccgggcccctgggcgccgcggcgggactcagcaccaaggtgcgcttgaagagggccatggccttggtgccgcaggcggctgcggccatgggaatcgcggaccccgcggagtttttcctccatagactcaagcagatctgggaagcgcccgacgaggggcgggacgggctcgccctctactcgaatacgcgctgggccgacccacaacgggcccgccccgcagccccgcagccccgcccccggcctcccgctccgcaccggcgcctcctcccgctgttgcccttctcaccagaacccactggccgctaagggaacccagcgcacttccgagcggctcgctcgtcctcccagtgacagagtctccctagaccaaactctactcgggctccgctgaaatcctcttcccaataaggcctggactttgtactcaacgcatctgtctttgcatcgcccagttttaccaagaatcctgctaaattgatttgaccagaatcccccaacttcagtatctgatcaccctagacagccgattaggttccacatccccctccatccctcaggtgatgtctgataactctggcctgccttcagcaagaatgcacacccctgtgtttcctcgtaataattttccatccactgacatccggctcccccgccatcaattcctacttttctttgtattcgcagtggagcagttctgtaccgaggtctctctcctcttactgcagtagtttttctgaataaaatctgttttgccgttttactaccactgtccaaccctggtttttctatgacacctattaagcctctactattctctagaaagccagccattcctttcaagatgtcttctcatctttcccttcgaaattaatgcaatgcagcgcactgacctttactcttccctaaagcaaacaaggactgtgtttttccaaaagggagaaaaagcctgattttaaatgcaagcatatcagaaagagttgctgtttgtactatgtattttttcatggactattttttagagcagttttaggcccacagggagtggaaaatacggcgggttcctatttgtcccttccctcccctcaccccacagtcttacaacagttctttttgggagagactggaatcatttatccaacagggccgggtgcagtggcgcacgcctataatccctgcacttcggaaggccaaggtgggagaatcacttgagcccaggaatttgagggcagcctgggcaacatagtgagacctcgtgttcataaaaaagtttttaaaaaattttttaaaaagccaggtgtggtggcgcccacctatagtctagctactgaagactagctactcaggaggctgaggtgggaggatcgcttgagcccaggagatacacgttacagtgaactatgatattgtacactgcagagtgggaccccatctcaaaaaaataaaaaacaaatatccaataggagtggttaaaaaaatatggcatatccacttctaggaaattccatagtcacttcagaatggtaacagtgaaccctgggctctggtgggaggtttaagtgaactatgttgtttttatttgtatatatttcctatcatgaatacgtattttgccaaaagggtcaatcttttaaatcacataatcctgaaaaagtcattttattgccataaaaaatattagtaaaaacaagtatttactgggcaccataatattagtaaacttcagcgtctggcacataaatatattcagaagtggtgtcatgaataaatgaagacattcatcgaggattttaaaacaattcaccaactccttccttctcaaaatatcgagaggcaggatttcagagtgaaagaaacagaatacccgctctggactgagctccagagcagctcttcacatagcctgaccattaccaggctacagcaggaagtgtttttaactgcactgccaaatgtcatgttcagtccaactaacagtttcggggtgatgttaagccaggagtttcaatcaatgccaagacacggtccccctagatttaaaccccaacactcttcaagaacactacccctcctttccatacagccctccattctgaaagagagcaagccaagccacttactcctccagctcgtacccctgctgctctttttcctgtcacctatttgtttcagtcccttaccttgtaaacaggtttcttcaaatcaccaagaacaaaacaggaagacacaactagtaagcatactatggaaaacaacactcactaaaaatttctactgcttgattcccatgagccaggggagaaagcaagctcaggctactggtgcctgtccctcttgggtttatctattgcagtctgagattcagcacactcccaaaagctcgcaagcgggagaaaaacagggatggagggaatttagaggaagggtgtgggggtggtcaggaagacgacaagaccagactcccaggaaggggctccagcctcaggctgaaagttccacaagtgaacagctaccagctaccagccctccacggagccttcctcactttaaaatagaatagatttctccaggaggggaaaaaaaccacaaacttgagaactgaatttacataaatttacataatcagattgataaccaccatttatcaagcacttaactccatgccaagcacaatgcggacatcacctgtgatccttactcaatcaaccctttaaggtctcacaggcccatagtccactgaaacatctgtggcaagacctggggcagaatttagcatttttagtgttttagaaaataggcaataaaatgcatatacaaccctagtcagtgtgaagtagcacctcataattatttctttagcaaaacatttgaatatactaagtgggatgaatgaagcctcaacttcaagtcaggttttgctgccaagtgattctgagccaaacactcaaaaaattcttttcagaccatcttagagttgggaagttgtggttaaaaaatcgttaccatacatacatccctattttacagatgaagtaactgtggttcagaggttaagttaccaaggttgttcacctaacttaatagcgtcagaaatcggacttaataacagacttaagatattagtctaaataacaggatttagattggacaggagccagatctgcctgattactaacagcctgctctttccattactctcggcttttgggtgatgccacacaacttgcaggcggcatatgcccgtagatttactgatatgcacctaaaaattcagtgtaaatcaagtttactaaaccctgaaattctatagccaaatgcttctgtgatagaaataatcagccctcagtatctgctaagcgtaaattttttccctagtttgcagagagaaactggttgggtgcagtggctcacacctgtaatcccagcactttgaaggctgaggtgggaaaatcgcttgagctcaggagttcaagaccagcctgggcaatgcagcgagacattgtgtctacaaaaaaatttaaaaattagccatgcattggtgacacgtgcctggagtcccagctactcgggatcaggaagccgaggtgggaggatggcttcagccaaggaagtcaaaactggagtgagtcatgttcaggccacagcattctagcctggacgatggagtgagacccccccctcaaaaaaaaaaaaaaaaaggccgggtgcagtggctcacgcctgtaatcctagcactttgggagaccaaggcgagcagatcacttgaggtcaagagttcaaaaccagcctcaccaacatggtgaaaccccgtctctactaaaaataccaaaaaatcagccgggcgtagtggcaggtgcctgtaatcccagctactcagcaggctgaggcaggagaattgcttgaacccaggaggcggaggctgcatctagctgaggtcccgccaccactgcactccagcctgggtaacagagcaagactccatctcaaaaaaaaaaaaaaaaaaaaagagaaactaagataatgttaagtgaagggaaatgtatttttccaatttatttcccctaattaaaggttcaggtatttttttaacggctcatggggatgtaaaaactgcccagaaagactacaactaacataacaaatactgcaccatattatcagagctagaatagctcaagtctcgcttttaaaaaaactcaaaatgtacaaaaacagtatactgtgaagtctttctctacccacttaccatgaccacccactttccctcccaacaggaaaccaatgctaccattttctctaacagtctttctgtagaaaggaaagagacatagaggaatgaagtctggacccaaatgaggtctgactgcactcagatcccttgccctgctagtatcttcctctgcagtgcttttctccacgtgaaaaactgtacattcgctttcttaaattgtctctcttccactaaaaagtaagttttataaaatcaaggtcttcacctagcttgttcactgttgtacctccagcacctagaacactatctgatatacaactggtcgtcaaatatttgttaaataaatgaatgctatatctaaatataaaaagtgacatctgccatatcaaataatagaagttattctgtagcaaaataattcaaataatgtagcaccggcaaagaaaagatgaagaaaactgaatgttctacaaatagactgaaggatgtacctgtattaaagatagcacgtgaaaaataacaccaaatgagggtgtagtctactggggacaaaaaccagaaatttattttctagtgtgtttactgaagcacatggacactgaaagaaagactccgatgttcaggcacctatcaagcctcggcctgagtcacatttgctactgtcctgttggcccaaaaaagttacagaaatcagccaggctggtccagaccagaagaacttggctgaatttgtctattcattcaataatcgcgtacgaataattttcttgttggaataaaaacacctcctatgcattcattaaacaaatagtacaggcatgaggcagataaaaatctaagtaaaaccaagttctgaccttccaccaaccacctagctaatccatagacgttagataactcattggaacttggaagcgtagataggcgattttaaaactcaggaagcaccgaggatgaagcgatggaaggcagcaaggcggggagagctccggaagaggtggtgaaactggaggagtcagacttcattccagaaacggccttcatgtgatgttatctgcatagttcattccgcttaccaaaaaactcactcgtcctctcccgcgtaacccacccacattgcctcagatgtgtaaccctcgggttaaaataccggtaagcgccgatgctcacggaggggacgaaacggggagcgcaaccaccgggaaccacgcaaaagtcgctcatgcccagggcggcttgcgggggcagggacaggtcagccaggacggccgcgtccacccgggccctacagggggaaggctcgaggaaagggggacgggaacacccaggcgtcggccctgctcgccgcgccccttgccccagatccgggcccggccgctcaggccctgaggccggcccagcgagctccttccccgccccgggcaagcagggaggctcggcccacctggtccatcttgggcatcaccttccgcttgcccccgatccggaagcgcaccaggttgtagaactcttcggggtggccaaggcatttcacgaactccatcctggcgcaggcggcggactcccgggcgcgactctcacctctgcggtccccaggcgctcaccggccggctggacctgtggagtaggtgcttcgaggggctggccggacagggggcaggcctagtacggcgacgccccgcccgccgctccgcccacttcaaccggcctcggccgccagcggggctagctgcggcctcgtggggtgggctgacgggcgctgattggccagggccgctcacactaggaagaccccggccaatcagtcgcggaaggagactggcgtgataacactctagaagctcattggaggccgagaaagaggccgacgagcgggattggtgccctgatggagccgggcctttgttttcttccgcttaccccggctgggagcgcgaacgctgtggggactggaggtgaggcggtggggcttaggatgcgcaggagcccaacggtggtccgcagtcgggagagcagtgcggggctgcttcctccccacttggtcaataagtcgcccacgtgtccggcctcggtggctcctgccagccgggtgagctctgcagccgctctctgtagagcctaaaaccgtgaaaaggccgggccagcg

SEQ ID NO: 703 - DNA, 483 bp, Homo sapiens
agcaggaagtgtttttaactgcactgccaaatgtcatgttcagtccaactaacagtttcggggtgatgttaagccaggagtttcaatcaatgccaagacacggtccccctagatttaaaccccaacactcttcaagaacactacccctcctttccatacagccctccattctgaaagagagcaagccaagccacttactcctccagctcgtacccctgctgctctttttcctgtcacctatttgtttcagtcccttaccttgtaaacaggtttcttcaaatcaccaagaacaaaacaggaagacacaactagtaagcatactatggaaaacaacactcactaaaaatttctactgcttgattcccatgagccaggggagaaagcaagctcaggctactggtgcctgtccctcttgggtttatctattgcagtctgagattcagcacactcccaaaagctcgcaagcgggagaaaaacagggat

SEQ ID NO: 704 - DNA, 1637 bp, Homo sapiens
ggctgtattattacttaagctatgtttacaggtagacttctaagccttctagctttccactagtaccaggtgagaaagatacgtgctcatgtactgtataatgatgtttcagtcaacggagactggaaatacaatggtgggcccttaagactgtaacaccctgtttttactataccttttctatgtttaaatacacaaatacttaccactgtgctccaattgcctacagtattcagtacagtaccatcctgtagagatgtgcagccttggagcaatggcctgtaccacagagcctacgtctgtagtagctatgccatcttggtatgtgtaagtacactctatgatgttcacagaatgatgaaatcatctatcaatgcgtttctcagaatgtatcctgtggccattcattaagtgatgcatgactgtactctaatcgaacccctaacatacaatgagatttctagaaagcctgacttgaactggtatcaactaatgatcactaaagtataaaggatcaggttcaatctactgtacatcgaggcggaagtcactgggttagaacactgtattgaggcttattcctaaattctgcaaggcctgggataagaggacaaatggaggcccacatactatatgtagctaaaaatttaaaaatgatcaatcgagctagtaacttaagtaaaatatattgtatcctcctgcactgacaaacttatctttgtaacaacctggttgattcaggtttgaatttagaattcttagtccctcagagttttattccagaatgcagcagggcacagacagctgatccccatatcccaggctcttcccttccactgcttcctgaatcccgctctctccagcactgggaggcacctcacattcatttgagaggatatcccagccctcggtgccaggatccatccacaacactccccaacacagcccttggccatcactcaggcccaagggcacagtcaatggtggcacgttcccacctggaggagatggactgaccttaggaaatagactgtgcggacgcagacgtgggctcagggatttggggcaaggaactccagatgtccagaacgtggtacagaaggagagcccacgagagctgaacaagcacattcccatggccccagtgatccctcacccctttgggagtgagggggcctagaatggggcactctgaagtgaggagtttcacttgccccagtctaagagcagtactgtgtgtgaggccaaggtatcagtcctctttcacactacttgttccatcctgggacctcttagccaaaagctgattgcaggcctagccccagacaactggtttcaaagacatactgagctatatcagcacatacacaaatcactccttaagaagacaaggcactgttaattcccatacagtcccatctcaaactgaatcacagactggagggacctacaactcaagtagcttaaaattatatatgcacgcaaaacacacaacttagtacatcttcatattcgtaaggatacaaaaggtgaacaacagtgaaaacagccgtgcctggcttacgccttctgctcccttttactcttcccggggcaactgtgctttcaagaggatggaatctctaactctactaccc

SEQ ID NO: 705 - DNA, 522 bp, Homo sapiens
gggcgtctttactgtaacacacccgagcacagcccagctcgcctgcccgccaccgccatccagccccagggagccccacacactcctggagcttcagctgccccctctctagtgtttacttgagatccagcttagtcctagaaaaaggagctgaagccttagagagcctgtaacaggaatgtggaaacttctctcatcctagatctctccagccctagaaactactggctacccgtccaggcgtggtggctcacgcctgtaatcgcaacactttgggaggccaaggcgggtggatcacgaggtcaagagatcgagaccatcctggccaacatggtgaaacccgtctctactaaaaatacaaaaaagccgagtgtggtggtgggcgcctgtagtcccaactactccggaggctgaggcaggagaatcacttgaacccgggaagcggagtttgcagtgagccaagatgacaccgctgcactccagccaggccaacagagcaagactacgtctccaaaaaaaaaa

SEQ ID NO: 706 - DNA, 1637 bp, Homo sapiens
ggctgtattattacttaagctatgtttacaggtagacttctaagccttctagctttccactagtaccaggtgagaaagatacgtgctcatgtactgtataatgatgtttcagtcaacggagactggaaatacaatggtgggcccttaagactgtaacaccctgtttttactataccttttctatgtttaaatacacaaatacttaccactgtgctccaattgcctacagtattcagtacagtaccatcctgtagagatgtgcagccttggagcaatggcctgtaccacagagcctacgtctgtagtagctatgccatcttggtatgtgtaagtacactctatgatgttcacagaatgatgaaatcatctatcaatgcgtttctcagaatgtatcctgtggccattcattaagtgatgcatgactgtactctaatcgaacccctaacatacaatgagatttctagaaagcctgacttgaactggtatcaactaatgatcactaaagtataaaggatcaggttcaatctactgtacatcgaggcggaagtcactgggttagaacactgtattgaggcttattcctaaattctgcaaggcctgggataagaggacaaatggaggcccacatactatatgtagctaaaaatttaaaaatgatcaatcgagctagtaacttaagtaaaatatattgtatcctcctgcactgacaaacttatctttgtaacaacctggttgattcaggtttgaatttagaattcttagtccctcagagttttattccagaatgcagcagggcacagacagctgatccccatatcccaggctcttcccttccactgcttcctgaatcccgctctctccagcactgggaggcacctcacattcatttgagaggatatcccagccctcggtgccaggatccatccacaacactccccaacacagcccttggccatcactcaggcccaagggcacagtcaatggtggcacgttcccacctggaggagatggactgaccttaggaaatagactgtgcggacgcagacgtgggctcagggatttggggcaaggaactccagatgtccagaacgtggtacagaaggagagcccacgagagctgaacaagcacattcccatggccccagtgatccctcacccctttgggagtgagggggcctagaatggggcactctgaagtgaggagtttcacttgccccagtctaagagcagtactgtgtgtgaggccaaggtatcagtcctctttcacactacttgttccatcctgggacctcttagccaaaagctgattgcaggcctagccccagacaactggtttcaaagacatactgagctatatcagcacatacacaaatcactgcttaagaagacaaggcactgttaattcccatacagtcccatctcaaactgaatcacagactggagggacctacaactcaagtagcttaaaattatatatgcacgcaaaacacacaacttagtacatcttcatattcgtaaggatacaaaaggtgaacaacagtgaaaacagccgtgcctggcttacgccttctgctcccttttactcttcccggggcaactgtgctttcaagaggatggaatctctaactctactaccc

SEQ ID NO: 707 - DNA, 522 bp, Homo sapiens; identical to SEQ ID NO: 705

SEQ ID NO: 708 - DNA, 1637 bp, Homo sapiens; identical to SEQ ID NO: 704

SEQ ID NO: 709 - DNA, 3089 bp, Homo sapiens
ggggggtagtcggtctataagcctcgcccgttccgctccctggggcttccccgagcgccgtcggtggtcatggctgccccagcctcccggcaggtccgacgcagagcccgggcagcgccgcggccccgctcggccgaggattggtggtgggaccggctggcgccgaggggctcggggtaccacctgctgcagtccgacagcatgctgctggtgctgtctgaaccaggccccgcccggccccgcgcacagcggcgcgattcccgccgcattccccggcagccgccccggggccccagcgccgcggccaagcccaaggccgggctcaggtccgaggcggcggccgcgcccgcacccgcaccggcacccacgcccacgcccgaggaagggcccgacgcgggctggggagaccgcattcccttggaaatcctggtgcagattttcgggttgttggtggcggcggacggccccatgcccttcctgggcaggtaacgctggtgccgggcccgccgccgagcgtagcggcttgggccagacgtggtccgagcggtggcccgggcgggggcggagggcgaaagcatcggagcgcgcaccgctcagtccgagagcgcagccccttaggcgcccagttggagtcccaggagcccggctttgagccggggtgtctactgcgctgcgagaggggggcatcgcctacggaggggccggcaccctcagcacgctgtcctcccagggctgcgcgcgtgtgccgccgctggcaggaggccgcttcccaacccgcgctctggcacaccgtgaccctgtcgtccccgctggtcggccggcctgccaagggcggggtcaaggcggagaagaagctccttgcttccctggagtggcttatgcccaatcggtgaggggttccctcttttccttacccctggctccaggctccttccgtctccctgcaccaaggtgttgggtgggaaggactcgtgtgggaacattagtgcagctctgcctccgctgtcggcccaggttttcacagctccagaggctgaccctcatccactggaagtctcaggtacaccccgtgttgaaggtgagagctccaggctgtcctgcacatcagctgtgacactctgggactgttcagtactctaggaagtgggtcaggcaccttgggggcccaacgctgctccgtggggatgtctgcttgcctgcctggttctcttttcctgctgtttcctccagcagggaggtatcagaggcggggacacccaagtaggcctggcatgggcagaaaggaggtcacagctaaggcggtagagtggggttggcaccagccacttgtctgtttcccttgtggatcttagcctgttgtttcccaaccccagctgcccctctgtctccccgcagctggtaggtgagtgctgtcctcggctcactttcctcaagctctccggctgccacggtgtgactgctgacgctctggtcatgctagccaaagcctgctgccagctccatagcctggacctacagcactccatggtgagccctgtgtcccaaggggccctgaaaaaacccaggccggggtgacgggtgctcttgtattggggccccaggtggagtccacagctgtggtgagcttcttggaggaggcagggtccctaatgcgcaagttgtggctgacctacagctcccagacgacagccatcctgggcgcactgctggtaagttggcattggtgggagcagaggcagatgctgagctggggactgccaggccactgaccctgtgacctaccccctccccccatctctgcagggcagctgctgcccccagctccaggtcctggaggtgagcaccggcatcaaccgtaatagcattccccttcagctgcctgtcgaggctctgcagaaaggctgccctcagctccaggtacctggcgccctgcctctcccacctgtcacaccctcccccatctacagcctggaccttgcccccaggtgctgcggctgttgaacctgatgtggctgcccaagcctccgggacgaggggtggctcccggaccaggcttccctagcctagaggagctctgcctggcgagctcaacctgcaactttgtgagcaacgaggtcctgggccgcctactccacggctctcccaacctgcgcttactggatcttcgtggctgtgcgcgcatcacgccggctggccttcaggatctgccatgtcggggtcagcagtcctgggtggtggccgggcgggtgaggtgtgggggcccttgtcaccttgtagcttatgctcactcctttcactgcagagctggagcagcttcatctgggcctgtatggcacgtcagaccggctgactctagccaaggagggcagcccctttttgacccagaagtggtgccatacactgcgagaactggacttgagtggccaggggttcagtgagaaggacctggagcaggccctggctgccttcttaagcacccctgggggctcacacccagccctgtgctctcttaacctcaggggcacccgggtcacaccaagcactgtcaggtcagcatcccctaccccagtccctggagccagtgtggctgtcactgtgtctgcctggggcctggaagttgtgtcctgcctggcctgagacctccaggggtcagaggggcatgcatactgtccaagcccctgcgtggggtgggcctgaggacaccaggggaactgggcttggccttggtggctatgggtggcagagccaggtgtcgaacaccagcaggcacagctccctagcctggcccagcccttctgaggcaacagctcaacttcctgtggtctgccctccccacagctctgtgatcagcagctgcccgggcctgctttacctcaacctggagtcctgccggtgctttccccggggtttgaagcgggcctaccggggcctggaggaagtccagtggtgtctggagcagctgctcaccagcccctcacccagctaggcagccacagacctgggacacctcagccagcttgcccaccctccacctttgcccaatttcagatatttgagcattttgttaaaataaaacatttttaggagtt

SEQ ID NO: 710 - DNA, 2722 bp, Homo sapiens
ttaatgccaactcattaaatacaaatgttttattacgcaaaccacatgtaggtcccaggctcaggggcttaccctacagcccccactggtccctggctccaagcctgctccttgcccttgcccaccctggaaagccaggatctcctatggagtgtgtaggtgtccacgagtgtaccggtgtgcgggcctcctgggctgcaggcactcaggcatggtggcagcattgagggaaagacaggtgttggggagcggggtccccacctgcccaggctcaggagtcacaggggtctgcacagtcctttctgctgtggaacacgtgatagatgctggtcggggggaacatagcaacagcgccgagcagagagcccacctggatggccacgccggctgccagcaatgccggccggcccccgccatgcagcagggagctggctgccaccttcacgtaggagaacacgccaagacacagcacccacgacagcacctgagggggacacagcaccagctgagcgtgagatgtgcctgctccagggcaacgcccccccaccccacttcatgtccccctgtgctcaccacgaggaccacccccgccgaggtgcccaccaggggcgggcaggggctcaggactgccagcgccatcaggtagcccccacagaacacgcccagcagagagaggccgcccagccctgccaaggacctgcagtgagcgagcagaatgtcagggctgactgcgccaggacctggctcccagccctgagttccacccgcacaggggctgggggtccttgtgtacctgcacagcacacccatggccaggaagcaggccaggggattggcagcactgcccagcaccacagccaggtggtaggccagacgcccgtagggtaagcaggaaaagctctgcacggcaggcagcacgccattggtcagcgcgttggtggcggccaacaggcccagcaggcaggcactgcgggctgatagaagctgataggccttagggtctggaccaggggtggtgcctgctgcctggcttggtggctcttgcagtggtgaggactcttccacctcttcctctgctcctggggctcccacctggaggcctgatcctaactcccctgtgggtacagatggtggtggcggcaacagcagcagaagaccctggaaggcagcagctgaagcgaccagaagggcagtcagtgcccagaagaaggtgctggcgggaaaacgctcaaggaagtcgagcggggggccaggggtgccgttgatgggggctggcgggcactcgaggcggcccacaccctgcactagggccagcacgcagggcagcagggcactcaggccttgacccaggaagaatgaccgtaagaagcgaggtggcaggtggctcaagaagggcaggaaagtgacattcgaggcacagcatgccagtgccagcacaaaggccagtgctaagaaggccacagaatgcaactgtcctgccactggggccacatggtgccacagagaggccagcagggctgtgcccaccatgcccagcacctgcaccacccggatggggacctgctcgtcctttcctggggccagcctcctccagagggtcaccaccagcagacccaggttccccagagccacaagcacagagacgtaagaggggaggctccaacctgcagggaagggaggaggccatgtcagggtcatgatgcccaagggaggaagagtgccaaagcccaccttcctgggcacacctgcacctcctcccactcaccctctggaagctctctgaccaccacaggtagctccacccagatcccactgaccgcagcccaggagtcttgggcacacctgcacctccctcccactcaccctctggaagctctttgaccaccacaggtagctccacccagatcccattgaccgcagcccaggagcccatgccgaagagagccaccagcaggtgggtcagcaccggacgggcgggcgtgggtgctgccattcagcccaaggctgggcccttccaggtcagggcaaaggtcacagccagttcttttcccacctagggccagacacgctttggctctcctgggaagtgaagacttcttctagcttgaaagaaacagagaaacagataggatgcagagccggagtcagaacagggtgagaccaggggaactgggggagccccgggcaggagcgcagatggggaggattggctaaaacgtacccagcgggaccgccggcaggcagggaagcaggaagccggcccgagtcgctgcggccccaggggaggaggccgaaggagcgagtggagccctcctctccagggagaggcggggctggagtcaacgccaccaccaccccaagccggacgccgggaaagggcgcctaccaggaggagccacgcacaccccagggcttcacggtgcccgcgaccgcaagagccaagtcagatcccaggggagtggccgggacggctctgctcggaggggcgccgccctctcggtaccgtcaggtgggcgactcgggagccgtccggtccctgcgcctcccggtcccgcgcccagtgcgctcccgctccagtgccggcttcccgccacgccgggacaccgccgtccggcccagggacgccacctcagtccggagcgcgcaggacccggcagcagccacgacccgactcacccgtggcggttccgggcccgcccccggcatggcccacgaccggaag

SEQ ID NO: 711 - DNA, 6126 bp, Homo sapiens
ggagccgcgagacaggtgcgcatgccagtgcgcgtctgcgagaccgacttggacggagccgagctgaggctcggcttcctgctgatggtcagggttttggcaactccccggtgtgagaggggtagggagtgctcccggcggcgacggggccgagttcaccagccgccggggcagtagtcgaaggcccggcgcggcatgtcctgggtgccgcggtgcgggcagtgaacgcgcgccgggcgggatgggccgccgggcgccagagctgtaccgggctccgttcccgttgtacgcgcttcaggtcgaccccagcactgggctgctcatcgctgcgggcggaggaggcgccgccaagacaggcataaagaatggcgtggtgagagcgcagggccactggggctgggtcttgctgcgggctggcggcgattccagggtggccggggggtcgcggggcgggccacactccagcttcgggccctgcccacttctgttgggaagacccgcttgcctgacgcccaggggcgaatttcagtcgagaactcagcgggcggaggagaggcttttaaggtaaagtgaaaactgcacacagctgcagagtcgccaggaacgcttcagctccgcctcagagcagctccaggggtcttatactggccttttccgggaggtcttgcctgccctctagcagcggcgagagtggtgcatttgggtttaggctaagttccttccctctcctgagcttcaccctgttctgtaaaatagaggtaataatcccagtcctgctcactgtgtagatttgtgaggcccaaatgagagaaaaaagactcgagaaacccttgtgaactagaacgtgcagaaagcaaaggggtaagacatcagactcttccctaaacgtgctctctgggcacccctgaacttgctcatccgggttccccctcccacagcactttctgcagctagagctgattaatgggcgcttgagtgcctccttgctgcactcccatgacacagagacacgggccaccatgaacttggcactggctggtgacatccttgctgcagggcaggatgcccactgtcagctcctgcgcttccaggcacatcaacagcagggcaacaaggcagagaaggccggtgaggagctccctctctaaccccttggggaaagggttgaacgagtaaggtcactcttggtgtctctaaagaagtgggtctggaagtagggttttggtagcaagctagaagttgtatggcacctgccatggagagaggggccagtactccttactgtagaagcctggaacctggccaagtgtttgtgttacaggttccaaggagcaggggcctcgacaaaggaagggagcagccccagcagagaagaaatgtggagcggaaacccagcacgaggggctagaactcagggtagagaatttgcaggcggtgcagacagactttagctccgatccactgcagaaagttgtgtgcttcaaccacgataataccctgcttgccactggaggaacagatggctacgtccgtgtctggaaggtgtgggtttgcagggttagggagggtgaatgtcagtagcaacaggatcaaaattgtgagaagttgaacgtggcatctgggaaacttgtgaatgaagcttgcattgaggggccattagaaggggtggcgtgggcatcagtcacagtgtacttgctggacacctgagttaaccatggtggttgtttggctacaggtgcccagcctggagaaggttctggagttcaaagcccacgaaggggagattgaagacctggctttagggcctgatggcaaggtgaggggctgggggtgggaggaggatggagaaaggagagaggaggtgcttatgctgcttgcccagtaagtggatcccctaactgtccatccttggaatctttattcctaactagttggtaaccgtgggccgggaccttaaggcctctgtgtggcagaaggatcagctggtgacacagctgcactggcaagaaaatggacccaccttttccagcacaccttaccgctaccaggcctgcaggtgtgaagactttgggtggtggctgaaagaggcatagcccagctgtggtgggggagagggaaaagactggggatgggagagctggggaggaacttgttgagtgttaccccaggtctgaccagggtgcaggtggtgcacaaacctctgaggagggttggcaggccctaggagctgaatagcccctcatccggcccccaggtttgggcaggttccagaccagcctgctggcctgcgactcttcacagtgcaaattccccacaagcgcctgcgccagccccctccctgctacctcacagcctgggatggctccaacttcttgccccttcggaccaagtcctgtggccatgaagtcgtctcctgcctcgatgtcaggtgtgagacattgctgccttggctaggtagggggtccctgagggagcttggaaaggagtcctgcctgggtccctacggaccggtattggggtatgagggttgctgcacaagcctccaggacaatgagctctttattgtttgttgcagtgaatccggcaccttcctaggcctgggcacagtcactggctctgttgccatctacatagctttctctctccaggtaatgggtggaggttggcatggccctgtgggtggactgtaggcctgtctctaccctgagtttgcaggaaggagtctggcccatcctatcgagggaaatcctgggggtggggaacatgctttccagaaagagagttcccagctaggcctttcctcactggtattccttctgcccacagtgcctctactacgtgagggaggcccatggcattgtggtgacggatgtggcctttctacctgagaagggtcgtggtccagagctccttgggtcccatgaaactgccctgttctctgtggctgtggacagtcgttgccagctgcatctgttgccctcacggcgtgagtcattggggcagggcaggcaggcaccaccccacgtttaatgaccagaaacgtgccccccggaggctgggctctttgtgccactcctcctttgaagggttctggttttcaggctgggaagcccttttgcccgctgacctcctccctttccctcctgcagggagtgttcctgtgtggctcctgctcctgctgtgtgtcgggcttattattgtgaccatcctgctgctccagagtgcctttccaggtttcctttagcttccctgcttcctgggaatcaggagcctggacactgccatctctagagcagagtggaggcctggactccctttgctcactccattcgggtccacagctgaggttgccgctgacaagatgaatgggcactgcctgcccttctagtgaaaaggcttggctatggccctgtgtgactccaggtcccaggaaccttgccttcgtcatctgtggatccatccagaacagcggtatctgaagcccaggccatactccctgcctcctttcttctgcctaccagaggctccagagttgagcttgtccttatctagaaacatgtgaagatgcccaagagcctggaggcactgctgtccttcctgcagaaacagtttctcctcctcccctcagccttgtggccagttcctcttcacatgaagcccctggcatttgctggggaagggactggcctggtacttgctgttagggcaggaaggggcaaaaggaagacttgggtagtaatctgggggttcagatgggtagcactaagccagctggcctaaagatgcaataagttcctaggtagtctacccttaccttgaggaatgggaaaatgaacctcagcccattaggcaggaaaagttgatatttaataaacaaggaaagagtgaactgagaccccaaatggtactcttgtcagctgtttctgtcctcagaaggtaagagagccctgaggtcaggcagcccctctgggtcctggaagatggctttggcgtactgatgcaagaggcggctcatgtaccagtgctgccacgggagcagcccttccaggaagccgatgtggccaccccgggctgtgatgagcagcgcaacgtagggggagtgttgggcggcctgtatgggaagggctaggagagggtcagaggttagaaacactggccttcactgggagcccaggctgtctgttgcgtccctcatggcccattttccttggggccaaagtgtcctgaatcagagtactcaccacagacgggggagaaggggtcatctgctgcactgagatagagcacagggatccggatggcatctatcttggttctagggcttgctgctttgtagtaggtaacacagtcttgatatccaaaggccacagatgtgtagcgctcatcaaactggcggattgtacgggcctgcaggtcttaccataggataggctaagatgataaagaataggaagatagtggaagactcatttgggggaaccaggggcatggctgaatattatacctgtagtacaaagtctatgtccaccaccttttcaatcacctttctgtttctgcaaaagtacataagagtttggcttgacacctggatctgatcccccacccccaggccctgtcttactatctcatgtgtgaggaagcccagagagaactgaccaagcactaggagagcctggagtgtctgccatcctactctgtctactgcctcctcccacttgccacgaccctaccgttccacaagttggcagagcccagcagtgaggggctgattgaagagcagtgagttgagtggggtttccagggagcgagtggtctcaaaggaatcccagcatgcagacagagtcagtgctgccaccagccctgcagcctgcctggcctgtgccaggtgattcagcaccagtatcctgtggaattggacaagggaccatgaaagaagggtttgcattaatgtgggttgggacagaggaaggggacatggaggaggaaaaaaaggaagactgggcctctgggctaagcccaggcaatctttaccctccaaaagagatgcccacggccagcagtggagcttggggataacgatgctttatgtggttcacgactgtctctagatcttcagtattgctggcacaaaaagccctgtgggtctgagggcaaaccagatcattgggtagggagggagaccgtggccagaaggtggaggggaaactgaggaaggataggtaggaggtgagccccagggccaaggatctctaaagggagtgggtgaagggctgctatgaggaaggcagctactcacccgcagttcctccccacggcagccccggttgttaaacacgacagccctgtggcacacacaggtacatcttagccagacccttcttagcccctctcccctttcagtattcagaaagacccctgtccaaagactccctttgtgtagcattcttcttatctatcagtgtccggattgacttctccctaatacacgttctcagatgccaccccactctggggctgcacccatccttactggtagccatccctcagagcttggttaactaggtgcaagacgtatgtatcctggctactgccagtgatgccaggaagcagcagcacaatgggctgggtagtaggatcagggtcttggctgctgtcaggctgcttggcccagtctagcaggagctggcctccatctggtgtttggaggatgtcactggttttggaggaagaggcacacaaagatactattaagaacttaatgtaattcaaaagctttgccccctgccccacccacaaacaagtcttatcacttcccgtcagcatcatctgagggtgttcttcatgtaaaacagtaaggcttgacaatgtgtgatggggacataaaagatgacctggtggccgtgcaattatatagcccttccatataacatccattgtcattgaaccctcaacacagggatgtagatgaggcagattacctacattttaaaagtggtagataggtttttccctagatacctggggtttcatgttcaccctgttctgtcccttcttacctctgataaaggactaggggctgagactgcaggaggacttggaagatgctttgtagtcgcccctcaaaac

SEQ ID NO: 712 - DNA, 102 bp, Homo sapiens
aatggcgcgatctcggctcactgcaacctctacttcccaggttcaagtgattctcctgcctcaggctcccgagtagctgggattacaggcgcacgccaccac

SEQ ID NO: 713 - DNA, 1169 bp, Homo sapiens
gattgttatattctcttgctcagttgacctctttattattatatagtgaccttatttttctcttcttacagtttttgtcttgaaatctattttgactgatacaagtgtagctactccagctcttttttgcttttgtcgccatggaatatctttttttcatctgcttattttcagcctatgtgtgtctttataagtgaaatgtgtttcttgtagacaacagataattgggtcttgtttttttatccattcagagccactctgtgtcttttgatttgagagtttagtgcgtttccattgttattaagaagtaaggatatgttctgccattgtattgtttgtcttttgcttgttttgtggtcttctcttcctttcttcattccttcatttcttttattgaaggtgattttgtcttgtggtatgatttaatttcttcctttttattttttaggtatatgttatatggtttttgatttgaggttatgatgagtcttgcaaatattatcttacaacctattattttaagctgataaccacttaacattgcataggcaaaaacacacagaggcaaaaagaaaaccaataaaagctctacactttagcctcttgctttttaactttttgttgtctctgtttatatctcattataatttctatgtcttgaaaagttgtcattattagttttggttggttcatcttttagtctttctccttaagatcagagtattttatatatcacatttacagtgttataatatgctgcatttttttgtgtacttactattaccagtgagttttggaccttcagttgatttcttattactcatcaacttccttttctttctgattgaaaaactcccaggctggacacggtggcccatgcctgtaatcccagcactctgggaggctgaggtgggctgatcccttgaggtcaggagttcgagaccatcctggaaaatgtggcaaagctccatctgtactaaaaatataaaaaattagttgggtgttgtggcgagcacctgtaatcccagctacctgtgaggctgaggcaggagatcgcttgaacccgggagacgaaggttgcagtgagccgagatcgcaccgctgtactccagcctgggtgacagagcgagacgccatctcaagaaaaaaaaaaaaaagaaacagaaaaa

SEQ ID NO: 714 - DNA, 1169 bp, Homo sapiens
gattgttatattctcttgctcagttgacctctttattattatatagtgaccttatttttctcttcttacagtttttgtcttgaaatctattttgactgatacaagtgtagctactccagctcttttttgcttttgtcgccatggaatatctttttttcatctgcttattttcagcctatgtgtgtctttataagtgaaatgtgtttcttgtagacaacagataattgggtcttgtttttttatccattcagagccactctgtgtcttttgatttgagagtttagtgcgtttccattgttattaagaagtaaggatatgttctgccattgtattgtttgtcttttgcttgttttgtggtcttctcttcctttcttcattccttcatttcttttattgaaggtgattttgtcttgtggtatgatttaatttcttcctttttattttttaggtatatgttatatggtttttgatttgaggttatgatgagtcttgcaaatattatcttacaacctattattttaagctgacaaccacttaacattgcataggcaaaaacacacagaggcaaaaagaaaaccaataaaagctctacactttagcctcttgctttttaactttttgttgtctctgtttatatctcattataatttctatgtcttgaaaagttgtcattattagttttggttggttcatcttttagtctttctccttaagatcagagtattttatatatcacatttacagtgttataatatgctgcatttttttgtgtacttactattaccagtgagttttggaccttcagttgatttcttattactcatcaacttccttttctttctgattgaaaaactcccaggctggacacggtggcccatgcctgtaatcccagcactctgggaggctgaggtgggctgatcccttgaggtcaggagttcgagaccatcctggaaaatgtggcaaagctccatctgtactaaaaatataaaaaattagttgggtgttgtggcgagcacctgtaatcccagctacctgtgaggctgaggcaggagatcgcttgaacccgggagacgaaggttgcagtgagccgagatcgcaccgctgtactccagcctgggtgacagagcgagacgccatctcaagaaaaaaaaaaaaaagaaacagaaaaa

SEQ ID NO: 715 - DNA, 702 bp, Homo sapiens
tttttttttgaatttttaaaattattattatactttaagttttagggtacatgtgcacaatgtgaggtttgttacatatgtatacatgtgccatgttggtgtgctgcacccattaacctgtcatttagcattaggtatatcacctaatgctatccctcccccgtccccccaccccacaacagtccctggagtgtgatgttccccttcctgtgtccatgtgttctcattgttcaattcccacctgtgagtgagaacatgtggtgtttggttttctgttcttgcaatactttgctgagaatgatggtttccagcttcatccatgtccctgcaaagggcatgaactcatcattttttatggctgcatagtattccatggtgtatatgtgccacattttcttaatccagtctaccattgttggacatttgggttgattccaagtctttgctattgtgaatagtgctgcaataaacatacgtgtgcatgtgtctttatagcagcatgatttataatcctttgggtatatatccagtaatgggatggctgggtcaaatggtatttgtagttctagatccctgaggaatcgccacaccaacttccacagtggttgaactagtttacagtcccaccaacagtgtaaaagtgttcctatttctccacatcctctccagcacctgttgtttcgtgacttttaatgttttctt

SEQ ID NO: 716 - DNA, 702 bp, Homo sapiens; identical to SEQ ID NO: 715

SEQ ID NO: 717 - DNA, 13275 bp, Homo sapiens
gcgaaagtccagcttcggcgactaggtgtgagtgagccagtatcccaggaggagcaagtggcacgtcttcgggtgagtgtgcggctgtgctggagcccgggttaccagctcttgcccgcgcggaataggctttaagaaatcggagctgcagccatctgtttttctcttaatgctgcatctctgttctcacggtggtccttggggtgaggttagagaaggagccgagggatcctgacaccacctccacagcaccggcgggcgaggtgccctactttaggcgtagccttctgcttttggagccagatgtctgtggacttctgttcgcgttcagaaatgccgcctcaaacttctctcaattgttcattaagtgaacttctctcattcccttcccctttgccgataattggaggggaaaagaagtaggaagcgggacacggtgtcctggggcaagggacttattacctaaaattcgcggccccttctgtccctaaaggttcttctccctgcccactttttggtctctttttagacctaggctgcccctgccgtcatgtcgcaagggatcctttctccgccagcgggcttgctgtccgatgacgatgtcgtagtttctcccatgtttgagtccacagctgcagatttggggtctgtggtacgcaagaacctgctatcagactgctctgtcgtctctacctccctagaggacaagcagcaggtaaaggaactggggagtggctggggcggaaagtgatatcctcaggccaataattgtccatacagggtagtatgaggtcaaagactagcaatcctaaaggtctgagatcaattcaaaattaagggcatttaggacaaaatggctatgaaaagaaaaaaagaaaaaaaaattaagggcatgacaagtaaaaaaaaaattgagttgtgtgtccagaagaactataatttgcattgcattaatgaaataccctcaaatgcatgctcttagttaatctttcagggaataatagttatctctctttgccttgaggcccagttgtgctaaataatttgcacaaggtcatataggcattatgtaagtggaatgtatgttcaggttttaatagtatcaccatagcttcaatttgttgtaggtttcctgctaggccagggtttctcagttacagcattattgacatttggggctagacagttcttgtagggatctgtcctgtacatttcaagatgtttaatagcattcttggcatttacccactagatgtcagtagtgccttcccatttgtgacaatcaaaaaatgtcttcaggcacttcaggcattgctaaatggcccttggagtggaaatgaccctggttgagaaacactgtactaggtcctatgctaaacattaacatacattgtcagattttgtgctcttatagagtttctcttagagacttataaagttccatgagagcatggtccttgatgatgtctctcactatggactatcagagcttctcagttcctaggccatagtagacactctaaatatctgggttttttttgttttttgggtttttttgttttcgagatggagtctcgctctgtcccccaggctggtgtgcagtggcacaatctctgctcactgcaacctccgcctcccgggttcaagcagttctccctgcctcagcctcctgagtagctggaattacaggcacctaccaccaagcccagctaatttttgtatttttagtagagatggggttttgctgtgttggccagactggtctggaactcctgacctcaggtgatccaccctctttggcctcccaaagtgccgggattataggcgtgagcccctgcacccagcctctaagtatctgttgaatgaatgacataggtgctattattaaccccattctgcagatgaggaaactgaggccaagaatttcaagaactcataattcaaggtctcatagttactaagtcatggaattgggactcaaattcaagtgtttgcctctgctttgctttaatatcacatactaattttcataccagtcaataaattcgaactcagatcatcggtgtggcaagccacatttgcaggataatgacgagacagggaagggtgacaaagtagtaaaaatgtccatgtgggttggaatgattgtggaaccaaagagtagctgcacagagacatttgaggtgaaatggggtagtgttatcatagttcctagaaactactgtttgcccatttgctcagaggtaactgctgaaattaatctgtggttctgggctgggattctgccacaggttccatctgaggacagtatggagaaggtgaaagtatacttgagggttaggcccttgttaccttcagagttggaacgacaggaagatcaggtaagtgtctgagaagggaggattcaaggtgaaatgatgcagtacaaaagattcccaggaatgccttctgtgacaactgtattttctcccttctcagggttgtgtccgtattgagaatgtggagacccttgttctacaagcacccaaggactcttttgccctgaagagcaatgaacggggaattggccaagccacacacaggttcaccttttcccaggtatggagggtactggtttgtgaacaaaagaccaacatgtaagggcaactttattccctctttagagggaaagcttctcttcctgactgtgagttccttgtatatgcacacctacaattttgagggccctagttatgtgttagtcaatgtgtcaagtaacatatgtatatcagttctgaaaaattctattgttattatcattatttccttattttcctcacaaggatagtgtggctcaatgaatgtaatattgctgaagccatgtagctagtcactagtagagttaggacctgagtctagatccatgtatctccaaagcccatacttgtgggccattatattgccccattgtgtgtgcagcatcaggcctagggcatagcattccttaagtgtttgttgatttggtggaaagatggactagcagagagtgcttgagtcctcagtgtttagggaacagccagcagcattgcaggaagaagctgcttgagtggtctccagagccaaccactcaggaaggaatatatctgctggctctgcacaggaggcaagtgggagatgaaggagaggcctctaaaaaactgggtctctctctagatctttgggccagaagtgggacaggcatccttcttcaacctaactgtgaaggagatggtaaaggatgtactcaaagggcagaactggctcatctatacatatggagtcactaactcagggaaaacccacacgattcaaggtgagtagtaagccttcacgggattcctgattggctggtaatggtgttgtttttaccttttgagactctgagttagggggagaagggcacttgcctcagctgtccatctttcatatgcctccaggtaccatcaaggatggagggattctcccccggtccctggcgctgatcttcaatagcctccaaggccaacttcatccaacacctgatctgaagcccttgctctccaatgaggtaatctggctagacagcaagcagatccgacaggaggaaatgaagaagctgtccctgctaaatggaggcctccaagaggtaaagcattggtatccatggcagtgggggtagggggtacaaatctcggggaagttttgtgcttaccttctccctgtgcccctccaggaggagctgtccacttccttgaagaggagtgtctacatcgaaagtcggataggtaccagcaccagcttcgacagtggcattgctgggctctcttctatcagtcagtgtaccagcagtagccagctggatggtatgtaccgtgactgggctctgccaaaaaatagtaggaactcactccctgttcctaatagctgccaggagtacagaccagaggttgcaatctaaggtctgccttccaaggcccctgcaggccaaaagagaggtgaactgctctaggttgatgccctatacattggcttcttctccagaaacaagtcatcgatgggcacagccagacactgccccactacctgtcccggcaaacattcgcttctccatctggatctcattctttgagatctacaacgaactgctttatgacctattagaaccgcctagccaacagcgcaagaggcagactttgcggctatgcgaggatcaaaatggcaatccctatgtgaaaggtaaaggaacatggggaaagctggcatgaaccctggagggcaactggggagagactggcaaaagagttggatgttcccatcttacacccctctcctttggccccagatctcaactggattcatgtgcaagatgctgaggaggcctggaagctcctaaaagtgggtcgtaagaaccagagctttgccagcacccacctcaaccagaactccagccgcaggtgagtagattgtaagaataaactcttcactgtgttccaggaaacattagtcctctgcctggtcatggaaaatgtgcaatgactttttgtttttcttaacttccagtcacagcatcttctcaatcaggatcctacaccttcagggggaaggagatatagtccccaagatcagcgagtaagtttatccatttagaaatttgggcttcttggccataaatgatagttgggaaagcatggaggaggtcctcaggggaactatgtgttctccttctttgggtacagagattcttagtgggccgtcccctctccagaattatacaaagggccagaaggctcataacatgtgaggcccttatgtcagatcctgtgcatcattctaggctgtcactctgtgatctggctggctcagagcgctgcaaagatcagaagagtggtgaacggttgaaggaagcaggaaacattaacacctctctacacaccctgggccgctgtattgctgcccttcgtcaaaaccagcagaaccggtgagcttttgactataattcctgggctctgcaatttgctaagagacttcctggacaccactggggatggtgctaggatacccaaagggctggtgttctgctcacagctctattatctctgattctctgccaggtcaaagcagaacctggttcccttccgtgacagcaagttgactcgagtgttccaaggtttcttcacaggccgaggccgttcctgcatgattgtcaatgtgaatccctgtgcatctacctatgatgaaactcttcatgtggccaagttctcagccattgctagccaggtgagaagctagaggtgtgatgggtgtgcgcacttggaactggtaactctaagaaagctcctagggactacttatggagtcaagtaagatattttttttccctctagcttgtgcatgccccacctatgcaactgggattcccatccctgcactcgttcatcaaggaacatagtcttcaggtatcccccagcttagagaaaggggctaaggcagacacaggccttgatgatgatattgaaaatgaagctgacatctccatgtatggcaaagaggtgagaatacaagaaagctttagtgtagcagcttagtagctacacatttttccatggtgccttccaggtgggcttgtgccttctgagggcatgagcatctgatgacctctgacatgtgtgtctctcctaggagctcctacaagttgtggaagccatgaagacactgcttttgaaggaacgacaggaaaagctacagctggagatgcatctccgagatgaaatttgcaatgagatggtagaacagatgcaacagcgggaacagtggtgcaggtactagctgagtgacccctcttgctctgtcacctgagacagagggtgggaagtaaggagttaggtggagttgtgcctcaagatctgttccccaagttcactcctcagaaccttcacttacctctcttttctcctctgtttctgacagtgaacatttggacacccaaaaggaactattggaggaaatgtatgaagaaaaactaaatatcctcaaggagtcactgacaagtttttaccaagaagagattcaggtgagttgccctgagccagctccaattagctgctcagatttccatcactagcttgcctgaagtaaagagattttataaactactccagtaagggcaggaatatataactcccttttctctattccccatagtgctttgggttcaatctatgtttggtgaattgattaagggtttagttggccaggaaatcgtattaagtgctaacaacaggttttcaagggatcagtgtcacaagtgctttgtttgttcagtcatctgtcttagcaatatttttctggctctgcaaagaattgtgctctctgcttccctcttaggagcgggatgaaaagattgaagagctagaagctctcttgcaggaagccagacaacagtcagtggcccatcagcaatcagggtctgaattggccctacggcggtcacaaaggttggcagcttctgcctccacccagcagcttcaggaggttaaagctaaattacagcagtgcaaagcagagctaaactctaccactgaaggtgaggaaagagacaggcaggaaacataacagtggttcagggaagagctgttacttaaacccaggccttctaactcctgctctaacataatttcctaaactgcaagctacatccccctgacatttcaatctaggatacacatagcctcactttttatatttgctgcaagctactgttacctcagttaaagaggttagtccaaggctaaaaaaaccccacatattttaagtttcctgtttccttccctcagagttgcataagtatcagaaaatgttagaaccaccaccctcagccaagcccttcaccattgatgtggacaagaagttagaagagggccagaaggtaattaccaccattctctgtttaccaaactcttacctaaggcaatttcccacatccaacactctatcactggttcatgtgaagacaagatgttttttgtgcacagttctggagagtggctatttcactcagctgactagcctttctaattttacttctcttcaaatggctacctgacccctccagatcattatcctggttgctcttggccacaatatgattcctacttcccctttttcagaatataaggctgttgcggacagagcttcagaaacttggtgagtctctccaatcagcagagagagcttgttgccacagcactggggcaggaaaacttcgtcaagccttgaccacttgtgatgacatcttaatcaaacaggttagggcaaactatatacccacttctgtcctaccagcccactccagtgtatatgtgagaaaggaaagaggaccagaagaaaaaggtaaagatttttaggctgaatttatagtgagagcagtatatttgcaaaataaaaataactattctttgttaagcatttactaagtaccaggcactgtgctaagtaatttataggcattttctgtcacaaccaccttagggaggtagttactgtcatatttcatctaagatgctactgattataagaaaccattattttatgtactactaagaaaaaagtaacaatttctcatcagtaagatgcatcctgattccaaagagattaaaatgttaaaattgtgtatcttaaactaaactcaacatttaatttgacatttagagactgaggcacttagaaattaaatttactcaagctcatactaccttatgtgttagaagatgtcctattcagcactgcttatgttttgttctcagaaaatgtccccttattcagttataagctccgaccttaaagagttttaatctttgaagaaacagttgttagtaactagtaatggatggtatgtattacccttagccctctcgtttctctaatataccagacaaaagtgttttctataactttattgatcttccttaggaccagactctggctgaactgcagaacaacatggtgctagtgaaactggaccttcggaagaaggcagcatgtattgctgagcagtatcatactgtgttgaaactccaaggccaggtttctgccaaaaagcgccttggtaccaaccaggaaaatcagcaaccaaaccaacaaccaccagggaagaaaccattccttcgaaatttacttccccgaacaccaacctgccaaagctcaacagactgcagcccttatgcccggatcctacgctcacggcgttcccctttactcaaatctgggccttttggcaaaaagtactaaggctgtggggaaagagaagagcagtcatggccctgaggtgggtcagctactctcctgaagaaataggtctcttttatgctttaccatatatcaggaattatatccaggatgcaatactcagacactagcttttttctcacttttgtattataaccacctatgtaatctcatgttgttgtttttttttatttacttatatgatttctatgcacacaaaaacagttatattaaagatattattgttcacattttttattgaattccaaatgtagcaaaatcattaaaacaaattataaaagggacagaaaaattaagaatcaaacatcactctggaccatgggaaccttgaaaaggcatggcagtggagaccagtaactagtatacagcttgcctgagaaggcttagtaacaaatgaattcaagtcgtattagatattctaaaccttccttaatataagatgaagtgtcatatgttaggaggtaaaaacgtaacacaaaattctgggaataagaataaagtctggaccctgagctcagaatgatccatagcatctactgtgcaaatatattacagcagacattatagcatattacctcctgctgtacacacatgcacaggcctgaaactctccaagagcaccataagaatgattccctttacctcatctagataaaggctgaaaaaaatgtattctgttgcagatgggagggaaaaaaatagacaattacgttgaaaatttattaaaacagaccagcttgaagtgagtttattcttgtctgtataatcaccaatgttatttccaaatgtccgtgaaattatctataatcctatctccttgcttgctttggtaggagtatagctaacaatatagccatcttttgccctcagtaagggctatcagcagttccaagctctgtgagattatttttgcccttcttttattcaactctagttgaataaagttacttccaatttgaaagctttagaagacccccccaaaactgttttggaagattgtctccctagagagtaagaacaaatggatagctctattccatttaaacctaatctctgacatcagaatagggatcatgctcagcaaatccaagagcaaggtcatttgtatccattgctctgacttcttcctagggtactcagtgccctactgccagctcagggtagagtggcagactttcctcctttctttcactctcagcagcattgaaactttgttcctgtagcattgcctgtgctaaagtgctataaaagggactttcttgggggccaaaaaaaaaaagcattcagggaagaaggccaagatctatagccactctttggacataagtgagacagaagtacttctaactggcaagataatgtctgttcctgccaggattctgtcagttggcctctgaaggtaattatacaagctgtccctatggagctgttgccatctgtagaaacaagaagagctgaggtccttggaacagacgtgctgttctttacatggaggtaaggcttaattaagatgggtctaacaatgtgctggcttgagagtagccaactatggcgtgacagaagacaagttgagtggagaaactctgcgtgtgggggtattgttagcagagagtgaagcaggtaggaaaaagggagcaggcacctcggtggtaggagtctcgccttggttccgaagctgtaggatttgccggagtaaggccttaccttcttcccgggtctgcaacaaagtcagggaaatgtttcaaaacatgtccaaagctagtctcgaaaacaagttattaagatgctgttaaacaagttccacagatcaaggaggcgggaggcttgcttgttttttttttttgagatggagtctcactgtgtcacccaggctacagtgcagtggtgtgatcaaggctcactgcagcctcgacctcactgcagaggatcaagtgatcctctcacctcagcctcctgagtagctgggaccacaggcatgcaccaccaaacctggcaaaatttaatttttgtagagacaagctctcccttttttgtccaggctggtcttgaactcctggacacaagcgatcctcctgcctcagcctcccaaagtgttgggattataggtgtgagccgcttgcctggccaaggtaggctttccacttaaatatcttatgttctagcctaaaattcaaaccttttattaaagaactgatactcacatcattaaatgcacaacacttttgtgcacaagttgaagcttcatcccacagtttgcacttaaaatagtactgggccagatagcgaaaggcagtgctttcctccaagtgttctactatttcctagaaagggaaagcaaaattactgaggtgacagtaataatatcagcagtacaattctcatggtatgatacataccccacaggaatagatatcttggatatatttgatgtaacactgggcagcctgttctgactcagtcaactgttcatgaagcctacaaaagaaactgatctttaaataccaatgatatcccaaagcaacttagtgataaaaaaagtaaaagtacataagaccaaaaaaaacaatacataggtaagtatcaattttgacataaatgacactcttggaactagaatagtattagatgtgatagttactgttatcaaagcttagaatcattactctgctaatgatggaaggagagtcagtaaatattaatatctaagctagataaaccatccttgcaaaaattatctagtaatacccagagtaaagtggctcatgcctgtaatcccagcactttgggaggccaaggagggcagatcacttgaggtcaggagtttgagaccagcatggccaacaaggtgaaacctcatctctactaaaagtagaaaaattagccgggcgttgtgacacatgcctgtaatcccacctactcaggaagctggagcaggagaattgctttaacttggaaggtggaggttgcagtgagccaagatcataccactacactccagcctgggccacagaatgagactctgactccaaaaaaagaaaaaaaaaaaaaaaagctgggcactgtggctcacacctgtaatcccagcactttgggaggccaaggcgggtgggtcatcagagatcaggagttcaagaccagcctggccaacatggcaaaactctgtctctactaaaaaatacaaaaattagccaggtgtggtggcaagcgcctgtaatcccagctactcgggagactgaggcaggagaatcatttgaacccaggaggcagaggttgcactctagcctccgtgacagagcaagactccgtctcaaaaaaaaaagataacaagtggccaggcatggtggcatagggccataatcctagctactctctaatctggctgagaccaatgacttcaagaccaacctggtcatcacagcaagatcctatctataaattacaaaaaaaaaaaaaagataccaagcaactcaatttttttcctaagaatccagacaggaacctctttacatttaagaacctctttgcctactatttgagttattcctaatttttctggcccttagcaggaaattaatactgaaagtagtttgacacaaaaatgttatcctttcttcaaatcaatcttgatctcttgctttaataggaaagcaacggccctccttcaagagaagtagcattctctttttattttttttattttgagatggagttttgctcttgttgcccaggctggagtgcaatggcgcgatctcggctcactgcaacctccacctcccaggtcttgaactcctgacctcaggtcatccacctccctcagccgcccaaagtgctagaattacaggcatgagccactgcacctggccagaagtggcattctctaggaacaagatggctacattcacaaaccagcattcacacaccctgctacatccctacacctatgtagaatgatgggtgtatgggaggctctagaccatgcaggacccaccatcccagagaagccaacagaaatatcaatagcatttcactcctttcactcactttgccagtttcaccagagccattttctccacatctcccacggcgtaagctctccaataacactgtcaaaaaaataaactggtcattttgaccattgtcccatgtgtcacaactaaatcatatgaaggttaagaccctgcaagcctcccagaagttcagatttatagaatgcaagacatttttactagttctgataggtctaggctacacactgacattcccactgatgaccttggcccagctttgctttcagactatgtatctataaatattcagactttcctatgcacctagatcagaataagggaaaaattagagcacagatagcccaaccttcatctaaacagcagatttccactcaaattcttcaggacccaatttaaggtacctttttggcttccactagttgattgagtttctcgtaacattctcctaaagcaaccagcatgcgagaatcattgggtctgagaaagaagaacaggcagtctgagcaaagactttacagaaactgaagttctcttttgaggaaccagtacaccactatttcaaatctatgcaacaactggtctttaacctgatgctccatataatagattactttgtgttcataattatactattaacccattagtgaaatatactaaatgaaaataaccaaacagccttcagcaactttaacctcagatccccaagagccaaaaccatccactgtgatttgtcaatagctatcaaaagaggaaaaaaaagttattagcccttcccatatcagacgcattgtcaagtgaccaggcttaccgaagctggtgggcccgtctataataataaaggcagtaaaatggcatcttaaggatttcataggtctgcccgaggccataccaagctctgtagtcccgtttgttgacctcaatggcatgtctaagaaatggaaaagac

SEQ ID NO: 718 - DNA, 39119 bp, Homo sapiens
ttcctattgtgtaaatacatttatttatagagtaaaaggcttagaaaagatctaatggaattgtctttaaatcaagccgatggaacaaagatgtgggcaacatttatggcataaatccaaacctcagcttcccctttttttctttatattatgtccacatgcatctttgactcgttggttgtgagttaaggtattattcttgttggaaaagaaaatgaggacatggcaaagaagtaccaggatcctctctaggtcagagttccgggagagattcaaactctagaaaaagtcaggatagcagctccaggttagaaaacaggttttccatcatctactgggttagctggttctccttccagactacttgagccttttcttttgtctaaccagatattcagtacctaaagggttaaggaacacatagcaagctattatgaaccttaaacactaaagtattgcaagtttatttttttggcaaatagactcaactatacttttttctttaaagtatgatgctacccagaaaagaaacccacaaatgtcttctagctactatatcttatcccctaaagatgggaaagtgtgaacgtacattaataacaacagatgaagcaaccaaaaaatacacagtgactccagcctctttggagtttagcccttgacttgaggctctggaagcgggaattcccattacttgtctatcctcagctctcttgagagctcttcactgctgcctgcattcctagactacttcactatcagagctggacttactgaggctcagggttttccaaaccagcaggcacattatcaatccttcagggccttaatcacctttaaaaataaactctgagaacacagtcacctcgaaatcacctttattctcataggcgttctgaaatcaagattccagaggctacaggtatctgcatacagtacctgaatctgctccaggacttctcgccgcatctccacagccatatggtatacatgatgatcagagtcattgtacattacagcattttggaacatcagcatcaggtctcgcaggaattgggccatggtgcgaatccgacccttagagagatttctcttcaggctagttaagtccatgggtctgcaggtggccaagaaaaaacaaagaaaatcaaaccttcatgtggaacatatgataacctaacacgttctcttgaagaactaaccagttcttaatgaaaacagtagcaaagataacaaccctcatcagataataaaatagcaacagcagttaatatttgcctgtttacaatgggccaaacactgtatttctatactaactcacttaatcctctcaataaacctgtaaggtaggtatcattaatatctcattttttttttttttgagtcggagtttcactcttgttgcccaggccggagtgcaatggagcaatctcagctcactgcaacttccaccttccaggttcaagcaattcccctgtctcagcctccagaatagctgggattacaggcgtgcgccatcatgcccagctaatttttgtatttttagtagagatagggtttcaccatgttggtcaggctagtctcgaactcctagcctcaggggatccaccttccttggcctcccaaagtactgggattacaagtgtgagccaccgcccccggccttattatctccatttcacagatgaagaaattgaaatctaaagaggttaagtactcactgaaaggcacacagcctgaattccaattcagaggcagcctgactccagagcccacaggtcaagccactatattctactatcagaggaggagtgctggccccaggtatcaaagttgtaaagagcaccaatcatcagtttatcacacagtagttatttgctgtttacaatgtatagtcatatattatttcatctacttctcttactgcacaaataaaaagctaagaataatttttttctcctttcatggagatgaaaaaaggatcaagtgaatattaagacaatattaatgagacacagaaagtagatatataagagaaggcacagcagtgtagaaagaagactgaactgcaggtaagaatctggggcttagttctagctctgctattaactgttggttgatcacgagcaagtcatgaccaagcacctctgagctttagtttcctcattcctaaagaagtttgtctctgctgtttgaatgatggtatcattgtctctgctgtttgaatgatggtatcccctccaaaattcatgttgaaacttaatcccaagtgcaacagtattaagaggtggagcctttgggaggtaattaattcatgagtgctctgccttcatgaatgggattagcatccttataaaagggctccatatcgaagagagtgccctcttatccttctgtcccttctgccatgtgaggatacagcattcgtcccctctgcagaatacaacaacaaggcatcatcttagaagcagaagcagagagtaacccacctcacacaccaaaactaccaatgccttgatcttgcacttcccagcctccagaaccaaaacaaagaaacatagatttctattatttataaattatccagcctgtggtattgtgctatagcagcacagactagtgactctccaaaggtcctatcatgatcttttacattctattaccatacaggtttatgacagcattttagatgacctatgctataaaaacccaaaataggccgagcacagtggttcaagcctgtaatcccagcactttgggaggccgaggcaggcggatcacgaggtcaagagattgagaccatcctggccaacatagtgaaaccctgtctctactaaaaatacaaaaattagctgggcgtggtgacgtgtgcctgtggttccagctactcaggaggctgaggcaggagaatcacttgaacccgggaggcggaggttgcagtgagccgagatctcatcactgcactccagcctggtgacagagcaagactgtctcaaaaaaaaaaaaaaaaaaaatccaaaataggctaggattacctgcctgtaatcccagcattttggaaggctgaggtgggaggattgcttgagactacgagcttaagaccaacctgggcaatctagtgagaccccatatctacaaaaaatttaaaaattcctcctcagtgatattctgaagaaaaataaagttattaataacatttcaaacaaagaaaatattttattataataaaaatatcaggccaggcacagtggctcacacctgtaatcccagcactttgggaggctgaggtgggtgaactgcatgagcccaggagtctgagacaagcctgggcaccatggtgaaactctatctctacaaaaaatacaaaaattagccgggcatggtggcacacacctctagacccagttattagggaggctgaggtggaaggattgcttgaacctgggcagttgaggctcagttatccaagaaatgtgccactgcactccagcctgagcaacagagtgagacctgtctcaaaaaataatagtaagtaaaaatttaaaaaataataaatttaaaaattagctaagtgcagtggcacatgcctgtagtcccagctactccggaggctgaagtgggaagattgcttgagcccaggaggtcaaggctgcagtgaaccatgattgcaccactgcactccagcaacagagtgagaccctgtctcaaaaaaatttttttaaataaaaaataaaaataaaatcccaaaatactgagaggtgaagctggctgggcttctgggttgggtgggacttggagaacttttctgtctagctaaaggattgtaaacacaccaatcagtgctctgtgtctagctaaacatttgtaaatgcaccaatcagcgctctgtgtctagctaaagctttgtaaatgcaccaatcagcactctgtaaaaacgcaccaaaaaaggtttgtaaacgcaccaatcagcactctataaaaatggaccaatcagcactctgtaaaatggaccaatcagtactatgtaaaatggacaaatcagcaggatgtggaggaggccaaataagggaataaaagctggcccctcaaggcagcagtggcaacccgctggagtccccttccacactgtggaggctttgttctttcactccgcaataaatcttgctgctcctcactctttgggtccgcactacctttatgaactgtaacactcaccgtgaaggtcagccgcttcgctcctgaagccagcaagaccacgaacccaacaagaccacgaacccaacgggaggaataaacaactccggatgtaccacctttaagagctgtaacactcaccgccaaggtctgcagcttcactcctgaagccagcgagaccaccaacccactgggaggaacgaacaactccagaggcgccacctttaagagctgtaacactcgctgtgaaggtctgcagcttcactcctgaactcagcgagaccacaaacccaccgggaggaagaaactccggacacatctgaacatccgaaggaacaaactctggacacaccatctttaagaactgtaacaccacgagagtctgcagcttcattcttgaagtcagcgagaccaagaacccaccggaaggaaccaattccggacacaatactacaatcaaccaatgttcataacttccatttggatcgacatctgtgccttactatacctataactaactgaataaatacagggttccttttaaagttttgctccaaaagaatagtgtcaaaaacaaccaaaggctaatttaagattataattaatgatcaggctggacaccaaggctcacacctataatcccagcctttggaaggcctaggcaggtggattgcttgagctcaggagttcaagaccagcctgggcaacatggcaaagctccgtttctacaaaaaatacaaatattagccggacgtgatggctcatgcttgtagtcttagctacttgggaggctgaggctggagaatagctgagcctgggaagaggatgttgcagtgagccaagactgtaccactgcactccagcctgggcaacagagtgagaccctgtcaaaaaaaaaaaaaaaaaaaatatatatatatagaatggatcatattacttaaaagtcaatagtacaaaataaaaaccctatatcatccttttgttccctgcattccttcttaaatgaagatatgatactgagctcatcataactttataaacttgtttggctatgaaacatatcttgagtttgtaagttataaaaataatctaacagatgggaaataaaaaatgaaaaggcagatataaaagcaaccaacctttcttgacccctttttcactgaccttttcaccacatccttgtaccctggggcctgcctttctgacacaggcttcagaaatggactgctgaacctgttaagggacaaacccagagaggataaagaaaccctggcaaggcactctgaaggagaagagtagctcagttcttagtagacttcctttaggggaatgcagactgtcagcaccattaggaaaaaatctatttgttccctcttgccagagagttaaaaaaaacacaaaactataaaatatttcactattattacaatatactgatttagggctcagaaatttgttcaaagttcccaaggccctgtctctgtgaaaaaagagaatccaccagattgaaaagaagaatatacattttaaatataaattttatcatgtagtaggaaccaatttctagaggcaactcaaatggcacagcaactatttcttgtacagacttgtgaaagcagctgtgggtactttgggataaatcgggcttagatacagaatctacctttcaactatggctcatttgagggatgaacatatctccttttatgcttaaaccccaatatgtattactgcttcagctctgaacataatcctattaccactttggagacctacctgtgactggcaatcatcttccagactggcaggagagtcttcttaaatagcaaatgatcctgaacagggtcatcctggcttagatcagtcctatgaggataaaacatgaagaaaagagacagtaacttcacaaataatattctatctcccccaggtgggtaatgaggttttcttaagacatgctcctaattaatatctgaagctttttatctccccttatctggccaagcagacttagttattaatatctattgttttctcttttaattttttaattttatttttctgagacagagtcttgctctgttgcccaggctggagtgcagtggcatgatctcagctcactgcaacctctgcctcccgggttccagcgattctcctgcctcagcctcccaagtagctgggactaaagttgcataccaccacacccaactaatttttgtattttccatagagacggggttttgccatgttggccaggctggtctcaaactcctggccttaagtgatccacccgcctcagcctcccaaagtgctgggattacaggcatgaaccaccatgcccagccaattttttttttttttgagacagggtcttgctctgttgcccaggctggagtgcagtagtgtgatcgtggcttactgcagcctcaacctgctgggctcaagcgatcctcctgcctcagcctcccaagtagctgggactccaggcacatgccaccacgccctgcagctaatttctgtatttgttgtagagacaaggtcccactacgttgcccaggctggatatctactgctttctaataaagatttcatatttaatctaaattgtaaggtaagaatgtggaatttaccatccaagactatgaactgtcatgagataagatgtctcagattgggcccggtgtggtggctcacgcctgtaatcccagcactttgggaggccgaggcaggcggatcacaaggtcaggagattgagaccatcctggctaacacggtgaaaccccgtttctactaaaaatacacaaaaaattagctgggcgtggtggcgggtgcctgtagtcccagctacttgggaggctgaggcaggagaatggtgtgaacctaggaggcagagcttgcagtgagccgagatcacgccactgcactgcagcctgggcgaccgagcgaaactccgtctcaaaaaaaaaaaaaaaaaaaaaaagtctcagattgcagatttcctgctgtttgtacagtcacagtatgtcatctctgcactctattgctcatacttaaggagttaaagaaaagcaaatgaaggcattcctcaccaatctacattttaaactgtatcctatttgtgtaccaaaaattgaaatctaggctgggcacagtggctcaggcttataatcccagtactttgggaggctgaggtgggattgcttgaagccaggagttcaagacccagcttgggcaacaaagcaagaccctgtctctatgagaaaaaaaagaaatctgctcttcaaaaaatatatatatatatatatattcatatataaatatatgcatggttcagctgtatatcttaaacaaaaaaacactagaataattattagttttacctttccacagacaactgggtggatctgggatatactgaagaaaaaaaaaacagttcatactatattctctcaacagatggatctgacacaggctggaaaaagaacaatttatttattaccataacaaaaataactttgctggacgtagtggctcatgcctataatctcagcactttgaaaggctgaggcaggagaatcacttgaggccaggagtcacagataaaaacaactttgtttttctgctttaaaaagtaattcacttcatgccagatgcagtagttcatgcctataatcccaggactttgggaggccaaggcaggggatcgcttgagtccaggagtttgagaccagtctggtcaatgtgatgaaaccctgtctctaacaaaaatacaaaaaaatcagctggttgtggtggtgcacatctgtgttcccagctattcatgaggctgaggtgagaggatcacctgagcccaggaggcggaggctgaagtgagccaagatcatgccattgcactctaacttgggcaacagagtgagatcctatctcaaaaaaaaaaattaatatttttttggtttcctgttaaaaaaaaacagcccccattaagatttgaaaatgtgttatttagtcctataattatctatacaaagatgagacaattgcataaaccaggggtgtccaatcttttggcttccctgggccacactggaggaagaagaagaattgtcttggaccacacataaaatacactaacaatagctgatgagctggaaaaaaaaaaaaaaaaagaaaaaaaaaagggaaaaaaaaagggtcagtgcataaatctcataatgttttaagaatttgtgtttggccacattcaaagctgtcctgggctgcaggctagggattagacaagcttgacataaacaatcccctaagagatgtgaaaaagaaacaaagatcacaaacttcaaaataatttttttcttctcttttatttcttgttttgttttctgagacagggtcttgctctgtcacccaggctgtgtagtgacatgatcatagctcactgtaaccttcacctcccaagttcaagcagtcctcctgccttggcctcctgtgtagctaggactacaggtgcatgcccccacacccaataaattttgtttattttttgtaaagatgaggtttcactatattgcccaggctagtctcaaaatcctgagctcaagcaatcctcctgcctctgcctcccaaagtgctgagattacaggtgtgagccactgcgcctggcctaattttttctttaaaaaaaaatttttttatcctcttccttgtctccatcaaaataattttccatttcaagttcataaaatctattttaatatttttaaaagaggtatagtttgggccaggcacagtggctcaagcctgtaatcccaacactttaggaggctgaggtaggaggatcacttgaaaccaggagttcaagacaagcctgggcaatatagcaaggccagccctgtctacaaaaaataaaaaatcagctgggtgtggtggcccatggctgtattcccagctacttggaagcctgaggtgggaggatcccttgagttcaggaagtcaagctgcagtgagtcatgatcgtgcccattgcactccagcctgggtgatggagctagaccctgtctctattaaagaaaaaaaaagcaccatagtttgtatattaggcatagtttgtataatattagctccatcacccaggctggagtgatacagacttggctagagtacagtggcacaatcatggctcactgcagcttgacctcctgggctcaggtgatcctcccacctcagcttccggagtacctgagactatagacaagtgacaccatacctggctaatttttttttaatttttattttgtagaggcatggtctccctatgttgcccaggctggtctcaaagtcctgggatcaagggatcctcctgccttggcctcccaaagtgctggaattacaggtgtgagccaccacacctagccttgaaagacagtcctaatattgattaaacatatttgttttataacaggagagcatatagacttctatttatatgatgttaaaattatacttaattaattatattttttgtgttttccaactctaattttctttaacttataaaagtaatccatttcatgattcaaataggcataaacagaagtatgaatcttaacaaacttggatgaaagtctacgcttacagctttgaggaggtagcatggctgaaaagtgtatccaccaagggagtctccttaatgttaaaggcatcatcacactcgcctgaagggggctggtcttccatctctgacacatatacttcaccctggtcctcccctttggattcttgctgagcctccccctaggaatgccaggaaacaggaaactttagaaggagatttactttctgcatagtaattttacttgcatagagtaaatgaaggctgcccttaaggtgagaagaggtcaattacataaagctacaaaagaaattaaagaaagctgacttaactagatttaagttaatgagttcttggtaacaatcttgctggaggactttgactctgtgccactcacctccagcaaaatggaaaagcattatttgcccaattctcattggattctttaaaaaccatcatgatcacctgtggccctggagttaactactctagctggccagataattttttttttttttttgagacagggtctcactctgttgcccaggctggagtgcagtagcatcatcatggctcactgcagccttgcactcctgggctcccccgagactcctaagtagctggaactacaggaacatgccaccatacctggctaatttgttttttgttttttgtagagatggtgtctccctgtattgcccagactggtcttgaactcctgagctcaagagatcctactgcctctgcctcccaaagcactgggattacaggcatgagccattgcaccccacctgccagataatattaataatgatgacggtattctaaattttactgattgcttactataagccaggcactgtgctaagtgctttacatgaattatctcatttaaacctcacagcaatcccacaaaatagggtgctattattgcatttctgcagagaaaactgaagttctaaaatgttcactaacatgctaaaggtaacacagctaaaactggtgctaaatccaggatttggatccaggtagtttaactttctggagttagcctatgtgctctaactactctgttctgcttccctaggcagaagaccaacaagacagctgatttaagttaccttcttacctcttcactctctgtgagtagtccctgaactgtacaaataactgagggagctgaagccacctctggctttccattttctcccagtggcttttcagctactaaggggtctcctttagctgaaagctcttcagtctctctgcagagctccctttctccttcgctagctttaatttcccttccttcttgtctggtaccagatggagggcagcagccttcacttgattcgttgctgctgatgcacaagggctccattaaataagctacctgcaatcaaagtttattattagatgcacaggaacaccactgaaaatcatcatccacatatcaacaatgccacatgctaacactgtcacagtgactaagtctgagaggacaaaatggtttaattaatacaatcatctaaaatctgccaaaatatcttatatacacaggcactgggctggttggtggggacactacagtgaacaagaaagatatggttcttgcctcttccaggagtttatgttctactttttcatctcagctgtcaactctgatcaattgggagtggctgtctagaataaagtgttgaaaattttgtctaccacagacacttgtagagagaagtggcaacatttgaaatggatgcttgctgatcttgatctagggtcttctaaatgtgttcaataacagcatacatataactctctgtccaattctgtttatttctggtcctcagcccttaaccaaggtaatgacacttaaaaatactaccttaaagttacagcattttaagcttcaaggaaaatttgggcaagtataacttcccacaactccaaaagcatgaattacaaggatactcataaagcagtccttatgacccaggcccctaatgactgaagtattagaaattcagtcaaaaagcatgttttttttatttttaatttttttacttttgagacggagtctcgctctgttacctaggctggagtccaatggcacgatctcagctcactgcaacttccgcctcccgggttcaagcgattctcctgcctcagcctcccaggtagctgggattacaggcacatgccaccaagcccggctaattttttaattttaattttaattttaattaatttatttatttagagacagagtttcgctctgtcgcccaggctggagtgcaatggtgtgatctcagctcactgcaacctccgcctctcaggttcaagtgattctcctgcctcagcctcccgagcagctgggattacaggcgcccgccaccacgcccggctaattttttgtatttttagtagagatggggtttcaccatgttggccaggctggtcttgaactcctgacctcaagtgatccgcccgcctcggcctcctaaagtgctgggattacaggcatgagccactgcgcccagccatttttgtatttttagtagagatggggtttcaccatgttggccaggctggtctcgaactcccaacctcaagtgatccactggcctcagcctcccaaagtgctgggattacaggcgtgagccactgcacccggcccaaaaagcatgtatttggtgcatattctgtatcagcaccaagtgctgaggacatagcaatgaacttaatccctgccactgtggagcttatattttagtaaacaatattaagagtggtagaagcatgtaaggataagcattctcttagaaagttgaggcttttccagctttggaaataagagctcactgttacctcagagagaaagtggaggaggttctggtggctggctttccttgccgcttcctgagattcctcactgcctccatccccaacaagcagttcactaggttctctctccgggctgctttcctctagttcctcagcctctggatcctcagtttccctccagttgcccacatcaagatccagactggagtcccatgagctgaagagggacctgcagtcattgctcaactcagagtcattgggatgatcttgttcagaatccagccaaacccactcgtgtcccatctgtaaatacacaggaaaacatgcattaaattcattcaaataaatattcctgaggcatctccatctcccgagttcagtagaaaaataaggggccagaaatttatttgtattcaagtattcatcattaggaagaattaaaatcttgctgaagggagacatgagatgaaattatatttgtctttgggaataaagaaagccccatgtcagtataacagagatattgcaccatacaatacagtataatagagacattaatattacctaataattatttttacttggaattcctcatattcacaccaaaagaagggaaagaactggagcatagctagctcaattattttcctctagcccaaatcatccataactaaaccgtaaggcaaacaaattgagggggcaggggatattttcctcagtgtataaacatttttaacctatgaaccattaaaccttcaaaacacactttaggattgcctttggcatccttctggtcatatccaaattgatgttgagaaacattaagcttaaaatatatcttcccttgctctcattacaccactatcttggtttttttatatctttctttgtcctctcccttttacaactttcaataaatccctaccttctatgttcatgcttggtcctctgctttcttattaatgtattttaaaaaaatgtatatatactttgaggtttcaactttgacctctattcaggtggctcccaaatctctctacctttacttcttatatgaattctggtgtcatttctccatgcatccaaaagtcaattccctttagatgctctaccacctgctgtaacatttctaaaataaaaatcacatttcctttatctccaaaatcactgcttcttcccaatttccttatccccatcaccattttcttttcttttcttttttttttttttttttttgaacgaactttcactcttgttgcccaggctggagcacaatggcccaatctcggctcactgcaacctctgcttcctgggttcaagcaattctcctgcctcagcctcctgagtagctgagattacaggtgcccaccaccatgcccggctaatttttgtatatttatagagacggggtttcaccatgttgactaggctggtcttgaacttctgacctcaggggatccacccacctttgcctcccaaagtgctgggattacaggcgtgagccaccacacccgaccccatcaccattttcttagtctacagaacccacaattctgttttgacccttccttctcttatattcagtaagcaagtcctcttcccagttttctcccacaataagttttctcagtgtccatcctttcctgaataaatgccatagtctcctagtcagcttttctatctttaatcctatctgctctcaacaaatatagttattctactcaaggctttataacagctatcacctcaaatataaatttctcaatctgccaaagtcctccacaaatttagccttattttgttcccttcactcacatgtacacctccttattccttagtataatccctgttctaattacatttttctccgtattgccacccaccacccccaccagatgcctacaccttccattcggtttgctagtctcatttatcaccttctctaccaactcaaaacgtatgtcctttaatggaccttttccacacacttctcccagcttttagagcttgtgtttgtatctcatgcctgtttgcagactgctttgggactacaatgttattttttattttcctttcttgtttgcaacatgtccatgtaacaaggaatttcatgttctaactcctggactaattgaatacctttccattgcctcacaaagactgtatcttctcttccttagcatcctaatatagttctattaaaggcaaaaagatctgtgacttctaatcgtatcctcttaaacccttctcaagaagactttgactattagaccaggctccagtgtgacatattgtctaaatatttagttataaagtgatattcatctaatattttttcatcatagccatgtttataataaaaagttcataacttttttttttttttttttgagatggagtcttgctctgtcgccaggttggagtgcagtggcttgatctcggatcactgcaacctctgcctcccaggctcaagcacttctcctgcctcagcctcccgcgtaactgggattacaggcgcccaccaccatgcctggccaattttttgtatttttagtagagatgaggtttcaccatgttggccaggatggtcttgaactactgacctcaagtgatccgcccaccttggcctcccaaagtgctgggattacaggtgtgagccacggtgcccggcactatttcatttcactatttttaaaaatgttggcagggcgtggtggcttatgtctgtaatcctagcactttgggaggccgaagcgggtggatcacctgaggtcaggagtttgagaccagcctgaccaacatggagaaaccccacctctactgaagaaaccacaaaattagccgggcttggtggtgcatgcctgtgatcccagctactcgggaggctaaggcaggagaatcgcttgcacctgggaggcggaggttgcagtgagccgagattgcgccattgcactccagcctgggcaacgagagtgaaactccgaatttaaaaaaaaaaaaaaagtttagttggccaggagcagtcactcatcacttaaaaaaaaaaaagttattaacagaagttggaattgaactgagattttaaatttaggggtgttttttctctgttgcccaggctggagtgcagtggcatgatctcagctcactgcagcctcaaccggccagggttgtgatcctcccacctcagcctccaatgtagctgggaccacaggtgcgtgccaccacacctggctaatttattatttgtagagacaaggtcttgctatgttgcctagactggtcttgatctcctgggctcaagtgatcttcctgtcttggcctcgcaaagtgctgggattacaagtgtgagccaccgtgtctggccaaattcagtaattcttaaaactgggcttagccttcaaacagcaatgttaagaactatatttatttgagaaagggtcttgctctttcacccaggctggagtgcagtgatgcaattataggtcattgccaactttgaattccgtggctcaagagatcctccagccacagcttcccgagtagctgggactacaggtgcacaccaccatgctgggctaatttttttttttttgagaaagggtctcactttgttgtccaggctggtctcaaactcctaggctcaagcaaccctcccacctcagcctcccaaagtgttgggctattttttttttttttgagatggaatcttgctctgttgcccaggctggagtgcagtgacgcgatctcagctcactgcaacctccgcctcccgggttcaagtgcttcttctgcctcagcctctcaaatagctgggactacagacatgcgccaccacgcccagctaatttttgtattttttgtagagacagagtttcaccatattggccaggctggtctcgaactcctgacctcgtgatctgccagccttggcttcccaaagtgctgggattacaggcatgagccaccacgcccggccgccaagaactctttatacagagtctttaaccataaaaacaggaaaaaaatggtaacacactatcctagaaataccatctgcaaagatagcattaagtgagacaaatgttcctgaggtaagggtcaatgctacctatgtccatgctctaatcttctttaagcaatgccatgaacagaattctaaaaaccttacttttcccaaacattcaagaaaatctgagtaaggaagtctttcctgcgcaatgcaacaccttaaggtatattaactataaactcaattctggttgcttaccttctcacactacagcaagcagttcataagacttttcccctgtaacaatctcattcctacaaatgaaatagttatgcagaagaaacaagtttcaaatacacacacacacacacacacacacacacacacacacacacacagaacaagccaaaggctagttttttttttcagtttattgtatacacacacatttcactggtggttgttttttttaaaaagtctgtacaattgacaagacaatacaaactagctacgatctgctagctacacattaggacattaacatagcccatggtttctgccctaaaacaggcaattgtgctactccaactctctaagagagattttccagctcatgtcgtgtggcccaggtacctcctcttctgtaacttccacctctggaactgggcccgcaagcccaagctctatcttgtttacttttattttaggttcggctcaaagagggtaactctgaggcttcactttttcatcttcatatctgcttcaatggcacagcggcgtcccctggttcctccatcctagatgacaggcagagaaagaaagggagcatgagttggtcaggagacaagagacggtgcaacagaaaagttggggatttggtttcttgggggagagggaagagaatcagcagaaaaatccagagggatgaggggcatatttctgtcttcccacagagtggctaaagaacacctggtagtttgtgagaggaaatgtaggatggaatatcttgctcatgcccactacagaggtccttggaattcacctagggtcccacagaataactattagtcatcccacccaggcccaaatcatgtgcaaaggagcaggagagtaaaagaaaggtaggagagtcagaatgggcaatgggtagtgaggttcttgactaacatacctgtccaactgttggtccctataagaaaggcctttcctgcagactgaccctggcactagttccctagcacctcctgacagtggttttccatgagatcaggacaattagaaggcttctttccatctgctgctctctccctgcagcccagctccttcctcttgtgcaatattttgctgtcttcaatagataaaagatcccattaaccagccttgcaatagccagccaaatgctttgcttgggggatccagagtcactgttgtaggccaataagaaagaacggagattataatgttctgtctgtggtacagcctgtaggcaagatgaattactgaaacctttgctgggccaggccatttttacatttctaatatgcaaggactctaaaatttttagagtccatgaacataagttgcccatgaggcaacagtgaaaataaaaaggtggtaaccttgcatgtgtataatgcttttcttttttttccaagccagtttcatatctattatctcattttatcctcacaacatccctgtgaggtaggctggacaagtacctcattatattagcttcatcacacaccaaggaaaacaatgccccaagagattatccaatgaccttaagaccatgtagttttctagcctgatgcccttccattacatcatacctcactgtcccataatgaacaacacagagtcagagccagttaatttatggaggaaagtaataaaagtctttaggctagctctcctaagcttatctgtaattccagcagccactattgatgcagtggtcacttttttttttcttttttttgtttgagacagagtttcactcttgttgcccaggctggagtgcaatggtgcaatctcagctcacggcaacctccgcctcctgggttcaagcgattctcctgccttagcctcccgagtagctgggattacaggcgtatgccaccacacccggctaatttttttttttttttttagtagagacggggtttttacatgttggtcaggctggtctcgaactcccgacctcaggtgatctgcccacctcagcctcccaaagtgctgggactacaggtgtgagccaccacacccagccacagtggtcattattactgagattgtttttttttttcttttgagacaaggtctcgctctgtcacccaggctggagtgcaatggtatgaacagtgcagccttgacctcctgggccccagtgatgctcctaccttgccttctgagtagcttgtagttagggaccacaggtgcgcaccactccgctgcacagctagtagggttttttgttgttgttgccgtttttaaattttgtagagacagggtctccctacgttgcccaggctggtctcaaactcctgggctcaagcaatccttccacctcagcctcccaaagtgttggaattatagacgtaaaccaccacacccagcctatactgagttctttagcttaaattttactgtttgttacattagtcttgcaacttaattttaggagacaagagaaaaactatttgctgagtactgccattatgagaaacactgttaaaaagccagctagcagctcctgctctgaccaattttaaatttgttaagaaaagaattggtaaaaggtgaagtcaggaaatgacgagcaggtacatcctagatccttcacccctagaatacatttcagcccagtgatctcaaaaacagtccctacccagcccacacacacacacacatgcagaaagacaggaatgcagaagaaaagagtttcttattcaatgacctgaataaacagaagttcaagacactgccacagtctgcatgttggatttccctctgccacccacccccattaagagctgagaatctttgtggcaacaccaccccttgcagccattcaatacttacaaagagagagagaaggaaggcaggagagcccattgggacactgtcctgttagaggacaaacaaacactgatcaggttccacagaaactctcagccacaagcaccccaaacctcaggacagagacacaagcaccacacacacaaggacaaaattttaaaactcaagaacaagaggaaagagatccaaaagcaatctgtccattacgcctctagcacagaaactgatggtccccaactgctgcaggctaagccatttcccccgccttgagagcactctcccagaggaattaataattcccctactcatgatttctcccatgtgactgggcctttcggttacaataggcttattcaacgtttagatgggtgcaaaccaccatcattctaagatctatgtgtctgtatatcattggaatctagaagcccaataccaagtagtaacataagggtccttggatgcttcagacttctactactggaacactggcacacaggttccttcctgatcgcctcaccttctctgaagcatcctgtttgcgggtagaatctctccctcgaagacttttagcactgatcccagactcggatgtttgcataatcaactgcgtggccaagaattgctgtagggagaagaaacagggtaggccatggagacctgatttagtagggacaaattaagtacactttaagcactgtaaatagaactttgtatagtactcttctggctcaaatatattttgactgattggaagtttagcatattaagttttaattctagttgcaatagggatgctaaagaatcaagcagccctaacttttttttgctataacataggatcaaaatctctatcctccaggaatgagaaaaataataaaactagaatgaaccaaagatcattcagcaatttaagtaatttgacaaatcgtgcaaagatttgcaatattcttccaagttcaacaccccaaaaagtacctggtaacacaatcataggataaaagcagggaaaaggaaaggagaaactcttatttgctgatcacctactatgtaccaggtacttaatgtaattaaaaaatatacattcaccatttttaaaaaattttatttaaaaactttatgaaactgcaaataattgcccaagaaaggtagaatattgtatcacaactctttcaccacaccaaagaaaataaaagtaagaacaaaatattatgttttcaattgtgtccctgacagctatccacgtaaaagccacagcaacccttcttggcatcaatatgaatcctccccttgaagtattttaatttcatccttgctgaaacacaaaggatcctcaaagtacctggatctgttccaagacatctcgctgcatctccactgccatgtgatagacatcatggtctgagctattgtacattacagcattctgaaacatcagcataatgtcacgctgaaattcagctgtgcttcggatcagtccattttctatgtttttcttaatagttgacaaatccataggcctaaaaaaaaagaacaggggtaagtagcagtggggatggaaagaggacgcacctagatctatgaatacattatcatatagactttctcatatataccttaactcccagctgccaggacttaaatgctaaccccttatcccaaaacatgcacttaacccaagaaacaatctatataataagcattgagaaaggtaataaagggagtttatttaggttttttttggagacagggcctggatctgtcactcaggctgtagtgcagtggcacaatcatggttcactgcagcctcgaacttccaggctcaagcaatccttggttcactgcagcctcgaacttccaggctcaagcaatccttcccacctcagcctcccaggtagttgggactacaaatgcgcgacaccacacctggctaagtcttgtattttctgtagagagggggtttcgccatgttgcccaggctagtcttgaattcctgggctcaagtgattcacccacctcagcacccccaaagattacaggcgtgagccaccgctcctggtggagatttattcttttagactatcagtggtgatctagccactggaattatcagtttagcactcagtgccccttatagcaaaaccataaacttacttgctttaaactttctatcgaaagcaaaacttcactaagactggacaatttataattcaggcaagttaccatgctgggtggaccatggctcacctctgcacaatgctgtggtagccaggtgctatgtcatctgtaacaggctgcaggaagacattggcatacctgtccaaaaggaataaggtgcaattactgacattctccagaagtgcagggagggaacttactctaagtaactaaaggtagtaagaactaataccagcagttccacagaagcctactcagacttttttccagtcaccaacaatgaagagtaggagaaaatgaacctactgactggtaaagcccactcacctatgattagctgcagctctccatacaagcatgatggctttcttccaaattttctgtgcctgaatagcttcctgatcctcactacagacagagctgaaacagagatacagcaattccactaggcacaagttaaaaaataaaaattataattctcttttctttttgagacagggtctcactctgtcccccaggctggagtgcagtggcatgatcatgttcattgcaccctcaacctcccagactcaatcctctcacctcagcctcccaagtagctgggactataggtgcataccaccatgcccagctaattttttaatttttttgtagagatagggtctcactgtgttgcccaggctggtctcaaactcctgggttccagcgatcctcctgccttagcctcccaaagtgctgggattacaggtgtgagccactatgcccagccctaattatttcttgtcagctgtttattccaggtcaaaaaagggaaacactaaagaaaagatcaggccaggcatggtggctcatgcctctaattctactgctttgggaggtcaaggcaagaagactgcttgaggtcaggagttcaagaccagactggaccacatagatcctgtcccttaaaaaaatttttttaaaataaaaatttaaaaataaagaaaaaggccaggcatggtgtctcacgcctgtaatctcagcactttgggaggccgaggcaggtggaacgcttgagctcaggagtttgagaccagcctgggcaatgtagcaaaacttggtttctactaaaaaaattttttttaattagcagggtgtggtggcacaggctggtagtcccagctactaaggaggctgaggtggaaggattgcttgggcctgagaagtggaggttgcagtgagctgagatcgcaccactgccctccagcatgggtgagtgagaacaagaaaaaagagaaggaaaggaaaggaaaggaaagggaaaagaaaagaaaagagaaaagacaggaagaaagacggaaggaaggaaggaaggaaaagatcctctcctcaccttcactgccttggcctcaaagaaagaatctcagatactcacaactgtgaagaagcagggctgctggggatggagtctgccagtgtgtgtgactgcagtgtagcattgtgtatgctgaagccatcatcactctcgctcacaggaggttcattatccatttctgacaagtagccttctccttgatcctcttccttaggctcctctaggctggccgcttcactgacaccatcttcctcctcatcctcacctggggcatccttagatacagtatgctccagttaacaaatgcaagcaaagctatccagcaaagcatcattaaacatgatctgtcttttgggttagaattagttctagaaatgacctcacgctgtttcctgactcagctgtctatcacttatactaccatctacttacagacactgcgttaagtaatttagaacctggacaaagaataatacccaggatcttttaaaaagaaagaaaaaaaaaagctacttacttaagactaagctaagaggcgttccttctttccccttgctcgagagtaactctgaccctgggtacaaagttatcaaaaataatttttattttgtgtctcatttgatggagcaagctcacatcacattctttaagcctctgttactgctgctttaataattctaaaaagaaaactctggatgattctctttggatagtctaattaataaacttgattcctgtatgttctccttggctcaggtatccttattcactacaaatcactctaagtgtatcaagccttcttaaggactgtgtgatattcacatgctgtttcatatgggaggcacctgttgctatagtactcccattatgcctgtctactgcagcttttccccatgcaactccataccagtctcttatcagagaataaagatgtgactttactgaaattcattaaaaagtagtgctatagggaaatctaatcacatggcaagaggaataaagaaaagtctgaaatacctttatctggcttccaaaaatagtccctgattcttctttcaatgagtctgcagaggagagaaagactacctgaagatttttccaccttagccttccccttcctatggaccataatcccctgcagctctcctttacatgctgacctgttctacctcctctacttgcccacaacccacaacccctcagaagccaaagcaaatgatttcaagtcagtgaaagaggactttatttacctgacatttcaaacttgtgctgagtctctgcctctaaaggatcttcaatgggatttgagccatgtgatggagacaacatgctttcaggggatgcctgaaaaccagaaaagaaaaaacaccctaagtactgataaatcgctatagctcacacaactttattcttcagtgataatgagaccatagaagaaattctaagtcctactcatgtaatgtgactccaatggtcaccttaacaggaataagtatatataacactaatcacagcctatgggctttggacacatcaaacatgtcagaactcaggaatgcaactggaaaaccaaaaagcctaagctgtcacttcttatctaaggtataaacctccatctccccagccccgatctttcttaagtacctctgtcttcacatttgtaagtggagtctcatcgcctttcccaatggcaacatctgcttcaacaatctctccagctgcagtacttcccagttcctcatctaagtcctgactcctgagttctggtggctccatacttgtggctggaacaactccagctactatttcggctcctgaaatgactggctctggttctgcaggttccaccttgatctctgcactgggctccctgatgtccaccagttcatgtattcccttgttttccgtttcctcaaagtccagtctctcttgcttgaccgtcatttctggtgcagggagaggtactggcttgtcccgctcctgctggataggatgctcccaggggccaggcagggactgaggatcatcattttcttcacaaaatgacagtgctgcttccactgctgccacatccagcacttcaggatgatcatctacctgtcccacaaaacacaagactattgaggtcacagaaagaagcccaagtccttcaatttttgttagcaccaaatgtgatggcttgaatctgcagcttttcgctccattttttccatgtagtggaggcaaacaatgaagaggcacctgccctgtgcaaaccagtaacatgggtagacctgaggagatgactagtatgttagcaccaaagggctacaaagatggagatgggcagaagtaggagagttgtttaagtaattcttactgtaagaagcaaagcagccgagtatggtggctcatgcctgtaatctcagcactttgggaggccgaggtgggtggaccacttgaggccaggagtttgagaccagcctggccaacatggtaaaactcatctctactaaaaatacaaaaaattagtgaggcgtggtggcatgtgcctgtagtcccagctactcaggacgctgaggcacaagaattacttgaggctgggaggcagaggtaacagtaagccaagatcgtgccactgcacttcagcctggatgacagagcaagactctgtctccaaaaaaaaaaaaaaaaaagcagcagcagcaccaaagtgaggctgaaaagagaagcctatgtaggacccatgagattctctggggctttgctgaatagttaccttgtcctcaatgatggcaatgatgtctccaacagtctcaaaatccagctcttcacctgtgtaagacacagcaatatccatcttctcagccagatctaattcttccttcccatctatgctgggagcctttgatccaacaggagcctctgctacccctgatcgaaaacactcttctttgatagaattgatgatcatggatatttcactgctgtccatggaaacagtcacagtatgtggatcccccacagcctccatgggaacacagttgtcgggttgactcactgagtaacagaaagagaaaagcatctcagaagcttattgggtacaaagcgaccaccttgagatcacataagcgctacagacagatgtcaaatatccaaacacttaaggtcagaaagagtcatcaacatgtgcctatgttttcttctccccagttttatctagaaaggtgagaacatattttcaagcctgctcatatctgtatacttagcctcttcctgcaatacataaatgcccacccacctcttctcacatctatttctaaggatatttatttctaaggataaagatggcacatgtctatgtagaacagagaagaagcatctgaatcggagctgatgctcttggtcatttttctctaactaaagctcaaaatgaaattttagatctagtggctgctcagggacgcacctggagctacactttcagtagtggagacagccggagcagaggatggtgctggcagcgcaggcatcatgacaatggtagcttgggacacagactctacagggggtggcacaagtttaactggaggctcactggcaacagtagtgaaggaagcaagaggtgtggtgaactgtgtaggaccagcttctaaaagccgggaaagagtgggagcacctaacatataaagaggtacacaaaatgaagtaagaagaaagcacataaataagaagcaatagctacttgaagactcaactaagaaaattcttatggtctcaaaggatgagagcaactcctgcattgaataagttcatcatctatatccttactctaaccttacttaagatcttcctccaagttaggaatgaaccaaagcactagaacacacaacatatataaaaaatgggtggtaaggctaggtgcagtggctcacgcctgtaatgctagcactttgggaggccgaggcaggtgggtcacttgaggtcaagagtttgagaccagcctgggcaacatagcgaaaccctgcctctactaaaaatacaaaaaaaaaaaaaaaaaaaaaaaaaaaaaaattagctaggcgtggtggtgggtgctgtaatcccagctattcaggaggctgaggcaggagaactgcttgaacgcaggaggtggagattgcagtgagccaagattgtgccaccacactccagcttgggcgacagagcaaggctctgtctcaaaaaaaacaacaacaacaacaacaaagggtggtaatttttcctcagaggaaaattaatcaccaagaaacgaaaaactggtatgaataaatctgtcgcttctgctgaagttcagcatattgtaaaccacccaagttcaacaccattcaaataccaataaggtttgtatggtattctatggagctttttttatttccctgctttatactttctacctcattaaattctcatcacatccttgtgaagtatatatgttacaataaaaaaggaaactgaggctcaaaagctaagttacctatccaaggtcacaaaaccaatgtgtggcaggcctgagattcaagcccaattctctggttccaaatcttattccactattctataatcttaggtatctctagcaccttgattttgcaagccctaagaaagcagttcaatattactctcaatatccatgctgtggtcaatcagggctatcactatcttgaagatagatggctttataatatggagactacattgtttaccaggtaaagtagctccaaaaaaaagttagaaaaagttgggctttaaatctagcactgacaactgcttagtaacagtgaaactgaggtcagtcaatgtcaagttcaacacctttgaggttgataaaggaaaagtggtaacttacctgatgcagcaggggaggctgcaacagtattgggtgtttgctgtatctccccaccatgtatcatgggaaggaccccgcctacctccaggaggacacctgtactgttcaggtggccagaagccacagccatttcactctcattgacctaccagggaagaatagaggtgaaggctacactcaagctttccttcactaccatttcccaacaaagctccagcagttgatcaaacttcatgaaaactaatagctaatatccacagagaataatttaagacccaagggaaactctaaactataatgttcaaaacttatttgacaagagttctctggagaagagaaccaaaataattgtgattcagatacctcaggacccatgggtactatcaacttactgtatttttaaaaaattaacatttaattaggagatcttttcctcttttgaacttttattccccatgtcacattttaggtcccaggcactcccttccaagtactaaatcaccacagctctcaaacacccacagaagtctccataccagtctggggctagtaggcaggaggctgcccttcttcaagagctctgacagcagaggggaggggggtggagttgctttctgtccaagcatctttttctggggtgaatcatctgttactggggtcatgggggcttctaagggtgcagagcctggaggaagggtgtcaggaatcccaggaaacgaggtgactggggtactcggcaaagtcccgggggttacctaagagacaacagagaacctttatctgacttctcaaactatggaaggttccctactaatctgtatgggttagtgtgtctaactattattttattagtcctgagtggaattgcccagaaaccctctatccctcctgctcttagccatacttttcttccccacaatcttctctttcatccactcaaacccacagtgactcaaccatcccacccaacctgccttttatgaactccttacccactaccaatattacatttacaaggattttgtcccttatttcagcaggaatttcataagactagtatgaaacaatttcttaaaatagttttttacctatctctcaaaaaggtcaaaagcctcaatgcttttaggtccgttcttatctcagagcacagaacatggtaaattaagtctttagcattcagatcaagagaggaagttgcctctaggccaaaagtggtttcctcatcgctcagctctgccggcttattgccccttcactgatcaattcccacagatggaaatatactcaccccagaggtagcctcttccatagtggttggagtcaagtccccaagtggataatcacctcctggggaggcagaatctataggagagcgaaccatcacagtgggtaacctccgggggggtgtttttactgcttgacgagctagaacataaaagagaacaatgtccaaatcttcaagattaaataaatgaaacttgacactagtctgctattatacaataaaggacaaataggtatgttgcattactaaagcagcataataagtttggattagaaagctttaacacttctagagatggataactttttagcctaatttttcctaagggcaattctcacactaagaaactcctttaacaatctcaaactacttaattatcccaaaggtccttggagtgggaaagtagtttaaacatcctttaatattctctttagcaacttactaatattctgcttttaagaacaggaaggccaggtgcagtggctcacggctgtaatcccagcactttgggaggccaaggcaggtggatcacctgaggtcaggagtttgagaccagcctgcgaaaccccatctctactaaaaatacaaaaattagctaggtgtggtggcagccgcctgtaatgccagctactcgggaggctgaggcaggagaatcacttgaacccgcgaggcggaggttgcagtgacccaagatcgcgccactgcactccagcctgtgcagcaagagcaaaactccgcctgggggaaaaacaaaaaacaaaaacagggaaagacctcactggcgcacagcatgtattcctagagttgtaaatgcttaaatttctcctcatctaatgactgagctattctcaatcttttcacaggcccttgacttctaaaacattatgttcaatatctcatcaagcctttgtgtcctgaagttaatttaaggtctagtgagatctgagcacaacgcatgttctaggagtttcttcttaagacattaagggatgtttttattctggtagaagagaaaactgcaagtaaatttaaatcaatgtattctatgttacaaaacagtccaactgtcattagcatgcagtactgtgcaatcaattgctaaagaggcatactaggttcagcttaccctggtatgcagcatctgtagccttcctctttacttcagcctcctcttcttccaatttctttttcctaaacagggaattaagggttagatgctagacagctctggctcctccccagagttcacagaacccttacaaagtaattttttttgccaggccagcactttctggaagaaaggcctaaacaggaattctaaccagcaaaacagtgaattggggtatactgcctaactcccagttcttcacccaggcaaactatagccactcttaagttagaactaagttatgttttcatactgaaatgtcccattatattaccttctaggactcactcccccctcccagccaccaaaccactttgcagctttccccttccagaatctgtctcaagtctaaagggacggcaattggaggaaataagccagattacttgaggggaaaagagggtaaaaagaaagaagcacagaagaacaatataatataacccacgttgcaatgtcattgcaaagctcatccagtctgctgtccatgtgtccagcttgaattagttctgcatctctctttagccgtctataggaagaaagagaggtaggtagactgggttttttaatctgctattttaaaagttctgaccagtaccagaagacagtcccttatgtctttctcaattttttggcattctctctgataagtacctatatctctcctgggtttcctttatcactttctttagttcttcaactcgctcagcagtcaatttccgaacaataacatcttcaacagtttccaccacttctcccttttcacctcgtttccgtctgtggaaaattgaaaaaaaaaaattcatattcaaataacataacatttatcccctctcctacttgcttttaccacttaatcatagataacttctgctattttttaatcatccagtatcataactaagtataaaccagaattcctcagtaaatactctccactaaagaaatatggctgaagtacctggctttgtactcactttggtgtctcagtggtctctaaaagctccgagtactgggaagcacaatgctattaaaaaaaaaaaaaaagtgaaaatgtgatgagcaaggctggaaagaaatgacctttcaaagtttcaagagattagagtaagatttagagaagagaactatatgtaagacgggagtggtttactaggagggcaagtaactttataatcaaatcagttcaaaataatcaaaacaagacacagaaaaagacagtcttatggactggagtttgtgcatttgcggaaaggcaacctaactgccaatatttatagctaatatctaccaagtagttactacatgcaaggcactgtgttaaatgttttacatgtattacttcaattagcttcacaacaatcctgaagcaactcttttatctctattttacaaatgaaaaaacagaggatcatggcccaaagtttttagatggagtaataatgaacccagatctaattcccaagcttgggctcttaactgttatgcaacaccaataagaaaggtctaatatgatcatacatggatggattagcaaacagtaggaaaaagaaaaaggtattctcaactattttcccacatcatggtataaaagctttgtaactaaaagtcagggcctggtagagaacctactttacaacccaaagactgctctaaaagagcccttgcttgggaacttactttttgagagaaccagtctggagggcggccaggttctgcaaagggcttgattgctctgctaactgataccctacaaaatgaggaaagctttattacacaccaagcagaaaacaataggagaggtatgctgagagtgcaaggcttggagttcaaactttggaataaaaaagatgcgaatggccaggcgcggtggctcacgcctgtaatcccagcactttgggaggccaagacgggtggatcacaaggtcaggagatcaataccaacctggccaacatggtgaaaccccgtctctactaaaaatacaaaaattagttgggcatggtggcatgcacctgtagtcccagctactcgggaggctgaggcaggagaatctcttgaacacaggaggcggaggtcacagtgagccgagatctcaccaccgcactccagcctggggacagagtgagactccatctcaaaaaaaaaaaaaaaaaaaaaaaaagccaatgaatgcgaggtgtgcaatggaccgtgcctgtaatcccagcactctgggaggcagaggtgggaggacagctcaagcccaggagttcaagccacccgaggagatcccatccctacaaaaaaaaaaaaaaaaaaaaaaaaaaaaatcgacaaggtatggtggtgcgtacctgcggcctgtggtcccagctacttgggcagctgaggtaggaggatcccttgagcccaggaagtcaagaggctgcagtgagcccaaatcgcgccactgcactccagcctgggtgacagagtaagaccaccccctccgccattcaaaaaaaaaagaacagcatatatagtatataatcatttgtgttagaaaatgagggggatgaaggggaaaaagaaaatatttgctcacataaaattttgctggagagacacaagaaactgctaacactagtagacgggggatagtaacgggaggaagacactgcatataattttgaatcttatgacttagtatctgctgataaaataataaaatttaaaacttttactcaagtattcttatactatttttctatggctgggcgtggtgactcacgcctgtaatcccaacacttcgggaggtcgaggagggcagactgcttgagatgaggagtttgagaccagcctggccaatgtggtgaaaccccacctctactaaaaatacaaaaattagccaggcatggtggcgtgcacctttaatcccagctactcgggaggctgagccaggacaatcacttaaatccaggaggtggaggttgcagtgagccgagatcgtgccactgcattccaacctgggtgacacagtgagactccatctcaaaaaaaaaaaaagattcttaacactatttatctaataaaaatgtgaggaaatatacagattagattctatttcaaaccagtttacctgttttgtttaaaaatgagctcaatttatatacatatacaaatatatgtgatgtgtatacacacacacacacacacatacaaaacacacattgtttttgtttagacagtatctcactttgtcacccagacttcagtgcagtggcacaatcatggcttgctgttgcttccacctctgaggcttaggcaacctcccactgcagccccacccaagtagctgaaatcacagatgcaccatcatgcctggctaattttcttttttgtagggaacagtttctcttatgttgcctccctggctcaagccatcctcacacctcagcctcccgagtagctggaactataggcacacaccaccagacctggctagtatttttgtgtttttttatagttttgtcatattgcccagactggtctccaattcatgatctcaagcaacctcctgccttggcctcccaaagttctgggattatagatgtgagccattgcacccagccccattctattctctagttctgtgaggtctataatttttcctagattccacatataactgagatcatatggtatttctttatgtgtctggcttatttcactttacatactatcctccaggctcaaccatggaatcacaaatggaggatttaattcttttttatggctcaacagtattccattgtgtgtgtgtgtgtgtgtgtgtgtgtatacatatatattttttctttacccattcatctgttaatggatactataataattaccttaattgtggatagtttcacaaatgtatatatatttcaaaaataccatgtcttatgctctaaatgtgtgcactggccgggtgtcgtagctcatgcctgtaatcccggcactttgggaggccgaggcaggtggatcatctgaggtcaggagttcaagaccagcctggccaacatggtaaaaccctatctctaccaaaaaatacaaaaattagccaggcatggtggcaaaggcctgtagtcccagctacacgggaggctgaggtgggagaatcacttgaacctgggaagcagaggttccagtgagccaagattgcaccactgcactccagcctgcgcaacagagactccatctcaaaaaaaaaaaaaaggtgcagtttactgcacatcaattatatcacaaaaaagttgttaaaagggaagagatgtgacttttcttaccaacccccttccttcttgttgcatggaacaaggatgtgatagctgaaggtcaagcagccaccgtgaaccataagataaccagaagataaactatgcactgaggaaggtggaacagaaagagaatatcctgagcctctaatgtcactgtgaagttgctatgagagctgtggactgcctagacttcctgtatgtgtgacaaaaaataaactcaagttttttttttttttttttgagatggcgtcttgctctgttgcccaggctggagtgcagtggcacgatctcaaatcactgcaagccccgcctcctgggttcacaccattctcctgcctcagcctcctgagtagctgggactacaggcgcacgccgccacacctgatttttgtatttttagtagagacggggtttcaccgtgttagccaggatggtctcaatctcctgaccttgtgatccgcccacctcggcctcccaaagtgctgggattacaggcgtgagccactgcgcccggccttaaacttaagtttttaacccatttctttgttgctattgctttctatatagtgtttttgtttttatggtggccacatattacttcaaaaattagatttaaaaaacaaacaaaaaaaatgctaggaagcatgacaatcagcaaagtactgaattgtttataaatgtggcaagagagttaaattcataatggatgattcaaaagaaagggggtgaggggctgataccgagaaaggtaaaatgatgatagttctaggctgggagtgatggctcacgcctataatcctagcactttaggaggctaaggtgggaggatcacttgagcccaggagttcaagaccagcctgggcaacaagtgacaaaaaacacaaaaaattagtcaagcatggtggcaagggtctgtattcccaactactcaggatgctaaactgggaggatcacttgaggccaagagttggagaccagcctggggaacatagtgggacctcgtctctacaaaaacataaatatttaaattaaaaaaaaaaaaaaagttcagcctgggcaacatggcaaaaccccatccctaccaaaaaatacaaaaattagccaggggtgatggcatgtgcctgtagtcccggctactcaggaggctgaggccggaggatcacttgagcccaggaggcagaggttgcagtgaaccacgatcgcactactgcactccagcctgggtgacagtgagaccctgtctgcaaaaaaaaaaaaaaaaaaaaaaaaaagtcaaacataataaagttactacataacccagcaatttcactccttgaataaaaaactcaagagaattaaaaacattgtccacaaccttgtacacgaatgtgcacatcatcagcattattcataatggccaaaaagtggaaacaacccaattgtctatcaagtgatggataaataaaacttggtatattcatacaacagattattattcagctaaaaaaggaattaagtattgatacatgctacataagaatgaaccttaaaaagtgttatgtcaagtgattaaaaaaaacaaaaaaaagtccagaagagcacgtatcattccatttgtatgaaatatccagaataggcaaatctacagagacaagagagttggctgggtatggtggctcacacttgtaatcccagcacttttggaggccaggactggtgcattacttcaagaccagcctggacaaaacctcatctctactaaaaatacaaaaattagccaggccactcgtggcgcatggctgtaatcccagctacttgggaggctaaggcacgataatcgcttgaacctgggaggcggaggttgcagtgagccaagatctaactactacactccagcctgtgtgacagtgagactctgtctcaaattaattaattaattaatagaaagtagatgagtgcttgcttgggggtggtgaggaggggacaacatggactgacagttaaggagtaaggggtttttcttagaataaaatgttctaaaattagattgtggtgatggttgcacaactgtgaatatactaaaaaccattatattgtacattttaagtaggttaattttatagtatgtgaattatatctcaataaagctgtttaaaaaaagaaatacagctggcctggtggctcacacctgtaatcccagtaggttgggcggatcgctcgaacgcaggagttcgagaccagcctaggaaacatgatgaaacccccatctctacaaaaaaataaaaaaaattagctgggcatggtggtgtgcacctgtagtcccagctactcaagaggctgaggtggaggatcatttgagcctgagatatggaggttgcagtgagccaagatcacaccactgccctccagcctgggccacagagtgcaatcttgtctcaaaaaaaaaaaaaaaaaaataggcctggcagtggctcacgcctgtaatcccagcactttgggaggccgaggcggacagatcatgaggtcaggagattgagaccatcgtggccaacatggtgaaaccccgtctctactaaaaatacaaaattagccaggcatggccaggcgcagtggctcacacctgtaatcccagcactctggcaggccgaggtggggggatcacctgaggtcaggagttcgagaccagcctggccaacatggcgaaactctgtctctactaaaaaatacaaaaattagctgggcgtgtccgcaccactgcactccagcctgggcaacagaaggagactcagtctcaaaaaaagaagaaaaagaaaagaaagtctacttacagcttaatatgattaactatagaaatctaccgatgtgaaagagtatctaacaatttctaagacccagaaaagctgacatcctagataccttaccaattttgatcgccacttctcatgacagaagatgctaaacatagcttctctcggatggaccatggctctgtggggccagtgcttagcagcttgtgttctgggaaagggagaaaaaaaaaaaagccttggaaacaaccactgagactgtagtgctaagctccaaaatccccaaaaagaggactaaaagcctaatacaaaacatcccaacttgttaggacaaagtgagctactataaccaaatcttgattttcacctctccaagtgaaatatcaccagtgaccggggtacctattcgttgcatgtgaattattaacattttatttcttaaaacgccatggcttgaagctccgctttattaagaaacagggaatgtcagattaggcagttctccctaaaagcccagttttaagaatactggactttattccagtttgaacttattcagggcttatttcccaggaacccgagcggccagcccctcctactaccccgcctccctcttagcataaacttgtttacttctctcagatcctctactccaaatgtcgggggtaaaagagcttttcagtccaaaaaaagaaaaatggctgaaatccccgagatgcaatttcctgagtggcaagaaaagctcatggttaaaagaccccacttccactgcctcacaaacgtcagacaaaaaaatgaatggctctttgaggtgccggttactccgtctggctcataacatcttttcgtctgcacgcccaagtttctagagtgcttttacggttaacccgcagagttcctaacacactaggattcactaagctgcttctctcacacctccgctctctccctgagaaacaagaccccagatttctgggcccccaaacgttggtcttcacgatgctgtagagcgcaggtctctgaaaaccctgggctctcaagcaacccacttctcccactccctaagcgtgtaacaaaaatatggtgcctagcctcggatctacaaaggcctttcacgcaaaacctgctcagatactcactgcccgttcccgtcgccatcttggccccgaagtctccaaccctgaggagagacggtctggaagggccgaaaccctggaattctgggaaatagtgtaccggcgttggttcgcggtgcctcctgggaaatgtcgtttttccccttaagacaaagcaagcaccctaaaccagttaccctgtgcactcctgttaagattgttgctaaggaaggacaggagttggctgctgaagcctcaagatttcctttaggctcttaggtaagaaatgtctaaggttcaaggaaaaaggttaagttggaagaatcccaggcaaaataagtgcgaatccacgaca

SEQ ID NO: 719 - DNA, 2241 bp, Homo sapiens
agtagtgtaatcacagctcactgcagcctcaacctcctgagctcaagcaatcctcccacataaggctttcaagtagctgggagcacaggcacatgccaccaagccggggtaatttttaaatttttttgtggagacagtctccctatgttgccagggtggtctcaaactcctgagctcaagcgatcttcctgcctcagcctcccaaagtgctggaatcaaaggcatgagccaccacatctggcctatatatacattttcttagattatgctttacatcggtggttttcaaactatattccttggagcctaggtttctaaagaggtacccaggctgggcatggtgactcacgcctgtaatcccagcactttgggaggccaaggtggacagatcacctgaggtcagaagtttcagaccagcctggccaacatggcaaaaccctgtctctactaaaaatacaaaaattagccgggcatagtggcgcacatctgtagtcccagctactcaggaagctgaggcaggagaatcgcttgaacctgggaggcagaggttgcaatgagctgagatcgtgccactgcactccagcttgggtaatagagcaaaacaacatcttaaaaaaaaaggaaaaaaagaggtatgattctgtctcaaaaaaaaaaaacaggtacctcaagggttaaaaaggtagcattctgaccaggagtggtggatcacgcctgtaatcccaccactttgggaggctaaggcgggcggatcacctgaggtcaggagttcgagaccagtctgaccaataggaagaaactcggtctctactaaaaatacaaaattagctgggcatggtggcacatgcctgtaatcccagctcctcaggaggctaaggcaggagaatcgcttgaacccaggaggcggaggttgcggtgagccaagatcgcgccattgcactccagcctgggcaacaaaagcaaaactccgtctccaaaaaaaaaaaaaaggtagcgctctaagtttccctctcacacaagaatcaaagcagttctattctcattggtcttaaaaagtggaagtgaaagatttcagctgaagaaagtataagagccatctgtcttatatcaactggtgaataaacaaaatgtggcatatccaaacatggaatactactcagcaataaaaggaactactgatacatgctacaatatggatgaacctcaaaagcatgctaatggatgggaggctgaggtgggaggatcacttaaggtcaggagttcgagaccagcatgggcaacatagtgagaccctgtctctaaaaataaaaagtatccaggtgtggtgatatatgcctgtagtcccagctactccagaggctgaggcaggagaaagcttgagcccaggaattcacgccactgcactccagcctggtgacagagagagaccgtgtctcaaaaaaaagctaactgaaagaagccagacaataagactaaatattgcaagaatctatttatatgaaattcctggaacaggcaaaactataaagaagcaaagcagtggttgctgggggatgggaatgggactgactgcaaatacacacgagggaactttttggggtgatggagtattctaaactggattatggtaatggttacaactgcataaatttacaaaaactcattgaaatgtagacttaacattttatggtatgcaaattatacctcaataaaactatgtgtttttttggtgtcttttttttttttttttttttgagacagagtttcgctcttgtcgcccaggctggagtgcaatggtacgaccttggctcactgcaccctccgcctcccggattctagcgattctcctgcctcagtctcctgagtagctgggattacaggtatccgccaccatgcccggctaattttcatatttttagtagtgacagggtttcaccatgttggccaggctggtctcgaactcctgagctcaggtgatccacccgcccaggctggtcttgaactcctgggctcaagtaatcctcctgcctcagcctcccaaagtgctgagcccctgcactggcctaagctatattttttttaaaaagaatgaagagctacaccaagactaagaaggattttcatgaaatactgttgaatgagaaaaccaaaatgcagagtatgtatataatatcctatttttgtaaagcaagcagcccattaaaccttgcatatgtatatatacatattccttttaatgtg

SEQ ID NO: 720 - DNA, 3764 bp, Homo sapiens
tcagtgtgtgcggaacgcaagcagcagagagcggagaggcggcgctgtagttaactcctccgtgcccgccgcgccgaccctccccaggaacccccagggagccagcataaagcgagctcacccagagtacagctcctctgacagcgagctggacgagaccatcgaggtggagaaggagagtgcgcacgagaatgggtgagctggcggcggcggagcggagccgagccagagcgggaggcgagcgcacgcctgccgcggtgacagcgggctatgacccttggcgcgccggtgccctgcgctgacctccgcgcgtcgcaggctggcggcagcctgcggccagggaacccctaggtgccttccagcccaagtggcaaaaaaagtctgagtgcggggagggtgtgggggcgacctctcagatcacctctcctcgtttaacggcgatttcagtttttgtgttgttctttttctcttttcagaaacttgagttcggctctaggttccatgtccccaactacatcttcccagattttggccagaaaaagacggagaggagtgagtctctttacactctccttttatttttgttattgattaacggaaataaccacctttttttttgtctttgaaatttacagtcgtaatggtaatgccttcctttgttttgcttgccttctgcagataattgagaagcgccgacgagaccggatcaataacagtttgtctgagctgagaaggctggtacccagtgcttttgagaagcaggtaatggagcaagtaggtaaagctctcagcatagctatctgcaccttctgaatcttcccctcattaatctcatccgccttggaaaatagctgtgttgcttgtgcctagatgaattcgtacacagataccagcgtattttgtgaagacaactgattttgctttagtccatgctttacgatttacaaagcatgtatctttgtatatatgtttgcatattttaaattgttccccaaaggaacttgtgccaaatcaatcttttgccattctcatctttagggatctgctaagctagaaaaagccgagatcctgcagatgaccgtggatcacctgaaaatgctgcatacggcaggagggaaaggtacatctcctagacctagtgggggctctgaatggttggcaaagagtgagcagcggctgaaggccaggattggtgcagtagctgcctgatttttctttgggggtggggagagaacggtgtgtggtgtgtgcagttccctgtcagtacattttcgaatgcacatagaatcttctccagtgaattcaccaccccagctctctgcggattgagctagtgcatcttttggaaaaatacctattatttgtgaggtcttcaaaagttgtgacagccctgattcagatcaggtagctttcacatttgtccattgctattttgagaaaaagcatttaaaaacaatatgtggtcttatttttggtatacgggattttaaaaaaaaggtgctgccacatgcctcttgaggaaagaaatgtattctggttaagtaaaggaaacctaacgggagaccaaggtctgtgtgtatgtctctccagcaggaaaatgctttactgaggtccaagtgcctaaaagctccgcgatgataacttacatctgtgtgtctaatgaatttcactgctctgtggtttctctgcccttgatgtattttttgttgttgttgagggaaaacattaaaggaatgaacatagtttcatctgctggtagggtataattccaatttctgctctgcagcttctaattgggctttgaacttgcattagcaaacacattctgcttatgttgattaatgcaaagatttttgttgattccaaagactttcggaagaacccctgactgttgtgttttaagggatgcaggtatctgccaggaagggctgtctctgggacttaagaaatgagggaaacgggcaaagccctgagatttttcttttgttcttttgcttaggttactttgacgcgcacgcccttgctatggactatcggagtttgggatttcgggaatgcctggcagaagttgcgcgttatctgagcatcattgaaggactagatgcctctgacccgcttcgagttcgactggtttcgcatctcaacaactacgcttcccagcgggaagccgcgagcggcgcccacgcgggcctcggacacattccctgggggaccgtcttcggacatcacccgcacatcgcgcacccgctgttgctgccccagaacggccacgggaacgcgggcaccacggcctcacccacggaaccgcaccaccagggcaggctgggctcggcacatccggaggcgcctgctttgcgagcgccccctagcggcagcctcggaccggtgctccctgtggtcacctccgcctccaaactgtcgccgcctctgctctcctcagtggcctccctgtcggccttccccttctctttcggctccttccacttactgtctcccaatgcactgagcccttcagcacccacgcaggctgcaaaccttggcaagccctatagaccttgggggacggagatcggagctttttaaagaactgatgtagaatgagggaggggaaagtttaaaatcccagctgggctggactgttgccaacatcaccttaaagtcgtcagtaaaagtaaaaaggaaaaaggtacactttcagataattttttttttaaagactaaaggtttgttggtttacttttatcttttttaatgtttttttcatcatgtcatgtattagcagtttttaaaaactagttgttaaattttgttcaagacattaaattgaaatagtgagtataagccaacactttgtgataggtttgtactgtgcctaatttactttgtaaaccagaatgattccgtttttgcctcaaaatttggggaatcttaacatttagtatttttggtctgtttttctccttgtatagttatggtctgtttttagaattaattttccaaaccactatgcttaatgttaacatgattctgtttgttaatattttgacagattaaggtgttgtataaataatattcttttggggggaggggaactatattgaattttatatttctgagcaaagcgttgacaaatcagatgatcagctttatccaagaaagaagactagtaaattgtctgcctcctatagcagaaaggtgaatgtacaaactgttggtggccctgaatccatctgaccagctgctggtatctgccaggactggcagttctgatttagttaggagagagccgctgataggttaggtctcatttggagtgttggtggaaaggaaactgaaggtaattgaatagaatacgcctgcatttaccagccccagcaacacaaagaatttttaatcacacggatctcaaattcacaaatgttaacatggataagtgatcatggtgtgcgagtggtcaattgagtagtacagtggaaactgttaaatgcataacctaattttcctgggactgccatattttcttttaactggaaatttttatgtgagttttccttttggtgcatggaactgtggttgccaaggtatttaaaagggctttcctgcctccttctctttgatttatttaatttgatttgggctataaaatatcatttttcaggtttattcttttagcaggtgtagttaaacgacctccactgaactgggtttgacctctgttgtactgatgtgttgtgactaaataaaaaagaaagaacaaagtattc

SEQ ID NO: 721 - DNA, 3764 bp, Homo sapiens
tcagtgtgtgcggaacgcaagcagccgagagcggagaggcgccgctgtagttaactcctccctgcccgccgcgccgaccctccccaggaacccccagggagccagcatgaagcgagctcaccccgagtacagctcctcggacagcgagctggacgagaccatcgaggtggagaaggagagtgcggacgagaatgggtgagctggcggcggcggagcggagccgagccagagcgggaggcgagcgcaggcctgccgcggtgacagcgggctaggacccttggcgcgccggtgccctgcgctgacctccgcgcgtcgcaggctggcggcagcctgcggccagggaacccctaggtgccttccagcccaagtggcaaaaaaagtctgagtgcggggagggtgtgggggcgacctctcagatcacctctcctcgtttaacggcgatttcagtttttgtttgttctttttctcttttcagaaacttgagttcggctctaggttccatgtccccaactacatcttcccagattttggccagaaaaagacggagaggagtgagtctctttacactctccttttatttttgttattgattaacggaaataaccacctttttttttgtctttgaaatttacagtcgtaatggtaatgccttcctttgttttgcttgccttctgcagataattgagaagcgccgacgagaccggatcaataacagtttgtctgagctgagaaggctggtacccagtgcttttgagaagcaggtaatggagcaagtaggtaaagctctcagcatagctatctgcaccttctgaatcttcccctcattaatctcatccgccttggaaaatagctgtgttgcttgtgcctagatgaattcgtacacagataccagcgtattttgtgaagacaactgattttgctttagtccatgctttacgatttacaaagcatgtatctttgtatatatgtttgcatattttaaattgttccccaaaggaacttgtgccaaatcaatcttttgccattctcatctttagggatctgctaagctagaaaaagccgagatcctgcagatgaccgtggatcacctgaaaatgctgcatacggcaggagggaaaggtacatctcctagacctagttggggctctgaatggttggcaaagagtgagcagcggctgaaggccaggattggtgcagtagctgcctgatttttctttgggggtggggagagaacggtgtgtggtgtgtgcagttccctgtcagtacattttcgaatgcacatagaatcttctccagtgaattcaccaccccagctctctgcggattgagctagtgcatcttttggaaaaatacctattatttgtgaggtcttcaaaagttgtgacagccctgattcagatcaggtagctttcacatttgtccattgctattttgagaaaaagcatttaaaaacaatatgtggtcttatttttggtatacgggattttaaaaaaaaggtgctgccacatgcctcttgaggaaagaaatgtattctggttaagtaaaggaaacctaacgggagaccaaggtctgtgtgtatgtctctccagcaggaaaatgctttactgaggtccaagtgcctaaaagctccgcgatgataacttacatctgtgtgtctaatgaatttcactgctctgtggtttctctgcccttgatgtatttttttgttgttgttgagggaaaacattaaaggaatgaacatagtttcatctgctggtagggtataattccaatttctgctctgcagcttctaattgggctttgaacttgcattagcaaacacattctgcttatgttgattaatgcaaagatttttgttgattccaaagactttcggaagaacccctgactgttgtgttttaagggatgcaggtatctgccaggaagggctgtctctgggacttaagaaatgagggaaacgggcaaagccctgagatttttcttttgttcttttgcttaggttactttgacgcgcacgcccttgctatggactatcggagtttgggatttcgggaatgcctggcagaagttgcgcgttatctgagcatcattgaaggactagatgcctctgacccgcttcgagttcgactggtttcgcatctcaacaactacgcttcccagcgggaagccgcgagcggcgcccacgcgggcctcggacacattccctgggggaccgtcttcggacatcacccgcacatcgcgcacccgctgttgctgccccagaacggccacgggaacgcgggcaccacggcctcacccacggaaccgcaccaccagggcaggctgggctcggcacatccggaggcgcctgctttgcgagcgccccctagcggcagcctcggaccggtgctccctgtggtcacctccgcctccaaactgtcgccgcctctgctctcctcagtggcctccctgtcggccttccccttctctttcggctccttccacttactgtctcccaatgcactgagcccttcagcacccacgcaggctgcaaaccttggcaagccctatagaccttgggggacggagatcggagctttttaaagaactgatgtagaatgagggaggggaaagtttaaaatcccagctgggctggactgttgccaacatcaccttaaagtcgtcagtaaaagtaaaaaggaaaaaggtacactttcagataattttttttttaaagactaaaggtttgttggtttacttttttcttttttaatgtttttttcatcatgtcatgtattagcagtttttaaaaactagttgttaaattttgttcaagacattaaattgaaatagtgagtataagccaacactttgtgataggtttgtactgtgcctaatttactttgtaaaccagaatgattccgtttttgcctcaaaatttggggaatcttaacatttagtatttttggtctgtttttctccttgtatagttatggtctgtttttagaattaattttccaaaccactatgcttaatgttaacatgattctgtttgttaatattttgacagattaaggtgttgtataaataatattcttttggggggaggggaactatattgaattttatatttctgagcaaagcgttgacaaatcagatgatcagctttatccaagaaagaagactagtaaattgtctgcctcctatagcagaaaggtgaatgtacaaactgttggtggccctgaatccatctgaccagctgctggtatctgccaggactggcagttctgatttagttaggagagagccgctgataggttaggtctcatttggagtgttggtggaaaggaaactgaaggtaattgaatagaatacgcctgcatttaccagccccagcaacacaaagaatttttaatcacacggatctcaaattcacaaatgttaacatggataagtgatcatggtgtgcgagtggtcaattgagtagtacagtggaacctgttaaatgcataacctaattttcctgggactgccatattttcttttaactggaaatttttatgtgagttttccttttggtgcatggaactgtggttgccaaggtatttaaaagggctttcctgcctccttctctttgatttatttaatttgatttgggctataaaatatcatttttcaggtttattcttttagcaggtgtagttaaacgacctccactgaactgggtttgacctctgttgtactgatgtgttgtgactaaataaaaaagaaagaacaaagtattc

SEQ ID NO: 722 - DNA, 423 bp, Homo sapiens
attttagcaaccgcgatttccaatgacattacagcattactgaacagcattgtacttcgactatctcttactgttacataggtttagatggctgctaatgtggtaagaagtgaagcctctcatttgctggctctgctgaaagagctgtggaactgtaaaacatgtagcatgttccacttgtctcatcagtgatcgctatatctggttagcgggaggcgtggcagttcatttccagattacatacttttccatggaaatattctggtttcttttcaagccctttcaaggtgaaaagtatctgaggatggtgcaggtggagtgtgagcttcctaggaagcaggatggagtatgactatgtaccaatagtgtatagaaaaattaattcaggaaaactcccatttctattctgttgatgcaattagg

SEQ ID NO: 723 - DNA, 423 bp, Homo sapiens; identical to SEQ ID NO: 722

SEQ ID NO: 724 - DNA, 206 bp, Homo sapiens
cctggccaacatggtgaaacctcgtctctactaaaaataccaaaaacaattagctgagcatggtggcgcgcgtctgtaatcccagcttctggggaggccgaggcaggagaattgcttcaacccgggaggcggaggttgcagtgagccgagatcgcgccactgcactccagcctgggcgacagagtgagacaccatctcaaaaaaaa

SEQ ID NO: 725 - DNA, 737 bp, Homo sapiens
aaattctgttttgtgcctataatcccacctgactgacaaaaaaaagagcaatcctttatgcctctgtcctcccccagttattctaggttctggtcccttacacctggccaagctgtcaggtattattatggcatcttgttcagctaattaagcagtacaactgagacaattgccaccccatttgtcatgtgtggtgccttccaagatagcccccagtgattctcacctcctgatattcacacccttgtgttgtgtcctcccatgtcataccaaggttggtctttgtgataaaattcagggaagtgatggtgtgtgacttgtgacactagatccgaaaagacacggtgatgtctgacttgttctcttggatgtctctccctgagtgaagccagctacttttcatgaggatactcaagcattcctatggagagatccacatggtgagaaactgaagcctcctaccaagagccagcaccaacttgccagctatgtgaatgagccatcttagaagtgggttctctagccctagtcaggccttcatatgactgcagccagggctgatattttgactacaacctcatgagagactgagccacaacaacctagctaagaagctcctgaattccctaccaacagaaactatgtgagataatgtttgttgttttaactaagttttcaagtggtaatttgttatacagaatatgtaactaataaagcatggctcctttaggtctaaa

SEQ ID NO: 726 - DNA, 1403 bp, Homo sapiens
gatatagcttagtataaaaataaaattcaacgttttggccaaaatgtttgtttttcactggattctgaatataataaattcaaagtaccctttttttagagtttctaataaagtagtatgtaaaaagaaactgcattttaagtcagacagtaaatgttttttttaatttacagcaaatgaagcagttttattagcatgttacaaatattgccaaaccaagacttctctaccatactttaacagctttccttcagaaaactctgaagttatatttgcaataataatgaaaccagcatttagtaccagcatatggttcatatgcaaataatactttccccaaaatctttctgggctaggctattttcttgctatgcttcctgcacccaaccagcagaattcttccagggtggaggaactaatcagcttgttctccaacagttctgaagccaacccacaaatctttgaggaaaaggggtcactttgtttactattctcttggagatggaagtgattctgctcttccatttgggtatattatttcaagggtatttcttcttaaaaatcttggaaagcctaagagagttaaaggcatcctggttttgtttcattttgctctgttttaaatccatatgcaaataaaactgcttctctcttacactgcttgaactagaaaatcagctttttaatgtaggttaccacttataagcacaaaagaaacatgtataagaaaccagatttaagtgttttaaataaaatgtaaacagtttttatttggtagagatgactcatggaaaaattgtgttggcttggtctgcatgtttaatgatgtgcttgtatatcgattagctgtgtcacttttaaataagaagtccacacaagcaagccaaatttttagatgacgaagtccataaataactagagaatttttgttatctgttgttaagttgaaatgtataatcatttatcactaaattgcacattgcctttatttatttgtgctctgtttttggtttacagtgtaataatacctcatttaaaaaataaaaaccactactgttacattttattaatttaaaaagctagaaaattcatgtagttactttttttacatatataatctgttaatgaattattgatttttgtatctgccacagtaaattaaagcattacacagtatttatcagtattttttaaacatcctgtccttttttaaaatctttgcttagtcagtcatatttttgtctgtatgattagaagtttttacgtccttccttttttgtacaaatctgtattgtattaatttctggatgcaatttttcaaatattaaaattatacagtcagtcaggcttcagtttattttttgaacacttgggcaattaattaaagccatatgtttaaaata

SEQ ID NO: 727 - DNA, 101 bp, Homo sapiens
cagagcttgcagtgagccgagatcgcgccactgcactccagcctgggcgatagagcgagactctgtctcaaaaaaaaaaaaaaaaaaaaaaaaaaaagagt

SEQ ID NO: 728 - DNA, 18733 bp, Homo sapiens
caggaactggcgctgaagaccctggggacagatggcctttttctcttttcctccttggacactgacggggatatgtacatcagccctgaggagttcaaacccattgctgagaagctaacaggtaccaggagagactggcggctggggaggagggcgccttggccaacggtgtcttcactgagcaggagcggccgtctggagtggagggaagctcgtgggatctcagaggccctggactcctcccagctctgacactttgtagctggtggcttgggcgagctgctccagcaacccctgagcctgtttttctcagacttgtgagcaataataccagctaacattctttggtctgcgaggtagctcacgcctgtaatcccaacactttgggagatggaaggatcgcttgagcccaggagttcaagaccagcctggtcaacatggcaaaaccccatccctacaaaaatacaaaaattagccgggtgtggtggtgcacacctgtagtcccagctacttgggaggctgaggtgggaggatcactagaggccatgaggcagaggttgcagtgagttgacatcacaccactgcactccagcctgggcgacagagtgagaccctgtctcaaaacaaacaaacaaagcaaaaccaaaaaaacaaaaaaaccattccttggccacctcctccgtgccaggtatttaagtatttcatgtgggttctctctttaaacctcacagtagccctgggagatggacactgtcatgatccccatgtttaatagtctgagagactaaggcacaggcaggctccccagtttcccaagctagaaaggtgcggagccagggctagaactggggccatctggcttcagggtcctgcaccagctcacaggtttcagtagagaaaagaaatgcacagtgacgaatatgcagtagatttccaatagacagcagctataactttttttttttttttgagacagggtcttgttctgtcacccagactggagtgcagtggtgcagtcacagctcactgcagcctcaacttccctggctcaattgatcctcctgcctcagcctcctgagtaagtgggaccacaggcatgtgctaccacgcccagctgatttttctatttttgtagagatgcagtctcactacgttgcctaggctggtctcaaattcctgggctcaaacgatcctcttaccttggcctcccaaagtgctggaattacaggtgtgaaccaccgcacccagccaggagctataactatcattactaaatctgaaactttgcttaggtgctttcagatttctattccattctttgttgttgttgttgttgagatggagtcttcctctgtcacctagactggagtgcagtgacataatctcagctcactgcagcttctgcctccctggttcaagcaattcccctgcctcagccttcccaggagctgggattacaggcacctaccaccatgccgggctgattttgtatttttagtagagacggggttttgccttgttagctaggctggtctcgaactcctgacctcaagagatctgcccgcctcagcctcccaaagtgctgggattacaggcgtgagccactgtgcccggcctcctattccattcttgctatcatttttgcctagtgcagtcagtgattatttatttatttatttggttaaagatgaggggctgaaacattctaatgaattataaaacgcttctctcgctgccccaccaccaccctaacctctgtgcccattttcttccaacttcttgtgacgtttcttgaacttaggatcttggacacctacttattacccagattgcctggtgtaagtcagtcattgatgggaaaggcaagagagacatgctggctgtttcgggtgcataagcttcaaagcgctgtcactagcctgctgtttttcaggggtgtattgtgtaggttggttccgtgctggcccggtgacctgtgatcactgctagaggaggaaggttggatgaaaaatgctaatgagctggagtggatgtgtatcaatgtctctcagtggcaggcagttctgtcatgaaagcagatgggcagataaacaggtcgtccccttgtggccttgcctgtacttcttgttttgcatacacttctgcgcatttgcacagctacctctttgtccttttttgtggccagagtgagagttctctcataatgacatgttagcaaagcttgaggtgcacttttaattttttgcacagaaatctttttctccatcagggtaaaagaattcccccattacctctaggctgtgaatgcaaaaatggaccaagtattgagaaatcaaagggcagggggaatcaaatccaagcaggaaatagagccaactagttctatttggtagagttatgagagtgtttaattttctgccttatcccttaaaatttttacaaattacctataatgggcaaatgttactcataagtcaggaaataaaactttttattaaaaagccaaagggctgtaaaatgctgagtagtagtattataattaataacattattaccaactccatttgacaaatgagaaagcaaaggctcagagaggtgaagtcccttccccagatcatacagctaggtggtgggggcatcatcattattattggtttttgttttttttgtttttttgtttttttttttgagatggagtcttgctctgtcacccaggctggagtgctcggctcactgcaacctctgcctcccaggttcaagcaattctcctgtctcagcctccagagtagctgggctgggattacaggggtgcaccaccatgcccagctaattttggcatttttagtagagacggggtttcatcatgttggccaagctggtctcaaactcctaacctcaggtgatccgcctgcttcggcttcccaaagtgctgggattacaggcatgagctgccttgggaatcattattattaatatttatctgtgatatcagtaaaataattgaataagcaaggcttactaataaccctgcatattcctgttgctcccttcttcttgggtttctagattgcgttttggaaagttttacctcattgacttacaaatacagaaataagtgattcttcagaatagggatttggatcaggagcagcagggagtgctcattaaaagggcagattccagactctcacccctgcagattctcattcagtaggtctgaggtgggttgtgagcatctgtagtttaaaggcatcctgggtgattttgaggacttctggttgagaactgctttaatgcatcattcagcctgctagccagtcagtcagcaaatgccaggcatcatctctgtaccactaccctgccctgagagggcagacagggcaagacccacccccgccctccgctggctacactttgttactggtgactattactcaccccttttgaaataggcgtcatttgtcccttagcctttcaaaatgaatccttctatactgggaaggttatagacttgccagatctctgagcaggaaaagatccaagaaatcaaatccagccacactgccagtccagcccctcctacagctggggcaatgccccccccgcccccccccccccgccgcaaaaaaaaaaaaagcaggggaaagtgggtctcctcactctcaaaccagtgctctccctatgacaccaaagagcctgtttctgtttcttgcttcattcattactccggttcccttgactgagttcctctcagtcccagaagacctagaaaagggtcgtggttggtcatgggtttcgagtaaacaggcctgggtttcaatcccgattcccccaccatctagctatgtgacctggggaagtgactttacctctctgaacactttctcatttgtcaaatggagttggtaatgttattatctgcctccctgggctatcctgaaactaaaatgcgatacactggttgttactttggtgactgttaacaccccagctacccccaccccctgcctggctccgttaatcaccagctagtgtggatgatgagggagaggtgagccctgtagcataagggcagtgcctctccgatgtctgtgtctcatagggtcaactcccgcggccagctgcgaggaggaggagttgccccctgaccctagcgaggagacgctcaccatagaagcccgattccagcctctgctcccggagaccatgaccaagagcaaagatggcttcctaggggtgagttggggaccacaggcagtggggtcatctgtgtgtatcccgaagatgagtttctgctccattcatccatctttcctctgccctctgtgtgcccactagagccaggccctggaggtccatgtgcggtgatgttgtccctgctgtccaggcatacagcctgctgggggagcaggagagagaagcattagcttctgccccagactggggaatctgggatagcttcctagaggaagtgacatctggtagactgcaggatgaggagggctcagcagggtgactgagcacaggttgggggggtctcggaggaagcagcagtgcagtagagaccctgttagtgcagccgccccacatactatgatgattatttcccacacactatgatgattacttcccacacatccatctcttccccacggggcatagcatgatgcctggctcctgataggtactctgttgaactctgatgatctagacctgaggtttggtccccagcagagggctgtggggtggggagggcacctgagaaggtggaggtaggaggtggacagatgctctccttgccagcccctccccaacccaaggccctttggacagggtcctgagcgcattgcaggatgaagctgcctcagcccctgcctgcccttttgcactctctcccactctctcctcccctctgtgggcttcctctgttccaaccacaccagacttccttccttccaaatccccaggctttcttccaactgggagccttctcacatgtggttccctctgccaggaacactgcctctctgtgcccagcccacacagcccgacccagccttttcatctcagccaatgccacttcagcacgaacagaggcctgaaggcaggagtgccaggctggtcactgaggccaggcagtgggtgtgtctgggcccagggggcatgcaggacccacacaggggcatcccaatcagtggggccaggagagaaggtgccagaccccaccaagggctttgttgcctgcctttggccttcattctatggtggctgaatatcgtgcagattttaaataagacagctttctcatcagacctgggctctccaggccagggacggggcatgtgtagaatggggagaagtgggaggcaagaagaccagttctggaggggagacggaggagatggagagtaagggcagcctggaggatgctggggaaggaagggcagggagcggctcctcatggacagtgggtgggcaggagttggatgactcaggcttctggctgtgaccaggggcatggtgggctgcttgcccagatggggactgtaggcggggagggagtaggggatagagaatgaggtcagtctgcacatgttgaagttgaggtccccaggggatgttggatgtctgctgcccagcagcagccccttggcagtgcccaactctagagcctggcagccacatggcaaaagaaacttgggaatgaccttgaggctggcacctgtggcggaattgccacctggcccagcccagggaagcagtgctggggagcccctttcttttttttttttttttttttgggacggagtctcgctctgtcgcccaggctggagtgcagtggcgcgatctctgctcactgcaagctccgcctcccgggttcaagctattctcctgcttcagcctcccgagtagctgggactacaggtgcccaccaccacacccggctaatttctttgtatttttagtagagacggggtttcaccatgttgaccaggatggtttcaatctcctgacctcgtgatccacctgcctcggcctcccgaattataggcgtacagggattatagggattacaggtgtgagccaccatgcccggccgggagcccctttcttaacctcatcgctgcaggttcagggagggacagaaattccaaggaggagctcacagggaagggcattgcccgttttgggtcctgtttacttgccgtctcccactataagctccaagaagacagggtgcacagtgtaccctgatagaaacttcctatacagtaggtgcataaaacattttgtggaatgaacaaatgaataaacgtgttcttctcagccaaggagacagtgcagcagataggcaggagtccaggaagtggtcaaaaccggtctgaccttccacaaaaggagatggggaacccatctccatggatttggcagtgatgggctggtctgagcagataagtccgcacagacaacaagaactggggtgaggcaggagcagcacccctagccctggcccccgagcagagccccagcaagcccagcacccatcgctggcaggtcccctgcagggggtggcaagcctacaagcaggacccaggaaggcgggctcggcctggcccggcacagccagctctgccttgagaaccgcctgttaaatctgtctctgtgggagctccctgcctgctttcctcctacctcccaccaagcctgagctcctgctgccagggaggtggcgacagaagagggaatctgctgttccccaaatgctggccgacgtgtagacagctctgtggtctctgagcgtcctctccgagccatcagcttgtcagacagaggcgaggcaggtcaccgatgaggactcgggcttagggaaggccttttgcccagggtggggcaggctgtacttaaggcagggcccttctgggggtggccttccttccccttccctgtggtctcatcctgctcttgaccctagagatttcacctcaaacatgattggccaccaccctcatcggacttagctccaaaccgaaaccctgagctggccagtgggacattagtccctgggaggagacttggagaggagactggggagggagagtagggctgctggagggccagggaagccaggcagggtggtggcacccaaggctggcccatgggcttatgcataggatggaggtgggactatgtgaggcacagagccccaccatccccattccaaccttgccctcgagcgagctgctctggcctgggctgcgcctgggtgggctgtgcctgggtgggctgtgcctgggtgggctgtgcctgggtgggctgtgcctgggtgggctgcagaggcactgcagcagggagaggagcctctctctggcgggatattgctaagcttgtggccatcataagggcaggaacctccctggggtccatctgctcccttggtgtgggctggctcggggcttgagggagacctccacccacatggtacaggagaccccggagtcaggttctcagattcctggagctttgctttcccccgccccaggtctcccgcctcgccctgtccggcctccgaaactggacagccgccgcctcaccaagtgcagtgtttgccacccgccacttccagcccttccttcccccgccaggccaggagctgggtgagccctggtggatcatccccagtgagctgagcatgttcactggctacctgtccaacaaccgcttctatccaccgccgcccaagggcaaggaggtgaggacagctggggtgcgacgtggggcccctccgcccgagcccaggagtggccacccctctgtctgcgcctggaccccagtgccaggcctgctccacctgctctcctgccttcctctggacctgccccctccccatggggcccctgggccgtcgggtctgggctgacccccaccccagcggatccaggcccagcgggacccagcaagccagtacgtgcctcccgccgcccccaggtcatcatccaccggctcctgagcatgttccaccctcggccctttgtgaagacccgctttgcccctcagggagctgtggcctgcctgactgccatcagcgacttctactacactgtgatgttccggtgagtgggccacactggctggcctggagcaccggggaggcatgacggtacagcgcccagaggggagggcccagcttgagccccccagctccacctctcctcccactgccgtcttgggcaagcagctttggctctctgagcctcagttttctcacctgtggatccgggtgctgatgacttcctcgtaaggcacgtgagggttcagaaagaaaagttgtggaacttgcttggcacggggctggtagccatggttgtgccatccacacagaagtgggaaggacacccagtcacacatgccctccagaagctgtgaaggctgggggagggggtccaggcagggcttccagaggaggggcatgtgacccgggcctcgaaggatgagcagcatttggagagcctcgctgctgcccactggcccatccacctccacccccacactcagcctcctctccctgatgattctggccaaggcttcccgggctcctggggagaaggtgggcagctctggtgcagcagatccccttccccacaggatccatgccgagttccagctcagtgagccgcccgacttccccttttggttctcccctgctcagttcaccggccacatcatcctctccaaagacgccacccacgtccgcgacttccggctcttcgtgcccaaccacaggtgggagcttgaccctggcccagccttggctccctcctacagcttgtcctgctccccagctccaggagcctaggggcctcttctgtctctgccccttcctttgctccccagagcccatctcatggggctgacgtggcaggaggcggcatgaggcaggcaagagaatgagctgatcacccaccagctcttcccaggcacccgtggcctggccctccacctctgtgcctgggacccagtgcagcagtccgcagacccttcctgaagctgggcctccccgccctcatactgctgacaggccccaggcagagctgtaaccgcagcctgtgcacgccaccaagaggaaggccagcagctaggcagggacccagctgtggggtccaggaaggcttcccagaagaaaaaggtcatctcagcagagatcagggctctgagggttttgctgggcagaggaacagcacatccaaaggccaagggcaggccctccactgctgcagagccccagaggggcttccgggacggtgctacaccagccacctgcttgcctcacctcctcagggctggccacctgtcagcagagtagaggaccccggaggccctggcttcaagtttgtccagattcctaactgatagcaagtggccaccgagtgggcctgagtgaccgctctacagggatgagacctggctgggagccaggaggtctgcagttaagtctctgctgtggaacccattggctgtgtggctgtgggcaaggccctggccctctgtaggcctgtttcctcatctgccggatgggagactgactcctggcctacttcacccacagggcaggcgtgagaggatggtcgggataacatgggaagagaaaattgcccctaggagtgggggtggcttccctccctccccagagtgggaagggcaggggcttcccggtcaaagggaaaaggaagaggagggcacaagccctccatctgctcacctagggctgggcacacctgcctccatcgcagggttgttgaggagggggcctggactgtatgggacaggaggagagaggcagtggccagctccaggaccagctgttcctgggctcatgtctgaggaccaggcaccagggactgctgacccccgggggttacctagctctgccctctgtgccccctgctgcggaggtggtggtttgccagtgctggggctccctcgtgcggcggatctgcagattgcactgctcggctcagatttcctgctgcccgccagaggcctgtgcagggaccacggtgctcgttttcattcctgccccaccctgtgacccgccttgaggcactggccatctctctgcttcaaagggtcctggagagtacacgggccatggctgtgcaggccctttgtgaattgcgaggggcagggctggcggatggtgaagtggctccagtgccttaggaaggggcagcctggtggggaagagggccagggctctgcagccagaatcccagtggctctgagagcaggtgttcaccttgagaaacctcagtgtcctcatctggaaagtggagacagttgcaggtattatgtgagataaagtgtgacacagataatgggctttgatgatggtgtcactctgccctggccatcccaggtctctgaatgtggacatggagtggctttacggggccagtgaaagcagcaacatggaggtggacatcggctacataccccaggtgagcgcacaggaggctcccatccaggtgggctcggctgcagggccccgccctccctctgcaatgagtggagcattttggagggtctctaggggagcccctgaggattcttgcccatctctgagccttccccctaccactgacctctggcccagatggagctggaggccacgggcccctctgtgccctccgtgatcctggatgaggatggcagcatgatcgacagccacctgccttcaggggagcccctgcagtttgtgtttgaggagatcaagtggcagcaggagctgagctgggaggaggctgcccggcgcctggaggtggccatgtaccccttcaagaaggtgaggctgggcaggggtgaaggccagggtcaggctgcatgggcagaggctgggagctgtggagcagcagctgggcacagacgctggtatgtgtgcagggcttgctactgaggctgtctcactgttgggcccagctgtgccagcggggcctccccgctgccattcagaacttggaggaagaggccaggtgcaatggctcatgcctataatccaaaactttgggaggctgaggcagagaatcacttgtggccaggagttcaagagcaatctgggcaacatagcgagaccccatatctacaaaagaatttttttaattacctgggggtggtggtagcacgcacctgtagtaccaaagctttggggaggctgaggcaggaggactgtttgagcccaggagttcaaggctgcaatgagctatgattgcgccactgcactccagcctgggcaacagagtgagactccatctcaaaataaaaaataaatgaaaataataataataaatagaacttggaggagacatccatcccctggcttagtagcacccacttcacacacatacaaacacacacactaacatatatatacacacacacatacacacatatacaaacatacacaaacatatatacacatacaaatgtacatatacacagacatacacacaaatatatatgcctacacacaaacacacacacacacacacacacacacacacacacacacacacttgcacacactacagactcagcccgagtgggaccctggccgctttgatgatggcttcgctctgtctcggtgtggccccaggtctcctacttgccgttcactgaggccttcgaccgagccaaggctgagaacaagctggtgcactcaatcctgctgtggggggccctggatgaccagtcctgctgaggtgaggggcccggctggatctaaggggagcagtgggaaagtccacaccttgtggggtaccagaggctctgagaccaatgggactcttctgttgagttgtgagggcctcagggactgcccatggtaggggcgtggggtgagggcttgggggtttctgtgctgagcccagagggagctaccagatgctgaagaaagggccctggcagactgggttcaaactcagccattgtcagcttggtaaccttgaccaagtgtcttcccctctgtgagcctcagttttctcaatagtaagaggggataacacacttacctctcatagctgtggacatggaggtgaaagtgccgcatacactgtaaagtgttatatacgtgtaagagaaaaaatcgggccagaggctgggcttgtgttaattgattcaggaaattcaccagaggccccctagatgcaacgtcctttgggtgtctggcagtgggcacaaagatgaacaaaacagtgccccaccctcaccccgtcaaccgtcagtgcagcagtgggctgggtgcttgcgtcccacagtgaggaaggcagaaggggtccctgccctcaaagggggagacacagtgcaaaggcagacaccaaatgagtcagtacaagcacggtgagtgttctacaggggacagtccagagtggcaccagagtgtataactgggggtcagggaaggctttgtgaagacagtgatatttacgctgagactttgaaggatgagtaggagtttctcaagtgaccggatggagtgttccaggtagaggaacagcctgtgtgaaggccctgggacacagagcgttcattggatttaagaagctgtcactgtctgcaagtccccagggccaggtagaacccctaaccctaatctcagcccaggatgctggtatattattgatgttaattccaactatcatttattcagcacctactctacctcaggctctttgaatctgttatttcacttgggtgcagagactgtcctgcagcccgtgaggtctccccaaagcaagattgcaccccagcaagatgtgggggcgcctcacccttctgtcttcctgaacaggttcagggcggactctccgggagactgtcctggaaagttcgcccatcctcaccctgctcaacgagagcttcatcagcacctggtccctggtgaaggagctggaggaactgcaggtgagcgggcaggtggcaggaacaggagcgtccggaacagtggtgggggccgcggcatcaggagtgtgcaactgtccccacagaacaaccaggagaactcgtcccaccagaagctggctggcctgcacctggagaagtacagcttccccgtggagatgatgatctgcctgcccaatggcaccgtggtaggcacccccactcagaccccacagggcccaggcacctcggggccccgggagcaaccagcaggaggcgtggatgtgcagacttcatcaggcttcgggactgtccctgccacttcctggctgcaaagcctcaagctggtctcttacccagtctaagcctccgttgtccccgtgtagaaacaggaatcgtgatgcaggtgttggtcatcgggggctgcgcagcagtgagcatagtcctgaggcagagtcagcgcctccctagaaacacagcctggaagggaaggctcaccttggaccatggcggccagtcctgggatggaaggggagggaggagccaggccttgtgacagagaccaggagagggccctgagccaagattcaagaccccacctctccctaagggccccttacctagcactcagcaagtcttctcactggggcctcacagcagctttgggagatggatggtcatgaatacccattttataaacaaggaggcccagaaagttgagagactggacaaatgttgcagtcaattaagtgcagctggctttgaaccgaggcctgcccttgagcctcagatctccagctcttctgatcaaagcgacccctcatcctttaagtcccaaggcatggttagtgtgggacccagggctgtaggagggggccggcttcctcaggatcttaggatgggagcagttcaggagcaggggctgtcacgggagaggtgtccagtgagggtttggtgtaaaggaaagggcaccaggcggaaggcatctgctgtcccaggcgcaagggtgatgagatggtgtcggggaactggatgaggctgggcctggttgggagaaccaggcctcccattcatatgaatgttgattgaatgctgattcattcatttgttcatctactgggcacctactgtgtgccaggcacaaagataaagacacagccccgtgctgaaggagctcagtctctggagcgagaggccaaaggagaggcccattgaatgtgaggctgcagtgagagaagggagcacggagttcaggatgggagtccggggtcacaggaacagaggagaggggtcatttcggggggcgggggcagagggctagtagaagaggtgatgttggaaggtgttgggttttcacttggtaggcaaggcagggaggagccccctcgtcagacacagggtgatgagatggtgtcgggtgctggcgagggcttacggcagcactgcctgcccaccatccacctcagacaaggacagtcaaggcctgatagcatccctgcttctccccatagaagagagggcacagggagcctgggggcccccctccgccccacttgcctcacccggcccttctcccaggtccatcacatcaatgccaactacttcttggacatcacctccgtgaagcccgaggaaatcgagagcaatctcttcagcttctcatccacctttgaagacccgtccacggccacctacatgcagttcctgaaggagggactccggcgtggcctgcccctcctccagccctagagtgcctggacgggatctgatgcacaggcccccacgcctcagagccagagtggtcctcagcccatttcagactgcagatgccgcccactcccaccccactcctaggctgccttggagggtacaagatccactgagggtggccaccacagccttggctccatggtggcgggtagacaagggatgcctgggctgactgggcagaggaacctctagctctgactgtcactcggctctccctacccatttggctctggaagctgcttggcccccccagatcagggcctgggtgaactccctggacctttcctagccagccgcacagtctaggcccttgtggggtgaagaatggagggaggagcaggctaggaagacggggccaccaccctctccttgctttcagcccttcccacaggaaacatcaagaagccccagccaggaggggccaggctgccaaggcggctcccctgtttatctagagccttcgttcctggccataccccggactgccctcctgtgcctgatgtccccagctggggtcagtctcaacaggagccagtcttctggagcctctgggcagaaccctccatcagagtggaaatcagacgggaccccctgcagcttccctgaccacgccactgaccagctatctggggaagtttactgtgaaggggtttctgcctttagcaatggggttcactaagggggttcccgaggcccagggccaaggcactcccaccgcctaccttagcacagggtctctgcaggactgcgggagccagcgctcctgccgcccctcttgcccctcagaccttgcatccacagaagcacaacccagccaaacaccacagccttctccagagccggcactgtcccggcaaccaggggtgccccaggctagctcttctacctctggggcaccacggactccccttggccactcttgggactttggtccacgtcctgagccactgaccacggccagtctctctttttatatgtgcagaaaagtgtttttacacaaactttctcatggtttgtaggtatttttttataaccccagtgctgaggagaaaggaggggcagtggcttccccggcagcagccccatgatggctgaatccgaaatcctcgatgggtccagcttgatgtctttgcagctgcacctatgggaagaagtagtcctctcttccttctcctcttcagctttttaaaaacagtcctcagaggatccatgatccccagcactgtcccatcctccacaaaggcccacaggcatgcctgtactctctttcattaaggtcttgaagtcaggctgccccctccccagcccccagttctctccccaccccctcaccccacccggggctcactcagcctggcagaggaagaaggaaggcagacatctccgcagccactcctgggccttttatgtgccgagttaccccacttgccttgggcgtgtccactgagccttccccagccagtcttgttctcaattttgttttgttttgttttgagacggagtcttgctctgtcacccaggctggagtgctatggctcgatcttggctcactgcaacctccacctcccaggttcaagcaattctcttgcctcagcctcccgagtagctgggattacaggtgcatgccaccatggctggctaatttttgtatttttagtagagatggggtttcaccatattggtcaggctgatctggaacttctgacctcaggtgatccacctgcctcagcctcccaaagtgctgggattacaggcgtgagcaatcgtgcccagccttgttcttaattttgtatcatccagtcatcgctaatattacacgcaccttctcacttaatcctcacgacaagcctgtgaggcagatgctcattgttcccatcttgatgaaacttgagtctcagggaagtgaagtgacttgcccagggtcactcaggtagagttgagattcaaacccacatgtggctccaaagtctgcatctggatttgggggtgttttttggcatggcaccctcacctctctccctgcctgttttccccaaagtggaaaggaaggcctttcaaaccagagtgtctcactcccctctgacctccagaccagatggggcatgagccagccagctcagccaggctccctgtgtcctgggaggaagtgtccccatcccccatgccccttatggggagggagggcgtctgatgctctctctctgcctccccccccatcctgtcaggcacaggtgacgggggcagcccatgcgagcccttctcctgctgctctgggagggccagttccacattgagccagcctggtcccatggaaaatgatggcctgggctttctgaggccttatctgatgcctctgcagttcatgtcccccaccaggcctcgaggctcagggtgggagagggccccgggctgccctgtcactcctctaacacttccctcccctgtccccaacatgccctgtaataaaattagagaagactaactagagtggttctaagtgcttttcctttgagtggcatgttgctcagctccgtccttccatggggtggctccctcttggggcagagttgagctggaatgctttcaggtactatcttacctatcgaaggcttgagtgacttgcccaaaataagttttacgatagaacaagtggtaggacttactgttttgagaatctggtgctctctgttgagagagatctgggagttaaaatcattgtcttaaaagcagagcctgagacaggcatgaagtgtttttttgtttgtttgttttgtttgtttggtggggctgggggggagtgtacttccagaaaaaccagtaaaagaaggaaggaagcagaagagggaaaggaaaaatgctgagcaggaacagtctcagcccagccttggcctgacccacagtggaagagctgtggggcataaaccacactgcagagctgaactggccttttggaccttttatcagtcattggcttgggaggtgaaggaaattcccaggtagggagctccgttcttcctgcaaggggatctgagtgggacaccaaatcagcatctacacccaggacagacagccagcgtggacttgcatgatccgccatcgcacaggagggaaaggtaatgattaaaacacaatgtgccatcctgggaagagggccagacctggaagtcaatcttcagcgtttgagatatggtggagatcagggtggacgacctctgaggtctctagccaggaccagtcacataatttgcacagccccgtgcaaaatgaaaacacaagaacccctattagaaaatcatttcaagacggcaacagcaaagtactaaaccaagtacaggattctgagcatgcggcccgttgtgactgcatgggctgttcacccatgaaaccagctctgtctctggcagaggggactgcaggctttggaaccaaggaactccagcctgggagccaggcacagcccgaggctgtgctgaaggcagagaaggaaatgtgacccaggaactgcatgccacagaccaagacagtgagggctggagcacaaagagggagtgggttagtgagcctggaaggaatgtggctcttcccacagagcctctggagtcttgtacatcaagtacccatctaataagcaaactcattgaatataccgtgtgtgtgtgtgtgtgtgtgtgtgtgtgtgtgtgtgtgtgtgagagagagagagagaggctaaaatagaagaaagctgcaaagtgctggagggcaggagtcaagaggagaaagaggcccattctgcgcattcttgctggagagaggctttgcaaagggacctgcctgggaaccaagaactgggaagggggccagggtgaggattctgaagtttgccctaggggtaggagcatattttaggggtcgagcgacacacccctgggcttccagaagtcggatggggctaaacgtggagagcaacaagcagggagacgcgacgaataccaggccgagggatctccaaacgcagccaactcctcccggggacacagaccccgcgggggca

SEQ ID NO: 729 - DNA, 12988 bp, Homo sapiens
gggcggttgaggctgggcggcccaaggtggaaggaggggccgtgaggtgagagagtccgggagcccgagcttgaggtgagaaaggttctagggaggcgcggaggcgggagcgcgaccttccagcccgttagtagactgggtctacgtgccgggcgctgtgcggagcccgcagctcctgttcccgcgcgagttctcgcgggagccgcagctgtccgtctcacttggcccgggggaaactgagtccccgaagggtagttgctcgtcggagttccccagcaaacagtgaccaagccagacctcaggcttctagtttcggcttcgctgcttgacgggccgggctgccccgccgcgcattctgagacctggccgcggctcggaggcttccgcgcactcgggtccgggtcctgtgggtccaagggccgctgggcaggcggcgagcacttggccgaccttggcccaggtcgggtcgtctgccgcgggggaggggcgactcgccctggcgggtccccgcggggagagggtccgcgcgggtctccggccactgctgcgcgcggcaaagtttcactgagcgcggcggcctccgtgggggcccccgggaccaggggtgctgagcagggccctgcgctggaggagctcccgttctcctgaggggacgcctgtcagcagacagcaactgcagcctccggagggctgcggggcgcagaggtgacaagacccaccggtgctgccggcgaaccgggggaagatcttctagccagtgacacttgggggcgggggtgacagctgagttggtgttccccttcattcgtttagttcagcgcgttgaagcgctcactgtgtcctaggcagacaccgtgctgtgcgcggggatcacagttatctagttcctctcgcgaggactccgagggacaggcagggtgctgcggagcgcacaggaaaggacctgaccctgtcgcagggaaggaaggtgatgcttaagctgagctctgaggaatgatgaagaatgagctcggcgaagggggtgctggtgtttgatgcagggctcagaggtgggcccagtgttgggggttgagggccagtgtggctggagggcaagggggagagcaggagggctggctgcgaagcgtgcaggccttggtgctcagtgaatgtggtctagagacggcagagaaagatgggtttgggactgattgtggattttatcctgtgttggctctagtaagccagttttaaacggatgagcgatgtgattaactgtgtttgggaaggattcctctggctgtgtgtgagggttaggcccggctgggtctttggaggtaaggtcggagaggaagtggcagtaagcaccgttagtgcaatttgtggccgacacggacattcagcacagagcctggcacacagagggactctgataataaaggcttgaactgagccgagaagatggagcccacgcaggaggtggcaggacctggaccaggctttgggtgctttgcactggcatgaccactgagtgaccttagacaagtgccttcccctgtccaacttcctttccccatgtgtatcgtgaagtgaatgacacctcgtctcccaagggtagaagaggggaccctccacaggaggtctccagaaagagctgctttgtcagtctagtctatctcccattcagagcctgtccagggctccccagtgacccggacctcatgacttgccccctacttttgtagctttatcatgctctgctcctctttccatgtccttcaccttcttgtgctggacctgtgctcttgctgttttgtcttcatttcctactccctcgcaacttactacagggcactagggccagagctctgacctcatctggccacctgcctaatgctactcagcctttgctagaagtatgtattcatgtcctatcactctgctggacagcgagttccttgagagcatgactgtgtcttactccttccatagcccctacggtgcccagcacaaggcctggcacaagtgggtactgttggtgtttgatgaacaagtgaatgaacgagcacactgattgcatctgctcaccatgcaaggactgctgtgaagagcagtcagatgtcacctcacccatctgtgtcatgttttaacagttcattaagcactcaaccccatttcactcattgacccttaaggtagcctccagtggcagcttttcctgtctcctttttccagatggaaaaaccaacattcagaaaagttaaataacttgcctgtagctacaaagccagaaggtggctgagccaggataaacttttttggctctttttctctgtagctcatgagactgagattggcatgagctggtgttcgttctcctattttctctgatctctccctttgcaagggcccagcagtgcttttacatctcatcttcaagaatgaatcctgggcttggatagtacttataatttggctagatgagctttgtagctaccaaggattctatttgcatctttagaagttttgcctcaagaaacctgagagcccaggaaggctcttgggttggccaagctcactaggcaaatcttttttttttttttttttttttgagacggagtctcgctctgtcacccaggttggagtgcagtggcgtgatctcggctcactgcaagctctgcctcctgggttcacgccattctcctgcctcagcctcccaagtagctggtactacaggtgcccgccaccacacctggctaattttttgtatttttagtagagacagggcttcactgtgttagccaggatggtctcgctctcctgacctcgtgatccgcccacctcggcctcccaaagtgctgggattacagatgtgagccactgcgcctggccgcagatctttaacagaacctttaagagtctggacttagagctaagtgttgggtgagggcagcctcttgggctggttttctcccctgtgaagtcatggctctgcagggcctggttttttggggcttgtgtggtgaccattaaatccccactgtggggggttgtttcacaagagggaaatctggtgctcctccagatggcctgatatgaaggagtcacgcctcccgcctcccggagctgcccagtggctgccttgtccttcaagtgcaggagctggttcaaatgtcaggaatggaagccactgtggtaaggggcattcccagggcaggggtatggtggggaaggttgggtgctgggcctgctgaagtactgtaaaaggttctgagactctccagttgagcactcctttctccagaggcctggaattggagcaaggccaccgtttcactccctccccctaagaagaaccaactatgatcctggggcacttcaggagtcagtgtatgtctgcctttctgtacagaggacgggaaggaaagcctggataatctctacactcagctacttcctctccccttccctgaccctcccaacattgactgccttagcagcagcaggtattcccttgggtggctggccagggtgtaggctggcaactggggaacctgccctcactataattgagagttgacttgcccctagagagtgccctgtccctaggtttgtggaattcagtctccacaaacctagagaggagaggacaaggacagtagttggattcattctctggggttgtagctgtctccgtctctttgctccagaccatcccaatctggcaaaacaagccacatggggctgctcgaagtgtagtaagaagaattgggaccaacctacccttgaagccgtgtgcccgggcgtcctttgaggtgagtatgttggaagggcaggagagtagaggctcagacagtgctgcttctgtgccccaaaccccttggtactgcccaagtaggttgtttcctggtcacttttcattctgttatgaaatatttgttaaatgcttataagatatcctggtcactgtgtcctcctgagtgcatacaaacctgtgaccacaaggaacctgacaggtcccccacatgggacactgactattgtgatttttgagttgaactctgcttttcttcaccagccctaagaattgaccatgtagccagtatttttattttattattttttgagatgaggtctccctatgttgcccaggctaggtcttaaactcctgggctcaagcagtcctcctgcctcagcctcctatgtagctgggattacaggcacaagccaccatgcccagctccactatttttagtgtttctctgaggccataattcctcagccttctctttttggccaatctgggcatcctttactggggtgctttggtcttacctctgtgtctagggatcctttagcacccactcagcagcagagattcctacctggcccaggtctcttgagaccccttctgtggtagaaagctaagtagcatttattagtcccagctgcctccctctaggaactaaatggttaagcaccagccccaaactatatggttcagatgtgtgcatttggagagctgggatacaaaagaaatacttgtgctttctacccacacagaggagatagaaatatgtgcatgaaaggatgtgggcccaggtagaaacagaaatgaaggagccaaatctgtataaaagatgctaagaagcagagtctgtaggaactggatctggaattagaagaggtgtcagggttggtattagggtcaggaatggagttggaagtgtcgcaggggtagggggcaggaaaagctgtcccagtattcagattgccagctatccagaattgtctaaagatcctgggcaggaactggtcctaacttgcctcagaagcatcagaaaaaaaaaagggagacagctagggagtgtggctcactgcatagaggccgtccccacacttggctataccctcttcagttctttggccagatgctgggcagagacaatcaagggcacaggctctcacagagcaggaatgtatgtgagcagtattggtaatactagataacatttactgagcacatactatgtgtcaggcactgtgctgtactttatatttgtttactcatttaattgccaagagcaaaggagcattcagggctaatcaggaaaacaaatggaggcttcccccaaatgccctattttagcactagttcctgggtcactggaagttcttctctgtgtgaccttggagtatcacttaactcctgtgagtcccaggtttcctatctaaatgcaggagcgatcaatcctggatccatctaccataccaaataatttgtagcagaaacagttgaatcttacttgtgtgtaaatatgcatttattattattattaaattaccttaaatattatttaagggactcttaccaatttattttgaaaatttaagcatatgaaaatattaaaattatgaaaagtaaaaggaaaataaattacctataattacatagtaataatacaataactattaatgtcttagtgtagtcctctttttctagatggatgttttttactttgttgtaatcacagtcaacatgactgaatcctaatttttcactttactcaacatctctaggttgaggagctattttaagaaatcctattatggttccttttgtataatcatttatttttatttaaatctaaatatattcaaattttcaggtttgtttaaaacagcattgctgtaacaatgtagatctcaattagctatacaggattataaaaagctagtcaggaaaaatttcctattgctgtaacaggttgtggatgaccttgtacttgtattttcaccagagggcacagtggttttagacagttgccatctctactaaaaggtgactcaggccttttccactgaagacacagaactgtttgtaatcccatagactctcatgtgtcttgcctgtttttgtttttgaatgtggctctgttgtccacgctagagtacagtggtgcaatctcagctcactgcaacctctgcctcccaggttcaagccatcttcccacctcagtctcctgaatagctgggactacaggcgtataccaccatacccagataatttttgtattttttggtagaggcagggttttgccatgttgcccaggctgatctcaaactcttggtctcaagcattctgcctgcctcggcctcccaaatgctgggattacaggtgtgagccaccatgcctgactgtcatctggcctctgttcaatgttttcgaccaggaaccttcttctgccccctctaggaagccttcctgacacccagtgccggattaggtacccctcctgtgtattctgcagtttctgattggctcatcatggcatctgtaaatgttgatgacttttgcttctccatagaccctgcccaacatctctgacctgtgtttgagagatgtgcccccagtccctaccctggctgacatcgcctggattgctgcggatgaagaggagacatatgcccgggtcaggtagttgaggcagtagctggtctgctaaggaatggagaacttcccagaagaggtggcaggcagcaaggagagaggaatgagaactgtgggctcagagaggagcagaaccttactatactactctcacagaagtgggggaaggaaccttaggagcacagtggcctgctgtctctaactgatctacttggttttccctggtccaggagtgatacgcgccccctgaggcacacctggaaacccagccctctgattgtcatgcagcgcaatgcctctgttcccaacctgcgtgggtccgaggagaggcttctggccctgaagaagccagctctgccagccctaagccgcactactgagctgcaggacgagctgagccacttgcgcagccagattgcaaagatagtggcagctgatgcaggtaggagcccctgtgccagggccagaacgtaacaggctgttcctttcccctggctcttgggcaggataggggtaaagaaagtggtaatccttggtttgcaggtacttaggttccgggccctggggttgtcctgaagcctggctagccagtagtgcctcttagatggtttctaccagccattttgggctgaatggtttggttaagaacaaaatattaacctgtgaccccaggcagagtccctcccttagcccccaaactgataccctcttctaagtgtctttaagatcacatcttacataagcccacagtagctttttttttttctcctctgagtgagtcttgctctgtcgcccaggctggaagtgcagtggcacgatcttagttcactgcactctgcctcccaggtgcaagcgattctcctgcctcagcctcctgagtagctgggactacaggggtgtgccaccaggcctggctaatttttatatttttagtagagacagagttccaccatgttggccaggctggtcttgtattcctgacctcagatgacccacccacctcagcctctcaaagtgctgggattataggtgtgagccaccgagcccagccagttttcctttttttggagacagggtcctggttcttgctctgttgcccaggctggagtgcagtggcgcaatcttggctcactgcaacctctgcctcccaggctcaagcgattctcgtgcctcagcctcctgagtagctggaattacgggtgtgcaccaccacacctggctaatttttttatttttagtagagacggggttttgccacattaatcaggctggtctcaaactcctggcctcaagcaatccacccagctcggccttccaaagtgctaagattataggcatgagccactgtgcccgcggttgaaacaagagtctcattctgtcacccaggttggagtgcggtggcacgatcttggctcactgcaacctccacctcctgggttcaagcagttctcgtgcctctgcctcccgagtagctgggattataggcgcatgccaccatgcccagctaattttttgtatttttagtagagatagggtttcgccattgcccaggctggtctcaaactcctgagctcaagcaatccacttgcctcagcctcccaaaatgctaggattacaaccatgagccaccgcgccctgctttccttttcaatacaagaagtaaacattccccccaccaccactgagacttaccctttttaagcacctatcttcccttgccttgttgtttctaccaggaatcacaagtggctttaccacttcagttcttatactgctagtgacattgtccccatgccccacccttcaaagtggggagtttcatgacattatgttatgttttcttatctcaaattggtggacttttttggtggaaggagaatttcataaagttggagatcttggccttaaaatacagtggtcgggcactgtggcttacgcctgtaatcccaacactttggaaggctgaggtgggtggatcacctgaggtcaggagttcgagaccagcctggccaacatggtgaaaccctgtctctataaaaaatacaaaaattagctgggcatcgcagcatgtgccttgaacctggaaggtggaggtggaggcagaggtggaggttgcaatgagctgaagttgcaccactgcactccagcatgggcgacagagtgagactccgtctcaaaaaaagaaaaaaaaaaaacagtggtctattatgcaaacaagccctgtaacccacccctccagctttctgtctacagttaaggcagaaccactggaaatggatgggaagcctgccttaaccagaggcatggacagccaacaggtggatcgctcccaagatgctcagggcttatcttcatattcctcccatcctcattttttcactctgcattgactcagagtcatagctctgaaatttatcatttggtaggacacatgaaaatcatggtgttctttgaaatcttcatgtatttaatttcttcacatggaagttttatgaagaattgtactgaaactttgttatttcttggctacttttttgtcatccaagagacaagcagaagtaacatcttttttagaaacatagtttttagtgtatttagtgtttttaaagtatttttagaaatgtaaaaactgaggaaattctctccactgaaatttggggaggttgggaggtctgttaccattctggttttgctcagaacatgtcttctagttcacagatagcaagatttcaaaggagcatagtcaaaagcactagtctagttagagaaaaggacaaattcaggccttagctcttatctctgctgctttggcctatgacagggctgtcactccacagcctattgtggaatgggagcttttaaatgccaaggccattatggggctgggttttcctgccttcctggaacactggaaaagcccagtgcttctacagctttctgagcccccgagtgagaagcatagtggaatgaccctccactggctacagataccatcctggctctcccagattgtcatggtgtcagcccaggaaatgaatgttcagtaggcagggctgtggggagaagatattgctactgtgttctagccccaatgtccacccatgcctattgttttctctttcagcttcggcttcattaacgccagatttcttatctccaggaagttcaaatgtctcttctcccttaccttgttttggatcctcattccactctacaacttcctttgtcattagtgacatcaccgaggagacagaggtggaggtccctgagcttccatcagtccccctgctttgttctgccagccctgaatgttgcaaaccagaacacaaagctgcctgcagttcgtctgaagaggatgactgcgtctctttgtccaaggccagcagctttgcagacatgatgggtatcctgaaggactttcaccgaatgaaacagagtcaagatctgtaagtatctgatgaggagctctggtatctatttactcagagttgcccatggccaattatgtaatgcaacatacttacatagtaagttcttagtagtaccatatgttatgtcattcataaagcttgctgactacctgcttgccagtgcctggggccccagtttgaggaaagagcaacactacatttattgggtttggtcaccccaaccaaatatgaggctagtagggattttacaagaaggctcatctaatccaacttctgtcctcaggtggctttaccacttcagtcctcatactgctagtgacagtgtcttcatggcccacccttcaaagtgaggggttgcatgacattatgttttgttatgttttcttatctcaaattggtagacttttttggtgggaggagaatttcataaagttggagatttctgctttaaaatacagtggtccattgtgcaaacaaaccctgcacattcagtgatttgagaataaggcttttgagactcaccagtagttccgaaacctagctgcccatcagaattgctcagatttgttaaaaatacacctttaacttactaaagtagaaccccaaggagtggagctctaggtttttccgatggagtatgagggtctttggggaatacctaccttgaaaaacttcatctggcaaagaagcctcagggagtcaccccattgcatagtgtttctccagttgtgggttgcggtttcaacagctgcacaggactcaccagaggagcttggtttgaatgcaggttcctgggcatttgagagccagaccttgatggccagcacccagcttgtgcagctctgtttgttaatgcagatgaaaaactgttttggggacagggaagcgaggtcctctcctgagttgataaagttcttgttaaagggaaagttacttgccctggatccctttttgtctcctgggatccatttccctctgaaaagtagaccaggctaagtgactccctcattgcttcctggcagttgacccatttagggaagtcactcttaaccttccttcactggccctagtcaggttggtcatactcacccatatctctttggtcttccacattcccaaattcagttgctgctgtttttggtcttctctgagctgtcttcttctgaacaaaatgttttataggttgactctcaaactttctcttacttgccttttggaccaaattagattcaagacccttattgctagccccctcctcccacttgtgtcctcagatcagaaggagctgggtcagtgaataagaatgggaaagtaccccagtcagcaaaggttcagatatgtcaccaaccaaacgcagtccctcttgtttttgctttgaaggttgaatagtcagtcttggctcttatatttagcttaatcaccagtaaaacaccttcatgatgaatgtatataagttcactaggatttcaagcaactattttccaggtatctaggaccctcttatatgatgtatcagataacttgggcctacttcagtctggagttggttttgttcccatgagtttcttatgtgaatgttttgctctaattctggctctcataaaaaatcatctcccctgaaggggagacccggtggtaggaaatcccaagcacaccttttctccagaactatcaagggtcagaatagccaagagtcatcagtcacttcccctgctgaccctctggggaaatgctactaagaaaacagggccagaaggcagaagcttagccaccagaggccaactctaacagactgatggtcctttactttgcccatactttatagctatttcaggaaatagtaaagcattctagttaatagatgagatctggaaccagctagtttggttctgaactctggattcaccgcttacttgctgagtgactagtgaccttgggcaacttgtataacctttctgtgcttcaatttccttatctgtgaaagggaattgtaatggcacctacctcgtaagattgttgtgaggattcaacgagataatgtattcaaaagatatacagcactacacaggaaagagtaagtactcaagctattattgtgtctctaggaaccggagtttattgaaggaggaagaccctgctgtgcttatctctgaggtcctaaggaggaagtttgctctaaaggaagaagatatcagtagaaaaggaaattgacaaccctcagctctgcaaactcagtctcatgctcctggaataccttcaatagctgccttcctcaccgcagatgtttctgcctcttaaggatagatcttctgcaacagtcttgctgacaagctagagcttggactgaaagagaagagctggattatatatttcccagacttcaaaccctagcagaagctaaggcttgtgatttgacctgagacatttgtttcaggtaatcgtgtagaatgaagtatcttagtttaaagggtaagagagaagttgtttctggtttttccttgcccctgtgtgaaaataggtcctaaatgactgacttcactgcattagaccctatagctggtctcacaagacactttgtgcccagctgtcactcactcagcagcttccttgcagcagagcagggctgaggggaaggggctatgaatgtttgtatacatgttcacagggcacggaaaatcttatgctgctccgtcataaacctacaccaatgcccagcaatcaccctcctcacttccttgtctagatgtagaggtcaggctgctgaaccagccaacacatgggctactgctgggaagcctgggctgttttttttcttaaacacattttatattactgaacaaccaaatctaccctccacggccctgaggccttatcagttccactgattaaaaactttctcttccacggactttaagcccggtaggaaagagagaggaggagggggaaagagcaaaccatctttcttccaggcccttgactgctcctttgggctgggccaaggtttgtatgtaccacaccatgcatgactcagatgccctcaggtccctttctctatggtatgtatactgcttgtgtttgggttgaagcactacctgacattaaaggaaggacttggagagagaatgca

SEQ ID NO: 730 - DNA, 1419 bp, Homo sapiens
gaacatttcaagtagcctccctctatgttcctttcctttttaaatatattgataatcctactgcagggaatttgggagccatacttggtcttcgcatgcaacgtaattagatataactatactatgtgaatatgactaaagaaatgaaaatgaaaacagtatcttgtgctctgtaacgattgttattaaatatatcatagaaatgagaagagtaggctcaggagctgaactgcctagttcaaaaggccaaatttactactttttgttccgtgaatttgttgtgctcctgtttccttagttgtaaaacagagataacaataggacgtgcccataagcttttcatgaggattaaatgagttaatgtgtttggtggggaccaggtggacatggtactggtagggccctatttgacattggctttaagtatcactggctttaagtgcatcagtagatatatgatgacaataattgtattatcatggtgatatggatttcttataaatacttgtattatgttagtcacttctagaaaagaatacatctatacagtagaatataattcaaaaaataatgtcatatttttgtaaagaaattttttgtaaaacttttcagtcttcaaagagtttcatagactttattccatttatattgagagcctactttgtgttaagcattttgctgaacattgtcctcactcttatgttacttaccatctattgggaagagaaagaagtaaacaaataattacatgtagagtagtagtgtcaatggtagaggcatgaacacaacacagatttaacactagagaaagagtgatcacaaaagaaatgatgtttcagttgagttttaaatggcagctggagttcatctgaatgattaggtgtctaggacaggtttaaaggttagggagtaaggaagataatattcaaaataaaaagaacctgaggatattcacagaggacatttgcagaggcctgaaatagcattggtacattcctagaaccataaatagtttgatggtaatgtaaattacagtatgttttgaaaaatcatggaagatttataccacgataagaaacttcaactttattctaaagttgatgagcatttgacagattttaagcaagaaacaaatattaaatttatattttagaaagaattctagatacataaaaagcacttattataatccagtatccattcatgataactctcagctaactggaaataaaagggaacttccttggtctaaggaagaacatctacataaattctacaaccagccacatacttaatggtgaaataatgaatgtttttctcctaagatcaggaaaaagaaaaagatgtctcctcttacttctattcaggatggtactggtagttcaggccagtacagctatgcaagaaaaagaaataaaa

SEQ ID NO: 731 - DNA, 1419 bp, Homo sapiens
gaacatttcaagtagcctccctctatgttcctttcctttttaaatatattgataatcctactgcagggaatttgggagccatacttggtcttcgcatgcaacgtaattagatataactatactatgtgaatatgactaaagaaatgaaaatgaaaacagtatcttgtgctctgtaacgattgttattaaatatatcatagaaatgagaagagtaggctcaggagctgaactgcctagttcaaaaggccaaatttactactttttgttccgtgaatttgttgtgctcctgtttccttagttgtaaaacagagataacaataggacgtgcccataagcttttcatgaggattaaatgagttaatgtgtttggtggggaccaggtggacatggtactggtagggccctatttgacattggctttaagtatcactggttttaagtgcatcagtagatatatgatgacaataattgtattatcatggtgatatggatttcttataaatacttgtattatgttagtcacttctagaaaagaatacatctatacagtagaatataattcaaaaaataatgtcatatttttgtaaagaaattttttgtaaaacttttcagtcttcaaagagtttcatagactttattccatttatattgagagcctactttgtgttaagcattttgctgaacattgtcctcactcttatgttacttaccatctattgggaagagaaagaagtaaacaaataattacatgtagagtagtagtgtcaatggtagaggcatgaacacaacacagatttaacactagagaaagagtgatcacaaaagaaatgatgtttcagttgagttttaaatggcagctggagttcatctgaatgattaggtgtctaggacaggtttaaaggttagggagtaaggaagataatattcaaaataaaaagaacctgaggatattcacagaggacatttgcagaggcctgaaatagcattggtacattcctagaaccataaatagtttgatggtaatgtaaattacagtatgttttgaaaaatcatggaagatttataccacgataagaaacttcaactttattctaaagttgatgagcatttgacagattttaagcaagaaacaaatattaaatttatattttagaaagaattctagatacataaaaagcacttattataatccagtatccattcatgataactctcagctaactggaaataaaagggaacttccttggtctaaggaagaacatctacataaattctacaaccagccacatacttaatggtgaaataatgaatgtttttctcctaagatcaggaaaaagaaaaagatgtctcctcttacttctattcaggatggtactggtagttcaggccagtacagctatgcaagaaaaagaaataaaa

SEQ ID NO: 732 - DNA, 560 bp, Homo sapiens
aagtagtctggcaggataattgtgttaaaattgatagcaaattagaatagatggaagcagttacatttagctgggacaaacatatacagtgtttagcaaaggcatatcaacctgaaaatacagacctacaatgaaaatgcatcaactctaattgctatagagttgttatggtagcactataattatagtatatgtgcaagtggtctggataaaaaaaattaggacaatcaaaatatttatactgttccgtagaggaacgggtatgacattgcagtaggcaactttgaattgcctattattgttgcctttacttttggttttgtttatatcagcaagggaaaattactaattctaaatttagtttagaaggaaaaagtatcaaatatttcatgattttgagtaaagaaacataactttcttaaaatggctgtattttaatttttattatatactttattcttttgtctaattgtagataaccaagacacaagttcattagctgatgctgtagagaaagttgcaaagcaacaacaatcacaagcatcagagatagaaaaaaa

SEQ ID NO: 733 - DNA, 560 bp, Homo sapiens; identical to SEQ ID NO: 732

SEQ ID NO: 734 - DNA, 8473 bp, Homo sapiens; identical to SEQ ID NO: 623

SEQ ID NO: 735 - DNA, 438 bp, Homo sapiens; identical to SEQ ID NO: 624

SEQ ID NO: 736 - DNA, 6195 bp, Homo sapiens; identical to SEQ ID NO: 625

SEQ ID NO: 737 - DNA, 583 bp, Homo sapiens
atagacgagttgaagattttgtttttcatatacaattcagccagtcctagctaaaacgcaatcactggaaatttaaccttaaattcatttaaaactgaaaaaggtcttttgaaatcaaactaatgcagaaactgctttacccaaaattctgatccatggccctcattagacgacccatcaggacaaataaagtttagcttgtgaacaagtcccagttttgtcaaaaatataatttggattgaagtgtcttttagaaactgacacatttgtgttattatctcatgaccaaaattctaaaatgaaagctacagtgtctttatttgtgtgcgtatgtggttaagtgtgtttatgcatatgtatgtgtattatgttgtatgttgttatctacatggtaaaatctggcatcatcaacaaaaaatctattaagggattctatttagattggcttagataaataagcattcataaaaaatatgtactaattaacccaaatgccttttagttcatgtgacttaggtatatctttaataaacaaatcagttttaaaattgttggtaaaataaaaatacaaatgttctcagaa

SEQ ID NO: 738 - DNA, 147 bp, Homo sapiens
ggtcccagctactcgggaggcttaggcaggagaatggcgtgaacccaggaggtggagcttgcagtgagccgagatcgcgccactgcactccagcctgggcgacagagcgagactccatctcaaaaaaaaaaaaaaaaaaaaattgtg

SEQ ID NO: 739 - DNA, 153 bp, Homo sapiens
cccagctactcgggaggctgaggcaggagaatggcgtgaacccgggaggcggagcttgcagtgagccgagatcgcgccactgcactccagcctgggcgacagagcgagactccgtctcaaaaaaaaaaaaaaaaaaaagaaagcagtggggcc

SEQ ID NO: 740 - DNA, 1433 bp, Homo sapiens
aacagatggaccattgacaatccatatatttagaaatgatcaaacctaatgttttccttttttaagatgaaagtaaacataaatagagatggtatttttttctgcaattctctttttatacatcttatatctctttgcagattacagttctatatttgacttcccataacatgtcacaggacatgtgctttaaatcccccacaagttgttctcttgtggatatagtctaggtcttctgggttgtcccaaaatatgatgtgcacagacacaaacatattctgtatattggttttgattaacacagaatgcagtgggatttccttcctattatcattatatttcccttaatgcagtccaagattatgtattagtgtctaaagaagtataccacattcttaggtcttttagaaagtatcatctgcctctttggactctgggctatctttactaattcatctcaagtattatttttgtctcttcttttcatctaagactaaatattctccactctgctgttctactcagattaatgtatggccatatggcagtagacttctttatacttagtgctttctcaattttaagatgtttgaatattacactgatgcagaagttatttcataagcatagctttttcttgtgtggggtggaaagggaagaggattaaatcactgcctcacttgagcacatacatagctggaaaatgtgtggaaagtttcttgatgttgagaaaaaaagacagtgtcttgttaatcaataaattccgtttatttttcttttactatgtcctttactatatcataactgtagccttgctatatcctgaactcctcacaaaggccttctctgagccaactaaattaatgataaagaattgtaattcttggctgggtgctgtagttcacgcctgtaatcccagcactttgggtcactgaggtgggcagatcacctgaggtcaggagttcaagaccagcctggccaacatggcgaaaccccatctctactaaaagtacaaacattagctgggcatggtggcatgcacttgtagtcccagctactcgggaggctaaggcaggagaatgacttgaaccctggaggcggaggttgcagtgagccaagattgcaccactgcactccagcctgggcaacagagcgagactccatctcaagaaaagaaaaaaaaaattgtaattcttatacccttgctctgcttctttatcattgtgtaattttaaaaacaactgacatatattatacaggtacttgtttattgtctatttctaccactaaaatggaagctccaactgctattagattaatttccctcccaggtccaattttgattatgttactctgaccaagctgatcttttctcttcaatctagaccttttaactaccttcaaaaatacaataaatataattattctagact

SEQ ID NO: 741 - DNA, 1434 bp, Homo sapiens
aacagatggaccattgacaatccatatatttagaaatgatcaaacctaatgttttcccttttttaagatgaaagtaaacataaatagagatggtatttttttctgcaattctctttttatacatcttatatctctttgcagattacagttctatatttgacttcccataacatgtcacaggacatgtgctttaaatcccccacaagttgttctcttgtggatatagtctaggtcttctgggttgtcccaaaatatgatgtgcacagacacaaacatattctgtatattggttttgattaacacagaatgcagtgggatttccttcctattatcattatatttcccttaatgcagtccaagattatgtattagtgtctaaagaagtataccacattcttaggtcttttagaaagtatcatctgcctctttggactctgggctatctttactaattcatctcaagtattatttttgtctcttcttttcatctaagactaaatattctccactctgctgttctactcagattaatgtatggccatatggcagtagacttctttatacttagtgctttctcaattttaagatgtttgaatattacactgatgcagaagttatttcataagcatagctttttcttgtgtggggtggaaagggaagaggattaaatcactgcctcacttgagcacatacatagctggaaaatgtgtggaaagtttcttgatgttgagaaaaaaagacagtgtcttgttaatcaataaattccgtttatttttcttttactatgtcctttactatatcataactgtagccttgctatatcctgaactcctcacaaaggccttctctgagccaactaaattaatgataaagaattgtaattcttggctgggtgctgtagttcacgcctgtaatcccagcactttgggtcactgaggtgggcagatcacctgaggtcaggagttcaagaccagcctggccaacatggcgaaaccccatctctactaaaagtacaaacattagctgggcatggtggcatgcacttgtagtcccagctactcgggaggctaaggcaggagaatgacttgaaccctggaggcggaggttgcagtgagccaagattgcaccactgcactccagcctgggcaacagagcgagactccatctcaagaaaagaaaaaaaaaattgtaattcttatacccttgctctgcttctttatcattgtgtaattttaaaaacaactgacatatattatacaggtacttgtttattgtctatttctaccactaaaatggaagctccaactgctattagattaatttccctcccaggtccaattttgattatgttactctgaccaagctgatcttttctcttcaatctagaccttttaactaccttcaaaaatacaataaatataattattctagact

SEQ ID NO: 742 - DNA, 577 bp, Homo sapiens
ctgaggtgatatattttgactatttttgacatatacaacctgcttatgtggtattttttactattaataaatgctaaatatcaaaccttctgtttagctcttagttgacatgaatttatagaccaaggtaaaggttaacacactacattgttataacctatattaacaaagaattaatactcttctatgtaatatttttagcagaattattttgttgaaaagtgccaagtgtttgtttcctctttgttcttcccctttttgttgtaaaattgtttcactttgtagcaaatgatgaaaacattattattttctaagtgttatgcaaatctttataatatcagtatacattaaatatctacctatttagtattctttctctagtaagagcttaccttctgtgcattctgaaatgtacaactttttatgtacaaaaatgtctgttttagcattatgaggaaatgaatgcctatacagtggtctccccttatctatgttcttgtgttccacagtttagttacctgcagtctgaaaatattaagtggaaaattccaaaaataaactacttataggttttaaa

SEQ ID NO: 743 - DNA, 196 bp, Homo sapiens
aaccccgtttctactaaaaatacaaaaaattagccgggcgtggtggtgggcgcctgtagtcccagctactcgggaggctgaggcaggagaatggcgtgaacctgggaggcggagcttgcagtgagccgagatcgtgccactgcactccagcctgggtgacaaatggggactccgtctcaaaaaaaaaaaaaaaaaa

SEQ ID NO: 744 - DNA, 577 bp, Homo sapiens; identical to SEQ ID NO: 742

SEQ ID NO: 745 - DNA, 196 bp, Homo sapiens; identical to SEQ ID NO: 743

SEQ ID NO: 746 - DNA, 4454 bp, Homo sapiens
atgattaatcactaaacaggtattgcataaaatagcaattttcagctctggattttggggaagggagtagaggctggaaatgtaggtggagagtcaggctggggagagatgccacattcgcaacattgggttttttacaatagtactgcatctatctctgtgcaggagtctaaaagtggttggaagctacatttaggattatttaaaataacatactgccttatttttatctctgtagcaacaactttttgtaagaaaaatagctagttccatgatcttttgccttttgaaaaggagagatctattttaaactctttgcaggctcctcgaagttccttttcttgctgttgagtagcaggtagaatctctagttcatggaggtctgacggatccatggtcccgtgctggtccatgtgctgccctctgcttccgtccctcatccttgccactctcaacagtcttccccgacaacccttaggaagacaagggcttggaggagggggaggactgagtgtccctggcatgttctgattaatcctattcattgtcaagtacagctttttaatgaactgattcattactgagagtaggtctcatgcaaatccctagtttgtatcctgtggatttaatttctaacaatttcctcatttcaacacaactccattgtaccatgggctttgtgattttgttctaatatagagcttgacctcacattttaagactataagatgaatactaaaaaaacgaaatccttaaaataaaaaataaactagaagaacatgtaggtggatattcaactcctctctaaaggaagaagggttgtccacacataaaagttttggaagagactgggtttagtggctcacgcctgtaatcttagcactttgggaggctgaggtaggaggatcacttgagcccaagagttcgagaccagcctgggcaacataatgataccctgtctctacaaaaattaaaattagccaggcatggtaatgcacacctgttgtcacctgtggttgggaggctgagtgggaggatcgcttgagcccagaaggttgaggcttcagggagccatgattgcaccactgcactccagtgtaggtgacagagcaagaccctgtctccaaaaaaaaaaaaaaaaaaaaagaaattctggaagaaatgacagaggaaatcactgataaatttcgaaacataagtttgtgcaatatcagagacaaatttaacaaatatgtaaaatttgcctccattatgagttaatataaaactatgaagagttcaggagattataaaaagagacaaagacaaccaggagaaaacagataacttaatactttttaaaaaaacaccaggctaacaaaaaagaaatatatagttgactaaataaatatagcacaatatatttaaccctacaaatttcaactaatgcaatgaaaacataatagcagcttttcaactgttattattaccagaaagaaaaatattttaaaatgctattgtggttttggtgagggaacatttttcatgccctgttgtttgagagtagaattcagtgcaccctttctggaaagcagtttggtaacctgtaatacttcttttaaaaaaaaattcatcctcttgtctaaaaatttctcctctagaaacttaaagataatagtcaagtgaaaacacatttatgggcagtgtttaaagttttgtgagtgaaactgttgataagaacctattacaatggttaagccacctggaacattctattgatatattatgcagccttggaaaatagtacttttaaggaatgttaataagatgggcaatacaaaactgaatgaaaatccaatacagaattctgcctacataacatgatccaaattttgcctaaagtttgcctaaaacgtgcatagcaaaagaatttcgggaactacaccagaatgttagcatgggtccatcatttctgagctgtggtgttactggcatgactcttgtttttcttgtttattcttttatgttatattaaggtgaccacctgttcccgttggcctggtactgccctggttttagcactggaagtcctactctggacaattaatgattcgtgtgtgtgtgtgtgtgtgtgtgtgtgtgtgtgtacacattaaggtgaggttgtgcccatttgaaaggaagggccaaagataaagtgacaagctcatggggcctgtgtggtagtcaggcagtagatttttttttttttttttgagatggagtctcgctctgtcacccaggctggagtgcagtggcatgaacctggctcactgcagcctctgcctcccaggctcaagcgattctcccacctcacctgcccaagtagctgggactacaggcatgcacccccacacccagctaattttattttgcattttttgtagagacggggttttacatgttgcctaggctggtctcaaactcctgagctcaagtgatccactaccttggcctcccaaagtgctgggattacaggcatgagccactgtgcttggcccagggagtagattttctgatgataaaattaacgtgacttgttctagaaaatacagggaaagagtaaatgtgcaaagacttaaatagcatttacatgtagcccacagtgctctaaatgcttttggtggttcacagtttaatcatcataaccctatgaactagatactgttgttgcatccccatttacagaggcatagagacatggagtaattcacccatagccacacagcccttgacagaatctggatttgaactcaggcagttcggatccagagtctgggccattgaccacctcctgcatctctgtagatccccgactccagcctctcctcttgctgcctctctcaacagtaacgatgctgttactccccacgccaaacctctgggctggccaggctcactccagtcccacagtcattgccaggactgcctttgaccttacacagaggaaacatcttccacctgtcgggagggagccggggcggggatttccatggcagagttactgttctctggtgatagagttctttcagttttgctacatggtcttgtggcaaaggactgggtgcaggtgcagccttggttatttctggaaacacttctccttttcttttattttgccaggtctggctcatcagtcaccttcctctcagaaaggtgattttggctcctctgcccagaccatcaaacatttctggaggtgtcacaagcttccgtgagggttctggtctctgcgaattgcaggaagaatccaaacataggaaaggggtgatgtgtatcagggtgtccatcctcagctttgctccacaaagaccctcacacttgcacattgttttgttaacagtattatctctgagtagtgggtttattgtttttgcttacctgttttaaacacttcttcaacaaacttgctttactttccattttttaaaagtgtatttcaattttttattaataatgccattttactcctgcaaaatttctcactccttcaaagtctgtgtatggcaaagatcttcctaaccatcattcaagttagagcaactccatttctgtatcaaaaagaaatacctttagttattgtctgaacttgtcagaatttctgagaacgatgccagaaattctataattgttttgtcacattaattgaacaatgagagggcaccagcattcctcactcatgaggtagaagcaccacatctacatttctttttagctatgggtgatgtttttgcttttaaatcttagaaatctgttaataaacaaataacacaacaaagtttggggtacttccttgtggggactgggatgcttaagctaaaacaaagtttaaatttggactgtgtgtgttatgtttcgcagaatctatatgtttctcaaaagtgggtgtcaccctccttcctcccccaacacacccttcaggggtaagaggagaagtaatgtagaaaaattaactgtttctccactgtaaaagtagggtgtctttagaatgtttcatgttcaaaggaaagattgtgcttctcccaaggcaaggtgttcccttaaaaaaaaaaaaaaaaaaggttgagcatgtctttgtattgctgtctctggaagaggaaatgaggcatctcttggggtgagaacaagggagaattgaactctcgggcctggccagatggattcctcacactggcacagagctgtgaagggaagggcctttcatcctccagaggaaagagggctggggtctcagaggccagagcatagggacaggcaggagtcctgcagccctgatgcctgcccctcccagtacagaatctctgtcctgacccccacctgttgaacctttcaaatcccagtgactcgccagctttctctgtggatattggctgaattggtggcttgtgtggctgcctgggagagcaatttacccctgagccaaggagggggtgggc

SEQ ID NO: 747 - DNA, 1569 bp, Homo sapiens
cccacgccaaacctctgggctggccaggctcactccagccccacagtcattgccaggactgcctttgaccttacacagaggaaacatcttccacctgtcgggagggagccggggcggggatttccatggcagagttactgttctctggtgatagagttctttcagttttgctacatggtcttgtggcaaaggactgggtgcaggtgcagccttggttatttctggaaacacttctccttttcttttattttgccaggtctggctcatcagtcaccttcctctcagaaaggtgattttggctcctctgcccagaccatcaaacatttctggaggtgtcacaagcttccgtgagggttctggtctctgcgaattgcaggaagaatccaaacataggaaaggggtgatgtgtatcagggtgtccatcctcagctttgctccacaaagaccctcacacttgcacattgttttgttaacagtattatctctgagtagtgggtttattgtttttgcttacctgttttaaacacttcttcaacaaacttgctttactttccattttttaaaagtgtatttcaattttttattaataatgccattttactcctgcaaaatttctcactccttcaaagtctgtgtatggcaaagatcttcctaaccatcattcaagttagagcaactccatttctgtatcaaaaagaaatacctttagttattgtctgaacttgtcagaatttctgagaacgatgccagaaattctataattgttttgtcacattaattgaacaatgagagggcaccagcattcctcactcatgaggtagaagcaccacatctacatttctttttagctatgggtgatgtttttgcttttaaatcttagaaatctgttaataaacaaataacacaacaaagtttggggtacttccttgtggggactgggatgcttaagctaaaacaaagtttaaatttggactgtgtgtgttatgtttcgcagaatctatatgtttctcaaaagtgggtgtcaccctccttcctcccccaacacacccttcaggggtaagaggagaagtaatgtagaaaaattaactgtttctccactgtaaaagtagggtgtctttagaatgtttcatgttcaaaggaaagattgtgcttctcccaaggcaaggtgttcccttaaaaaaaaaaaaaaaaaaggttgagcatgtctttgtattgctgtctctggaagaggaaatgaggcatctcttggggtgagaacaagggagaattgaactctcgggcctggccagatggattcctcacactggcacagagctgtgaagggaagggcctttcatcctccagaggaaagagggctggggtctcagaggccagagcatagggacaggcaggagtcctgcagccctgatgcctgcccctcccagtacagaatctctgtcctgacccccacctgttgaacctttcaaatcccagtgactcgccagctttctctgtggatattggctgaattggtggcttgtgtggctgcctgggagagcaatttacccctgagccaaggagggggtgggc

SEQ ID NO: 748 - DNA, 787 bp, Homo sapiens
ctcatccagagatgcactgggcacagggaaagctttttttttcaagtagcagctgctattcattgaaatgttacaattttcctgccttagtatttcacacgtccttatactcctcataacattttttgcttgtgtagttttagccccatttcagaaatgaggaacccaggttcagaaggtttagaagcttgctcaagaccccccagctattaggtgccagagctgcaactggaatgcagctttgactccattgtgggtttctgttccattatcaagagtagcctgacagttggcaataacaatgactgaatgaatgaataaatgaattctccaaagaaaatagttcatgtttccctagtatgagggaatacttgagatagttgttttgagaagggggccacagaccaggagacaccaataagtctttctcatttctggtaaatcgctttataatgaccgttattataaagtgtaaaaacaacaacaacaaaaaataataggcgcagtggttcacacctataatcctagcactttgggaggcagaggcgggcggatcatttgaggtcaggagttcgagaccagcctggccaacatgatgaaaccctgtctctactaaaaacacaaaaattagccgggcggtagtggcacgtgcctgtgtagtcacagctactcgggaggctgaggcaggagaatcacttgaacccgggaggtgaaggttgcagtgagccgagattgtgccactgcactccagcctgggagacagagccagactccatctcaaaaaaaa

SEQ ID NO: 749 - DNA, 622 bp, Homo sapiens
gtatgcacacaaatacctaacctttccaatgtaggccctagttacttccaaaataatttagaagtgtttacagatatgttttgacgattttgctatgatttttcatttattggtatcagaattgaatatatttagctgttgctctctgctaagtaaactgagacctaggtgtgcttaccattgttttctgtgaaaaccagctgatccgtgttacaaatgactgttttagctatggaaacaagacacctctgtgaatatgattccttgtgtggtgggcatcactagagagcaatgactgtattccctaaagagaaagtgcgagagcggcagtacagaccaaggcagaggtggctgaggagattgttccggtcagcaatgtagaattcctgcccctgtgttctgtgaccccaacagagggagccagcacccactgtgcacctcccacacagcccacactgcacaaggcatttagacagtgccttaaattcactccatcaatactgtgagagccccactggcttcccctttggggttttagacatttagggtattcactgaatactttacgttgaagtgtttttctataacattagaaccaggttcaacttaaaaaaaaaaaaaa

SEQ ID NO: 750 - DNA, 31169 bp, Homo sapiens
  misc_feature (4244)..(4244): n equals a,t,g, or c
gccgcggcgagagcgcgcccagccccgccgcgatgcccgcgcgcccaggacgcctcctcccgctgctggcccggccggcggccctgactgcgctgctgctgctgctgctgggccatggcggcggcgggcgctggggcgcccgggcccaggaggcggcggcggcggcggcggacgggccccccgcggcagacggcgaggacggacaggacccgcacagcaagcacctgtacacggccgacatgttcacgcacgggatccagagcgccgcgcacttcgtcatgttcttcgcgccctggtaacgccgcgcaggccggcgccctgccccgcacttggcgcttcgcggggcgtggggcgcttgggcgccgcgggcggggggtcccggggccacgtggacgccgacggctctggtctgcggcgtgcgtgctacgggcgcggggctcggggctcaggggtgcggggtgtaatactgggggcgcggggccgggagcgcggggactctgcgggttcggggctccggctggcggggagcggggggcgcgggcgccgcggctcggggccgggagccggggactgcaggggaccgagggcttggggctccgggtcggggggcgtgagctcagcgggccgggcactggcggctgacgtggcgctcggcggccggggcggtgcgggaggagggggcggaccccgaggggacagccgggaaaagcccgccctgcgccgcgctcctgaattcaaccgcctcttgcacctcggcaccgagggaggggaaggtggggtcgtcgccctttcgggcagccgggagtccaaatgtcaccccgcggtccctgcccagcgccccaaacttcctgtgccggccggacgcgcggcctgcccgtgggccacgtgcactcaccagagcggccttgctgctgccgcggccaccggggtcggctgggacagactgcgggcacgtccccttccagaggctttaactgaaaaatagaacccaggaaggtgtggtttcccactttgtgcgtcttttgtgggataggaaggagtggtccgggcagaggagggttgctgagctaccccgggaagaccaaggtagtgcgaattctggaacccctccgcccccctgcagctcagggtggatgtaatctctgaacggagcccactggtcctcaactccaggctgtcctgtcacctccctgctgctctctcgggtccaggtcacttgttatgtgtgagatcggaaaagcccctccgttgagcagatggtccctcttgctttggttctctgggcgaggctttggtgtgggcctcgctgctgacctgagagaccctaccctggcactcatcccacggaagagcttcctgtcattcacacaagcatgtgcacagctttcctgccagtgccgggatgccccgaggaagggaagtgaccacaggccagagcagaaagccataattttaggacacaagacctttgagaggttggaatagcctgcaggttcttgttgcagaacttggtattcttccccagagctcagtagaggctcacttgggaaagggatgtagggaggcatagagaaaaggtaccctaagaaaaatggccagttcagaaattgtacctttcaaactgggagaaacgtttttctcttaaccttgtattcaggctattactgcgtttcagttcatttggagttaaatcaactttttgggccagtgtgggtttattaacaatgtgtatatgaagtacattatgtttcacattcctaagaaccaactgactcgaatttttacaactccaatggtttagaaattactttgtaacataaaacaatcaggcagtattaacagtttctctttgttcgggagtattctcagcaactatttcaattaagtgtactacttaattggagcctatttcagtggaatacatctgtcgatgggttttcttttttctttcttcattatttatttattttagagatgggatcttgctctgttacccagcctgaaaccagtggtacgcagccgcagctcactgtagcctctaactcctgggctcaagtgattctcctgcctcagcctctgaagtagctgtgactacaggcgcaggtcatcacacccagcttattttgttgttgttgtttttgttgtagttggtagaaacagggtctcgctatgttgccggggctggtctcaaactcctggcctcaatcagtacttctgccctggcctcccaaagtactgagattacaggcatgagccatcgcatcccattctttacttttttttttttttaaagaaaaactgacatgcagatgtaataagtccccacagtgccaaaggaattttaagtttagaatctttgcaataaataccagctagtcctgggctgagtgagagaaaactggcacatctgggcacttggtattaagtaaattccttttccattatatgtggcttgtagacatttagctggatgcttccagaataattagctttatgttgttacttttttttttttttttttttttgagatggagtcttgctctgttgccaggctggagtgcagtagcgcgatcttgatttactgcaacctccacctcctgggtttaagcgattctcctgcctcagcctcctgagaagctgggactacaggtgcgtgccaccacgcccagctaatttttgtatttttagtagagatggggtttcaccatgttggccaggattgtctcgatctcttgacctcgtgttctgcccgcctcttcctcccaaagtgctgggattacaggcgtaagccaccgcacctggcatatttgttgacttcttgatagtctactacaaatacttaaacagagatatgtgggtttctatgatggtgtttaagttggacttttaagagggccctttcagaaaactgcagatactgcagtagggctcaggaataggctgccaggaaaggaggctgagtgggcggcgagtcaaatgggaggtcagcaggggcaagatcaagtaggaccaacaatacctggcacaacactttggtaagttgtaaggctgagagcaaggtggtgactctggaggggtctatgcaggagagggaaggaggtcctggagtggtgagctgagcgtttggagctcagatagaagactcagtggactccccctcaacacacacatacctttttccagtttcagctgccgtggagtggtgaaagcccacgtgtgattaaggggctggggcccctgtaacaaaaacatcaatctgtgtatttttgccctgcacttggcttctgcagggttatcctgctgctgtagattttttgccaacatcaggtcacaacttctgtatggccagtttgtgagtcacccttgacctggtgacagtgaggtcaagatttggaccaggtagctttgctctacttcttggccacaggctaccttctgagtgcagctgcctgtctcagagttgggtgctgtagccgcagggccgactagatagcacctgtggccccatcacagccaggagcaagggcacgcccaacttggtgatggcccagaatggtcagttttgatttagcgcaccacaaacttatttattgtttattctcattcttaatctaatcttgtgttttctcaaaaaaaaaaaagggaaaaaaaaagcagtagcaaaacaaaaccttgtcaagattgcagaggagttctaaagttccagaatgagcatatctgatcaaagtcccctgaaggtcagaactgcccttgacagtcccttaggaaggtgccttgttggacaccgccccagtcagtcagtcagtccccactgccagcgtttcctccagcattagaactatcatggcttctttggttaaacaccaaatggactagttctcaaacctgtgcctttagacaacagggtcacacttaatgtagtcggagagatgctcatgccatgagaagcatgtaggaaccaaggcctgctgaggaacaaaaacctcacatctcccagcttgcacacacttcagggttctgtgggaattgcctttttttttttcttgtttccttctcccccgccacataaactcactttgttgaatctacagaagttaaatctgcatgtatagtttcattgtgcttttttttttgtatctgagtatctcataaagcagggattctcttagctggccaagaaagtgctgtttagggaagacacattaacttgaagcagactttttcagtgctacctttaagtctgngtttttttttttttttttttttttttttgaaatggagtcttgctctatcgcccaggctggagtggcaatagcatggtctgggttcactgcaacctccgcctcccgggttcaagcgattttcctgcctcagcctcctgagtagctgaaatacagggcgtgtgccaccatgccccagctaatttttgtatttttagtagagatggggcttcaccttgttggtcaggctggtctcgaactcctgaccttgtgatccgcttgcttcggcttcccaaagtgctgggattataggtgtgagccaccacacccggcttaaatcctttttttcttaagagacaaaatctctgtcacccaggctggagtgcagtggtgtgatcatagctcgctgcagcctcaaacttctggcctcaagtgatccctctgcctcagcctcccaggtagctaggactgcaggtgtgtgccaccacaccaggctaattttttaaaattttttgtagatgggggtctcactgtgttgcccaggccagtcttgaacccctgggctcaagcagctctcctgccttggcctcccaaagtgctgggattacaggcatgagccactgctaccgacttaaatgcttatttttgaggtaatctgtcagaaaataaaaggagatttaacagattattaaattattttgaggaagaagtcacaattctaagcgttgagtgttcatataagcaagtgtgtttaaaaaaaaagcattttaaaaagcgatacagcaaagtggttacattgtaggcatcagtgtgttcctgccatattaaatagcaaacaaacccatgtgtcataatgctatgggattgtagttgaaacctgggataaagtttctagggttgtctcattcaaaattcgagtatggcactgtagacatactgtccagagaacacagcaagagctgtggtcagctgtatgacttaaggtctagtgttgggaaagatgctgatatcctcatgaaatgtgaagcatggcaagaagcctaattaagatactattttaaatgatgggtgattttaaaatatttatacataactgaattcatacaatgaatactaagaatagacatttgcttacttcaaccctagaagtataggtggccacaaactttttttttccccttctcattggagaaaattgcaggtgattaaattttgagattgccttatgtttgtagccatttggttatatagtggaggagacttgacgaataaaagtagcagatacagcaggaagtgctaagctactgtccaagggaggagtagagaggctttccagaagggcaggagaagagaatgggtgctgaacagcccggggagtcagggccaacttgctagaggaagtgacacccaaactaaacctgaagggcagatagatttagctaggtggagtttagggacgaagtgtcagagagaatgtgtcccagggccaagccaagctatagtcctttgggaacactgcagatgctgcagtagggctcaggagtaggccacaagggaaggagggtggactctgggatagaagtcaagcgggaggtcagcagggccagaacaactaggatccagaacaacactttgctaagtttaatactggaacaaggccaagatttcatgctgagaacagggcagtgactctggagggatgggagcaggggagagaggtcctggagtactggtccaggagctgccatctgcaatggtgtaaagaaaggactgagagccccattgtcccctggacagagctgaagttgtgggccagctgccctgtgacctgatactcaatgtgcttgtactcttgccttgttccaggtgtggacactgccagcggctgcagccgacttggaatgacctgggagacaaatacaacagcatggaagatgccaaagtctatgtggctaaagtggactgcacggcccactccgacgtgtgctccgcccagggggtgcgaggataccccacgtaagttggaaggaagggggcacacttcctaggtggctcctggctacaaagaaagtcctagttaaacttttggtaaaggtgtgaagagatactaaatttaagcaggcagtccctgtcattagggagaaactgcatttaatgctgtgtctgttttagatggcttttatacttggataacctttaattcatcagtgttgggttttcctgtttataagagaatgtgtttgcaagagaaaaatgacggtcccgccatgctagatgttcaccggtacattttacacagtgtgcatggactgtcatcagttttggcttgcttttgctggtgacttattcgcaaacacccttcctatagttccttcccgtgtgactcccacagggctgttcctgttggaaagaaagtatagagtctgacagacgatgatacttacttccttgacagttaagaatttttttggttataagaaatagaaattgaaatgttctcaattctagaaatagaattgttctcttattaaacagaaagaaaggactatttaaaaggctgtggaggaacctctgagagccagctccaggggcctggggtctgtttctcctgcacctcccttgagatgacggctttccaggcctgtatctctgtttgcacagaagggcccaccactgactggccctgcttggctggaatgttcgttccaggaatagtcactgtggccagggaaacaggagcttatagcaagacacatgcccattcacaccatgtgccaagtgttggagggaaaagcagttcttcaaaaaagagaagaagctgtttctgaaggaggtggagggattgccacggtcacttccttgctgtttgtttcaattgaggaatgaagtcaattctatacaatttattgcttaattgaataatataggggtccatcaataaagcaaaaaattggagcttatattcaaacctgggaggcagaaaagtggagggatctccaggcttgaacctagaagtcgtagtcaaatcccagctctaccatttacttaccacccagctctgacctcatcacttaacctgtaagtaaggtgatcccccaaacattgttacaggacttacatggaatgtgtgcagacaccaatctgagcacacccaatacatgttagggttttccctaccatttggaaatgtgggtgtttccacaaaggaccctggaattcttggtctttggtgactgcttgctaatgtaagtgccataatttgggtttactttaaatcagatcaatggagataaaattgcttatctgtatctacgtaaaagcattaactattctatgctttatagtattgcattgaaagtatggatcaagagcatcccaaagaagcaggtagtgagcagagatgagggcgaggaggtgaatgcttacctgttgagagactgttgctttcaaagttcaggggcagcaggggtgagctggctgtggtgtctttcctcttaacctgctgaccatctgtggcctgagactatgtgcatcacacaccatgccacagggaaggtgacacaggacctgtaatggagctgagagtggtatgtgttatggggcttcagagaaggaagtgaaggcttccacctcagcctggccataacagctgtcagctgcaatatcagctactccatagttggtattcaccaaaaaccatcacagatttaaaaagtcacaaatgtaaaaagtcacaaatttaaaaaggcccatgttggatcatgtgtttagatttttaatgagaagagctggtctccccaagtaaaccatggctggttttgtgttattaaaaagaacaaaaatgaacgtacaccacactgaacacagtttgggaaggaacctctgtgaccatcactgccctgcagaagctccaagaacagattattttccccccgagaatgcaggaggtggaatgtgctgtgtgcaatgtggtcgcactggggcatctgtagattgacttgagcgagctttgactcctctaagacaagtgcccatcccatagagtggttgtgaggcccgaggcaggtgacgactgtacctgcctgagtccaggcatgtgtcaggacatgagctttcacgttattctttcctggcaagtgtaactggagtaaaggattggaggggcagggagtttgggctcccacgctccctagagatggctggctgtgctcaggaaaatgttttgaggtcttcctgttgggccagtcatgaatcattacagcagggcaggactgacggggggaactacctgtgttagtttcctaggctgctgtaacaaagttccacaaaccgggtggccagaaacaatagaaatgtattctctgcagtcctggaggccagaggtcctaaatcaaggagccagcagggtcatgctccctctgaaacctgtaggggaatcctcccttgcctcgtcctggctcctgttggtttcctggtcatctttggcgttccttggcttgtagatgcatcactgccgtcctctgtcctcacatgcccttctctctctgtgtgtgtgtgtctctctgtgtccaaacccttcttacaaggacaccagtcatgctagattggggcccatcctagtgacctcattttaacttgaatatatctgtaaagaccttattctaaataaggtcaccttctgagattgatggttatgacttacacagatctgtcttgcaggacacagttcaactgataacactgtctacggtagtagaactttcatcatgctgtttgccaaggcagtacctacatggggattttctccctgcagtctccttgaaaaaggagactcaaatgcccatgtggaggcttggtaatagcggaaatctggggcaatactttgtttgggcttgtaccctgtggcccagtctccatcacctccctcacccctgtcgacagtgagaattgaagtcagatgtcccaaactcactgcaaggtctggaccagaagtgtccgctctgtccctgggctctgtgaacttaccgaggaagaatctcagacttcctgggcaggttagaacgattatcagtccaacaacaagaagatggttttttttaaattatttgttttgcaaatgaatagcaaattacaaaaaaatcataggctaggtcttactgtattttacttttagcaaagacacaagtgtgaccgtccctggtcctttctgatgtcttgaggatccacccatttcccttcctgaagagcgttagcgggaggcagagccgtgcaggaagcagtttctgtttccaggtgcggaacacaccttgtgggagcctggggaggtgccaggctaggtgagggcaatcatctttgataccgcagatgttgcagttgcttatcatgttgaacttcgtgacgtagccggtgtactggccaaatctagttaagttttggctgttttttgtggttatgagagtctgagctgctgaggaagctgggtgtatattctgcactggagacacattagggaccctacctatgccccatcataccatcttaggttctgggtaaggccagtatgctgatactaatttcaaagcctaatctagccatgtgacttcattttaaggagaattagccatttttttttggactgaatgtgtgtgtaccccagcattcataggggaaatcctaatccccaatgctggcaataggaggtggggcctttgagagggagcaggttattagggtggagctctcatgaatagggttgcataccttatgaaagaggccccagagagttctgtttccccttttgccatgtgagggcacagcaagaagacaccatctgtgaaccagaaagccctcaccagacactgactctgctggcaccttgatctcagacttcccagtctctagagctaggcgaaatagattctgttgtttctaagacacccaatctgtggtcttctgttacagccgttgaactaagacactattcaaaccttcatgtcagattttacatatgttgccgtcttacaattctgataccgtacattgggcatttactcacaaaatccacatacgcgctgtagaagtggcaggggtgtttagatgagcaggcttgccaacaaatggtactctgtatttcttttttcttctattggtagtcacatttttgcctatccttgacaccttctatgaatttttatctagagtattagagcacgttttcccgtgactgctggagggatacaggaactgagtgttaatttcatcctctggtgatgtcttttgcttatggttaaaggacctactcccgtatcctctctgcagattccttcagaggccagcatttgtaggaaaaagaaaagattccttctctatgggaaggtgaatggacagcatcagtcaatgtcaaggatgttcttatagctggaaacttgaattctcacagtaactggatattcaggccttgtaagagttgaatacctgccaggtggcctggaagaataccttaattgcaaaacaacaccgtgtctgctccagtcctaatttgaacacagacacaacaactgctgaagccgggaaagcataacagtagcttgcagggaaggcccgaggctgctgcagaggagcactgagtactgtagcttttgaggcctcagtcacagcagcgggctggaagttttcacctcattttagttttccttgaataaaaccagaaacttctgaaagtttaggattaactgaatgtattatctcctggaacgttatgtttgtttcctttttatcagagaggagcagatacgtgcctggctgcagccccttgacagctcattttctgattgtttcactaaatgagtttgctctctgataagacaactttctttttgctctgtctaatcctttgttattctttcagcttaaagcttttcaagccaggccaagaagctgtgaagtaccagggtcctcgggacttccagacactggaaaactggatgctgcagacactgaacgaggagccagtggtgagtgtctacctccttccctccctccctccctccctccctctctccctgcctacatctttggggtaatatgtaacggggcagaggccagttgaggttaatgattaaggctgccattttaaagcaactctactttttttggagcttattgatattataggtaaagatgaacttttacagaaactttttggtgtggaaatacctaaatgtgcacaaaagtcaagagaaggctaaaccctcagtttcagcagttaccaccattttggtgtttgtcttccccgccaccctgcgccttgtttggctgtagtcagtcttcagggaagtcacttgtgtggcctcacagataagcacttactctttgttaacactgccaccctgccactgtcacaggtaatacagttcacaactgtaccctagcatcagagactgactctggaccacctggggtcagggctgggcccagcctagaatctcctatccaagccagcactggagcctcctcccatccccccgacctttgccctccaccacctgcagccctctggctcgggcctagcccgacagctgtacccgtagggtggatccttccttttcttctcggtgctcagtccccgagtctctaatgggctttgcttataacatcattttgtaccattaatactctgtgtcttaatgcacttcccttactaaggctaatatcaggagattgtagactcttagaatattatgtactaaaaaggatttataatcctccccctccccagttgatgttggaagtcttcacttttttataaatcatgatcataaaccactggttaagtgttcctttgtgggtggtgccttctgattaatgccgagtgctcaggtccctggatgccgggtagacctggtgggtcatgctgctgtgttggagagggactggaaaaacacccgtgttcctacactgtaggatcctgatgagctaggaagagcatctgaagtctttgtaatttcaatttcaacaaatacctaagactaccttcttgtatcagctaagcgcccactgatttgaaggtggtctgtggtggtccttttggagctttgccgcttactgttgccagtttccagtgtgtctgtgcggctcttccgctctgccccatcttctctgatgacctaatcagaaacttggctgctgattcagtgcttccatccctcacctgcaaagactctctcaactcggctgggtgtggtggctcatgcctgtaatcctagcactttgggaggctgaggcgggtggttcacccaaggtcaagagttcaagaccagcctggccaacatggtgaaacgtcgtctctgctaaaaatacaaaaattagccaggtggtaggtgcctgtaatcccagctacttgggaggctgaggcaggagaatcacttgaacccaggaggcagaggttgcagtgaggcgagatcatgccactgcactccagcctatgcaacagagcaaaaactatcgtggaaaaaaaaaaaaaactctctgaactgtatggtggagactgttggtgtgtgatgttatgtcgttgaaccagagacttacctaactttagctaaaagaaccacagacctctcaggaaatttgcatctttgtcctggcaagaaagctgaatgagcaggtgtgactttcatagttttcaattggacattgtttcctttgtgaaaatattctctttgtggggacacatatattggatggtagcaaaccaattttaaggaggagttaatagcctcaaataaatttcaccaaaaaagccagtcttctatgatggctttattcaagaaaccagcagccagtatcaggacggcagaaagacctcatctcatggcccatttcccttagtggaggtggcggcctcacctgcaggttggaaagggctgagaggctgcgtccaggctctgcaagggactttctgtctcctcagtgtgggagcaggatggccgcgtgtaatccccccatgccaccccagaaccacagtcaccaacttgccatattttagtgtctccagcaatagcaggccccagataattgccagaaacaatgacaatgcgccttattgtggaaaagtttaagtatatacactttatactgcaaaccagaattctcttagctttttaagtgaaaactttaaaaaaagttctttatctgtatacctaagtaacttagtacatacattttttaatattcacgtgggataaatttagatttttttaagtgttgtggcaatattcaagaaactcaaaagacaatttgtcactttgtacattctactgcaatttttgtatttccatgtttgcttctgtattttttcttgaacagttatacaaacatgtttcatctcattaatgattttatatatttatgtggtctttatattgatcatgtcttatattattttatcatgtggatttgccataattcaactctaattctgtcagtggatatttaggttatttataccttttccatcatcagtaatgatgtagggaacaagtttatctttgtaaaggactttccacccccccttcttttgagtgatatttttagaatatagtattcccagacataaaattataaggccaagaataaaaaaaaagatcatttttatggctcttgatgaatatagccaggtttcttaagcaccatatcagcttatgctgccactgtagggcaagacgtgacctgtttctgggatgcactgtggtgttcccgtgccgggggactgctctggagtctgccaggaacccaggaagcaactagaggccccgcatgtgccataaatgaacacttcatactgaaaggcccttgaacatctcatggagagtggcacacggtattttatttcaccttatgtgcacccattgactgttcacttagccattcttcccttgggcattgttttgtgtgggtatttagcactttgaaagtcttgacgcgctggcagcagaagggaaactttgtggttctttatgattccagccctgcacagctttgaactgtcagcacctttaaagcctttaacaacttagcttggatattctttttaataggaatatgaacccccagataaaagctgagtaatatacacttaatgtgtctgcagcagaacactgattccattatctttccctcatttctggttactttggttggaagccacagctgtacctggtctgaaaagttgagaaatgtaggattgtgactagacagctgcacacattgctgtctgcttgggtcctggcagaagcatcttttgaaaagcccctttccccctctttctgtacgagacttagtcatatgaattacattctttcttgaaggtgcagcttatgttcatgccatggttttctctctgttgcctttcattcacctgcattttccttctcatcacctccttttctctctgatcagtcttccacagttgtgtcttcctcacagttttccctgtcatttgtgtaaagtaaggataaccaggccttcctggtccctgagtttctcattctcagctttgtccattttgctaccctcgtgtctgtttgtgtgttttttgaggaagagtctcactctgttgcccaggcaggagtgcagtggcatgttctcagctcactgcagcctccaccccctgggatcaagtgatcctcccacctcagcctcccaagtagctgggaccacaggcgcacgtcaccatgctcaggtaaataaaattttttttttgtagcgatggggtctcactctgttgcctaggctggtcttgaactgctgggctcaagcagtcctcttgcctcagcctcccaaaatgctaggctgtcacctaggctggtcttgaactgctgggctcaagcagtcctcttgcctcagcctcccaaaatgctagggttacaggcacgagccactgcgctgggcactctggtgtctgcaagtgctgaccccttcagaatacgtccattgggcgttgtattttgtattctttgtgaagtatccaagtacgtttcaaagaagaggacagggtatagggtaagactgtcctttgcattgtctgctttgtttggttgggttttggggtagggacagctatcacttggctgccctggagactcagacctagagctttcactgagggtgaggctgacgagggggctttttgctgaagcttccagagggcttgacgagatcagttcctgacctggcctcactcagcacagcagcatcgtacaagggttcccaggttgttgggtgagggaggcatctgcaggcggttccccacagacacagtcacctcctggatggtttccctgtgtctccactgacacacccatgactgttttatttcctcctgttagacaccagagccggaagtggaaccgcccagtgcccccgagctcaagcaagggctgtatgagctctcagcaagcaactttgagctgcacgttgcacaaggtaagggggacgtcctgatgccagcttcagagaatcactattattccttggcgtgctgggcttttccttcctgctactcaagggctcttagatagcagcatcagtggcactgacaaagggtcactctagaggagctgttgggaccgttgttcagtgcacctcctctaaaacatgagttctccttttgtctgtgcccttatagaaacgccgagtctaatgctaagcacacgtgacccgcacactagctggacagtgcatccttggctaagagtgtttattgacagactcacctcgcttgattgctctttactttattgcactttggagatactgcatttttttacggattgaggattttggcagcccagcatctggcaggtctagcggtttttccagcagcttgtgcttactttgtatccctctgtcagcatctttttagcaataaaatattttttaattaaggtacattgtttttaaagaagtaatgctgtagcacatttcatagactatagtgtaaacataactttgatattcactagggaacaaaaaaatttgtgtgacttgttttattgtgatattatctttattgcagtggtctggaaccaaacccacagtatctcggaagtatgcctgtgtattaatgataatcatatgcttaatgacctcaggcagaaacaaaagcttctctctgtctaaacagaatttagattgggcacagtggctcatgcctatcatcccagcacttggggagaacaaggtgggatgactacttgagcccaggagttcgagatcagcctaagcaagaccttgtctctacagaagattaaaaaaaaaaaaaaggctgggtatggtaagcgcactcctgaagctgaggtgggaagatcacttgagcctggaaggtcaaggctgcagtgagctgtgatcatgccactgtactccagcctgggtgacagagtgagatcctgtctcagaaaacaaccaaacaaaacccagaatttaatgacaccgttataacatgaatcaaattagttactctttacacttaaaagatctttctataccacatcccattttttgcaaatggtctcctaatatcagaatgatccccataaaatttccagtgtgaatacataagtctccctttattcacacatagatgtgtttcagaaaacttggcccaacaccgaatgacttgaaagcaattttggcttcctggccggctcccattaccaaatgctaccatggagagaaatccccttagaagactgggttggaaacgtgagaaatggcttggattgcctctggccttgtgacttgtgcctgctgggagtcagagcccctcccccaccacacttactgtccacagtaacttatcgtgaggccttcagccttttcccacttttgctaaaagttatttcatccataccagcgccctgacggcagaactctagcatgctttccgctacgggaatgcattttcagctgggattgtcttgggctctgagcagggtgtgtttcccaaatcacctgttacggaccgactccggcaggacagaccgactccggcaggcctagccagcgcctccctaagtgggtcactgccacacagctgtgtcgtgtaggtaccatggtggcttcctgcccttgctggcttcccatcagtactctgattaggttcccagagagcctgtctccaccttacagtgcaggatctactgtgcacctgcacatggtttcagctttgcacattttttaatggaagttgttaacttttaaaggaagtttttcaccattttcttcaagtgcattgttgctgtgctgatgagacagtagctgtgagccttagtgtggcagagtcctgctcagacgccaggccacatgccactggttagttctctccccggccacagcctgctttcagtttggtatcagcccaatgtcagggtagaacagctaaacaccttctgtgtccaaataatgatgctgtgagggtttgtttgtttttttccccgtagccaagggggtgatgtttcattttttaaactttttttcatgataaaatataatacagatcgagaaaacaaatgtagggcttaatgaatttttatagcgtggtcacactgtaactactgtccagttcaagaaataaaactgccagcttcccgtgtcccatgcagggcacagcccgccctcccttctccaagaaggcacttgcctgacatttgtggaaaccacttgtattagtccgttttcactgctgatgaatacacacccgagactgggcaatttacaaaggaaagaggtttaatggagaactcacagtttccacgtggctggcgaagccttcccaatcatggggaaggcaaggaggagcaagtcacatcttatatggatatcagcaggcaaaaagagtttgtgtagggaaactcccgtttttaaacccatcagatctcatgagacttattcactatcaccagcccagcatgggaaagacctgtccccgtgatccagttgcctcttacctggtcctccccacgacatgtggggaattcaagatgagatttgggtggggacacagccaaaccatatcaactcctttatgtgcactgaagtgcacattcctgagcactatagttctatatgtgtatgtgtttatatatcttttaaggctcttttaacctgcatgttctccagacatctctttatctttcttgctgaagacataggtggtttgacctgtagagctccccgtggtccagactttgctaattgtgtccccgtagtgtggtctacatgtttccctgatttctctgtttcctggaaattggtagttgggtctggggacaaaatcagtttcagtgtgatgttttttgggggcacaagaagacctcatagctggtgggggcacagaacgtccagttgtctctctttgggatgtggtcgaccatgacaggcagagcctgggtccgtccattccttagggctgccaagtgccgaggctcattcaagcgtcccttcattttttaaccaagagaaactcaccctcatttatcacctggttattcagcggtacagtgcatataggagaggtgggagaaatgcctgattctttccttttattacagttttccaaataatgagttgattgctgattgtccatcaaagatgacaaatttggttttgagtattgttatgaactcatgaacagaaacacatttgatggagtccctttgtaccaattaaagtgctcatgccgaactaagatttgctaagcaggacaaagatctgattcttcaattaactctctagtgaggtctgacataaattacagttcctctttcccccgtctctgccttggctctccactccaggcgaccactttatcaagttcttcgctccgtggtgtggtcactgcaaagccctggctccaacctgggagcagctggctctgggccttgaacattccgaaactgtcaagattggcaaggtgagtgaaagcccttattaaactggaaatggactgctttgggctggattaattagcagagtggcccattattcattccgtgtgcaaagtcgcaaacttgatttattaattccatttagtgtgccacttgataattcatttcaccttcacagatggcagtctgattttgagttttgctggattttccacagcctagagataaattatggcctcggctgctttgtttattttgaagagatggccaaatctgaattggcagccccagagcccgttctgcaaagagatggggtagagccttgtagaatgttcactggacgaacttggagaccgtccacgttcgacctcacccaagagctctctctaaaaggaccctggctctgtgctcccccaagcacgcagaagaccctccctcagtttgcactgtgcctgggattctttccagcatttcctactttatacagagaagccaagagtggtgtctgacaacttctgtgtaactggattttctggaaatatccagtgtagctccagggacatcacttttattcttctacactttccagcacccaccagacaccatgcatagatttcctttcttaaaaatctcatttttctaccttgccatggggctgatttgtatccaaaagtaatgctgcgtgtctaggactgaatgatggttaacaggatgatctaattgggatggtgagatggtcaaaagcataaacttgggggttgggtagacctggctggctgaccttgggaaaaacctctccacgcctcggtctccccctttgcaaaactgagctaagatctactgtgtggtgtctgggcagatgaaagtacactgcttagtgtgatgcttagcatggggcagatgcttggtaaattgtaatcacttttgttgtcagttaaatggatatttcactgttgcctcttaaacgcttacgataatatatactaattatacatgttattatcagtttatatttattgaacatttcggggaagtaattataaaataatcttgtctactgtcttaccccattccttgtatccttacttaattattgtatgaaaatttatgggagattcttttaggtttatatccatagaggatcctagcagacctaggcgtgagcagacacaagcccaggtgaccacgctgaagcccttcatccctggcacatgtggctgggttacactggacccttaaaaatgcttgtcctctcccgaccttgggctgaggcctcttgtacttcagttccgcaccttagctgctctctgacgggtcttaggtgttgaaatagtatttttacccccgtttgctgacatagtgaataacaacttagtcctgcctattttagtgctggtagaaaataaaaaagaaagcaatgacttagaacaagatgtttcatgaaaatgttgggcaagcagcagctttatgagatttaaatgaaagaaaaagcttgaagagctgtgcttgttggtaaattaagtttataaaattaaggacggattataatcttgacatctttgcagtcttacctttattatataccaactactcctgtttaaaattcatttcttgctccctgttgattttaaaaccctctaagcttcagcatgagagtaaattctaagctggcatgtgaactggtctgggtcccagtcaccgacagccaggctaacccccctcccaccaccaccaaatgtcaagccagggccctgactccagctaccaggtgctgactttacttgctcgagttaaaatgttgcttcctaaaaaccggcatgtttaactgagctattaatacaataaatcttgcctctaaagtctttcctttactccttttagctcaggtatgttttagcatagctttcaggaacattctcttcaaaaactgcaccttgctggcagagttgctacagaatgtggattttgaaaagaatatttgtaacgtacaaagtgtccagtagccccattagcaagaaggttcatgaagaaactgactgggaagttgatctgcttttattctcaggttgattgtacacagcactatgaactctgctccggaaaccaggttcgtggctatcccactcttctctggttccgagatgggaaaaaggtacgtctgcacttcttagtactgagaattcttcatctcttaaccccatcaggctgagctactgagtggtttaatgggcacagtgaattgccaatcttgattgttagggcactggtttggagaaatgtgtataatgaaacaaacgtctttctcttaattgataagatttgggttgtggagatgaaccttgaaacatttcagtggcccaggttatcactagaataacccacatcttacagtcacagggtaactgtgctctggtcgtaaacacaaaccttcaggcctttgaacagagctaaggcttgcacttggtccggttctgcctgcctccctccctccttccctggccgatggtcagcagctcagagttccccatcagcacaacggcttgctggcaggcctctgccccagacttctatgatgtgtaaccccgtggagggaagaggggcctgtacagttctctcaccaaagccgaggcattcagttatcctctctacattcccgtctaaatatgaacatgcagactttgcaccaccgctaagacatctgggagctctgacccgggcaagcaggggttgcaggaaggcttaagtgattcagaacacctcagtggactcactcagccgcgtgcccgtgtctcggccaggtggatcagtacaagggaaagcgggatttggagtcactgagggagtacgtggagtcgcagctgcagcgcacagagactggagcgacggagaccgtcacgccctcagaggccccggtgctggcagctgagcccgaggctgacaaggtgggtgcctgctggagtcgggatccccataagtggcccgtggcccccggccccccacctccccaccctcagaggcctcctcaaatgctttggacaaaatgacagtttggggacacagtcatctgatggttggctccagttgcgttttcaacacgtatttttcatcgactttcacatgctttcaggggcgaatgcaaacaaaagctttccttttgaaaacatgaaatggatgtgagacaaatcccaagacaatatttggtgtcaaaaatctctagagaatccttcctttccgcttcattcattttaaagaatgactctgctgggcatgtttctgctatgaaatctcgactgctggccccggggccctgattctattcctgaccttgctccgggcattttcctttacccgttgtaaaggcccctagaagacctgtagccaagagggcatccgcagcgatcaggccagtgactgtagctgtaacctgcctaggcagtcctgatgcactgaggggcttccttccttcactcaggtagcaggaggtttcagattcatttgttctgctttatgaagcccttgttatgtcacaggcactgttctaggccaccaggaaataaaaataagaccggtttcctgcctctgaagcatacaggtctctgaggcaaatggtgagaagacacacaagccaatggcagggggctggggcagaaatgtgtgcagggcttggctgctagagagaagtgggggcaaatgggcaagaagtgtccctaaagagctgattgacgggatctgtgctggacagataggctgggcagggctgccactgaggggctgcaccaggagaggcacaacccgagaatcagccggcatttctgcagggccagagctggggctgggggaacacagtgggagacaggtcagggtgtggtgtaggatccctgagagtgagagaggagctggagttgagagtctgtgggcagctggccaaggattatgaactgtatcccatattgacagggagcccacggaggctctgtgcagattggagttgtaggaaaatgaccggcatgcacgtgtgctggaggtgggaagctgctctattaggcctttaaagatgatgagttccctcatgctgcagccgtgactgtgcgatggcgaggaggagaaagccagcataaggagtccagccgctgtgcagcgcggaggagagggagggagggtccgaggcgagtctgattcccgcatatctggtggaggatggtacccagcacaggggcggggccagagctcgaggaaagggatgagcttggttttcaaggtgttgatcttcaaggctttcggctgtgtaggtggcagtgtccagtggcagttccaaccatgagcctggggctgcggcaggaggtctgcactggacgagagtgcccgtgtcatcctcttcaggtagaagtcatgcctgaaggccaggagtttggatttggaaaaaccagtggggccaccaacccctcctccctggtggggccacaccaggcctcctcacccctacaaccctgtccctagttgggctcttgtaggtcggggatggcctgagtgttgtttaaaagttgacgttttggttgaagaagtaaacagctgattttgtagttgtcaggaccacttatgttagaggagtgtatgtgtcatggtggttacaaaggtcatcccaaattgagtataattatacaccacggatgttttcatcgcagcaccatttctatttataatgcagttttccaccatgaagtgggtcttttcagtgcgtgtggcgtcatgtttctggacataaagatggtagtgttccacagtggcccccttggcctccgtcactgacatgttactcgatgccagactcaaatggagcagccctggtacacttagccacgtgataaatcatcccattcctgctctcaggagagaatcgcagatccatttttggagaaacacatagacgtcattctgtaaagaactgtcaagggagaatggctttaaagcagactaccatgtagcacctttcccttaaattctccagccagagcttccatcagcgtttttcacattgacttagaacaggctgctttccatttttatgttcaatgtaaaacaggtatcattgcctttgctattgtaactaggttctttctgttgcatagagaggatgtcacaaagggtgctaggagaatagggtggccagtgagaaaagcggctgaggatgagacttcagtgggtatcctggagactccaggcttagaggtgcagactcaagtgtcggacacccagggctgcctggtccacaccacagcgccctggagagttttcaacctgcctcatccccaaaagacagtccccctccccaccttcatcccctgtacagtatccagccacctcctcaccacatctcccaggcttgggacccagggacttgcattgatctctctgcccttcagaggctgccagcctccctttgtgtgtagcctatgaaatgcagattgtgtaggtatttctgtgtgaccttggagcctacgtaactgcatttttaaaaaattactgattcgtgtatctgcaatcccaaagcatggccctgctcaactttaagggatgtacttgaactgtggctttttcctcccttgaagggcactgtgttggcactcactgaaaataacttcgatgacaccattgcagaaggaataaccttcatcaagttttatgctccatggtaagtggctgtttaattagaaactactttgtccatgtgtactaagtcacatcatgtttttcagctcatctgccacccctccagactcaatgttgggcacatgttacatttatatgtaggtcatgttgtaggaaataaggaaccgttatcatgctcctatattcaaatattttaaacttcaatggccttaattatatatggagaatgaggctacagttatatcaactttgattatatatggagaatgaggctaaagttatatcaactttggagaaaacataaaaatggaggcaaattatgatggccatattcagttttgtggtatctgcacttttccaaatagatggcttttctttttggctaaacaatgagtgtcatgatgtagctttgctcctcggttcttttaagtactcggatttcttttgtagagaaatccagtagagtctgttagagccattcagtatgctacgcagtttcctgaacctgcatgccacgtggtcttggagaccagagcagaaatggattgcaggtagtgtgagatccagacaaccttggttctaagacttaccgtgaatgactgtatagtaaacttggatgtcctttaattcctttgaaccccagttccctcagctgaaaaatgggagtaactttttgtcttcacaaataaaacaatccatttggaaaagcagagtgttaggacaacagtagattgtttatctaaacatgataaaggcgtcacttttcttgtttgttacactccacatgttcctgagaaactaaccataggggtaaaaagttaataagcacaggacttgaacgaaccatagcaatgcctttcaaatcatttgcaacatttaaaaacctaaagctccacagatcaagtatcaaaaaagaggatcccctttggctgaaggggagccatccatacggcaggagggggtcagaagagacaagggaacagagtcgggtagaagggagggtttgaaccaaacttaatcatggccttgattctcaccccacatcgctgaagtaccaaggaggccttaaaatggttttgaaattgtgagaccataagcaatcaaatctaaaatgtctttggcattcaagtgaccttttagaaattgtgtggcatctgccctgttccctgttcctctgctcctgtgctttcataaaccagttagcacagttcaccatggcatggaaatggtctcagaatctcaacttgttttgagactggcttgcttctgtcacattatctgaaagtctaccttggatcaacttttgggttcttcatttgggataggaggaggaagagttaatgtgcacccagtgggagaatttggtattttacaaatttctaggcaattgttgactgtcccatacagaagaaacagagcttgtcttggcagcagagtgtaggtgaatgatctcgacccaggatttcaacgaagctgccatttttctcgtcttaggtgtggtcattgtaagactctggctcctacttgggaggaactctctaaaaaggaattccctggtctggcgggggtcaagatcgccgaagtagactgcactgctgaacggaatatctgcagcaagtattcggtgggtacttggatggatgcttatgggagctctcagtatgggggcagatcccaagggaactgtgcctcaaccacgataactcactctgctctcatcttctcaacaatgtggtttttatgtccctttgagttgtttgtttggagaagcaaaagagatcctctctcaaagggaaggcattcttcttcgcccgctttgtagttagtatccatgtttcagtgcaggttttcaggccttgctgtctgagtaacaaggccgtgaagtaacagaccccacgccatagactgtggggcttcccacaccgcgactcttgatgattgaccagtggtctgtagcctttgccataaatacccgagtcgctcatttttcacacataagccagcattataaaatgcagtggctgaatctaagaatcatttcaacataacctcctttctgaaagggccatgccagcaagtcggtcctgtgcttgggttaactactgccttcattccaagctgttagcacagtctgatggcctggaagatttgtcattttttttcttctttgttattcagacacttttggagccctttagatggagaatagacgtaacccagacatagtttccttatcattaaaagataccagttgttttttgtgccctaaaattcttagaaacgagttgccactgaaacatgtatcctcaagaggatcttgctctcatggtctggtctgcagaccaccagggcatcgccagggaggtcattggaaatgcagactcccaggcctgctcaatccaaatctgcaccttcagcagatccgcaggtgatcgtgtgcacagtaaagactgaaagcgtctgctttagggtaaagtcgttcctttgaggctgatctttaatgatgtcattttgaattcacaagtgaacacacagccccacggctgtgctttctaaacagtagtctgctcctgttttaatggaatatacacctttaaaaattagccacagaatttttccagccacaacggtaggagtgtatctggttttatttaggaagcaatttgcatgtgatctggaccgctggtttgcaaacttttttcttttttgttttaaggtacgaggctaccccacgttattgcttttccgaggagggaagaaagtcagtgagcacagtggaggcagagaccttgactcgttacaccgctttgtcctgagccaagcgaaagacgaactttaggaacacagttggaggtcacctctcctgcccagctcccgcaccctgcgtttaggagttcagtcccacagaggccactgggttcccagtggtggctgttcagaaagcagaacatactaagcgtgaggtatcttctttgtgtgtgtgttttccaagccaacacactctacagattctttattaagttaagtttctctaagtaaatgtgtaactcatggtcactgtgtaaacattttcagtggcgatatatcccctttgaccttctcttgatgaaatttacatggtttcctttgagactaaaatagcgttgagggaaatgaaattgctggactatttgtggctcctgagttgagtgattttggtgaaagaaagcacatccaaagcatagtttacctgcccacgagttctggaaaggtggccttgtggcagtattgacgttcctctgatcttaaggtcacagttgactcaatactgtgttggtccgtagcatggagcagattgaaatgcaaaaacccacacctctggaagataccttcacggccgctgctggagcttctgttgctgtgaatacttctctcagtgtgagaggttagccgtgatgaaagcagcgttacttctgaccgtgcctgagtaagagaatgctgatgccataactttatgtgtcgatacttgtcaaatcagttactgttcaggggatccttctgtttctcacggggtgaaacatgtctttagttcctcatgttaacacgaagccagagcccacatgaactgttggatgtcttccttagaaagggtaggcatggaaaattccacgaggctcattctcagtatctcattaactcattgaaagattccagttgtatttgtcacctggggtgacaagaccagacaggctttcccaggcctgggtatccagggaggctctgcagccctgctgaagggccctaactagagttctagagtttctgattctgtttctcagtagtccttttagaggcttgctatacttggtctgcttcaaggaggtcgaccttctaatgtatgaagaatgggatgcatttgatctcaagaccaaagacagatgtcagtgggctgctctggccctggtgtgcacggctgtggcagctgttgatgccagtgtcctctaactcatgctgtccttgtgattaaacacctctatctcccttgggaataagcacatacaggcttaagctctaagatagataggtgtttgtccttttaccatcgagctacttcccataataaccactttgcatccaacactcttcacccacctcccatacgcaaggggatgtggatacttggcccaaagtaactggtggtaggaatcttagaaacaagaccacttatactgtctgtctgaggcagaagataacagcagcatctcgaccagcctctgccttaaaggaaatctttattaatcacgtatggttcacagataattctttttttaaaaaaacccaacctcctagagaagcacaactgtcaagagtcttgtacacacaacttcagctttgcatcacgagtcttgtattccaagaaaatcaaagtggtacaatttgtttgtttacactatgatactttctaaataaactctttttttttaaaagtctggtctttccttcaatgttacagcaaaacagatataaaatagacaataaattatagtttatatttacaaaaaaagctgtaagtgcaaacagttgtagattataaatgtattatttaatcagtttagtatgaaattgccttcccagtacatgattgtgaaaaagacatttagaaaatattctaaaatttaatctgagcctcactttctacaagggaaatcatgatttccgttcataaacagcatgctcatccccctaacaccattcttataagctgggcaccctcattttattttcttcgttggttctaaccctgtggcgtggtatgctgtatagtaaaaaggcagagaaccactttactgaaaaggtactagagccggcagtccagaagttaatgtgctggtcaaagaaccgttctggtaaagaagaggtgagcactgccttcacgtgttacacggttacacaccccttgtagcctcacctcagtgtaatcagtctacttttggtactagcaaagagtacagcaaatggaggattgaggtgtagaaatggtatgttttggctgaaataagtgtattttcacaccaacaaaactccagcacgaacatacaacagcaatgactgagacaagggcgccccgtggagccctggctgtggcctgggctgtgcgtcctgtggacttctgggaatgaactgaacagaggcgttccccccacttccccgatttctgttctctgtaaaatctacctttgatagacagtactgaaccagctgatcctttagccaagaatacatttaactcctttgagattattttccctatttactaacaaacaccccaaatagcttgatctacagctaaaactaattttggtgggtttttgggggaggagggtaggaagagcttcacggttatgtttctgcagttaccagaccttatgctacagacatccaaactcagcttgctacagaccaacaactactcacgtcatttaccaagtgagcaaattattaatgaggtcctttaaaatcttcctgggtaataaggcactggcatgagatagtttcaaagtctcatcgtcccacctccaactgtgcttccgtgtttttttaaggcagatgtaatctaggaatccaaggcagaatgtgtgtccccagcatctggtttcgagttagtggcatccacaagctcttacaaccatattcctgtattttttcagaatgacattggagttgtcatcaaagtaaagaaccgagatggcatttagcttagttggcgcacagcacggtttggggacatactcggggttcataaggtgaacctgttccaaaacagaaggggagaaggtaccttagaaatgacacctggtcttggcttactcccacttacaaaacaaagtctccgagagctcaccaaggtctgcacaatcgcgtggttggttgcattcatgtgtgcgttgagtgggaaggagcattctccatcacagtaattggcagcatagcccttgggtgcaatgatccagtccttaatttcatgcaaaggaagcaacaaaagatgagcatgcacttctcacactatttgtgcttttcaggaatgctgtgaaaaggtatttttcacattgcacaggcaaggatacagacgcaggaaggcttaggaatttgtccaagttcacattcaagtggcaatgctgggaagtgaacctggtccatctgaccccagagccctcgctccttgcagaggcccacagggcctcagctgctacctggaagcacgtaggttgccagcaatatgtgcttggacccaagcaagcctctccaggagcccacggtgctcctgcggaagtagtgccacctgcatatggaagctaccttt

SEQ ID NO: 751 - DNA, 3640 bp, Homo sapiens
caaggtgggggattgccagggggagaaaacttatttattgctgtaagacaggacccctcctcccaacctcataccccaccgcacaccagagctaaattcaaagctgaaaggcgcacgtttctatacctacattcattcctgagggaccctccagagggtcaaggtcccagccccaggcagccctgtcacagtgagaagtagttcctgtccttaaggaatttccttctaatccaggtgcttgggcaggaacccgatggccttcgggtcaccaaggctgtctgggagggaggcacagggccgccctctgtgctgaggccgtggaggaagccaggaggagggtggcttgctttgcttccttgtctaattagcttgcttgaagatgtggccttggcagggagccagacccatggggccaaggaagaggaagagcatcctcaatagactcactcccccttccttggtctccacgggccccgtggactgagggctgcattggggtcttctgcctaggggaagtgctggacctgagctggagccacttggcttagaagccacaggattcacttttcactggcctttgcagtccccaaaggatcaggtctcagaaccaaggctccaaaggctgaggtctccccagttcctcctctcagaactcccacagtagctcagaggccgggggtcctgccaactttcatttggaaagttctttcgaacatctaaactagatctatcttagggtttctttctctcctagataggatcagctcccagccctagccattaggctgctggtcctggcgggggatggggtcccctcgttacccagtccttcccagggacccaacttcctaacacaacctggcttggacatgaagaccctcccccaggttaccttgtaaagagtccctccagagctgggatcccatgggcgcagcagcacacccagctcccatgcgtcactccctagctctgtcccagcttttgctatcattgctgacttttcctcctgtggctcatctctgtccctgctctctttgaaaacctaaactaccaaggtgtcatgctgcaactccctgcccagtcctgcacaaagccttggctgtgtgtggcaccccttgcctcctaccccagagcagctggctccattggcttctccctgcaccagccctgtcctcaggggtcaggaaaaagcagcacagctttctttcctctcctccagaggcctggaagggaggtggaggtccagtaagggcctggctgccttggatttcttggtcctgccttgccaactgcaccctgtagctcctgctccctgtgaccccagaaccagaggtgctgccttccctgtctcctagacaaagcacaaagggatgccctgcttggcttgagcctgcccaactgaaggattttctctgccccagggaccttccatccctgaatacaaggctctaggcaacttctctctgggtggtacacactagaatgcctggcattagccctagaaaggaggttggggtgtatgggtagtgagctagggtgggagaaaggtggtgctgaaaggacagatgctagttgtagtttcactcactcattcattcattagtgcaacagtactgagcaccacctgcactagaggcagaggggtgaacaagatacccttctgcctggggggacgtccacttcccatgggtttggctatttccaggaaagcccctcagtcctccaccctgttctggctgtgtgtgaaggatgtgtgtgagcaggcccaatcctttgcagcaagaatgagaggtcagagtattccattgcacacgcaccctggggctgacagacttgtgccccctagccttcatgcatgcccaagcactggcagctttgcagcccctgccccaccagccccttgacgctcttcttttgttctctcctcggggatgagctctgctgctgagtagggagcttttgcttgctgggaggctctatgcatggatttttttggtgaccatacagctagggctgaggatgggaacagggacagagggcctggctatccctagaagcacttcatccatctttacccacccaaacgggatcccttcacatctcatacccagtaagatgcaagaaaggaatatctgagagcaagcagccctgctccaggggccccaggtatgtgtagaggcccagtgggggtggccacttggtgtttctaccaccccctgccatccagtctggccccagtacctacctgggaggttggtgtacttggcttaagtacttcatgctttattcaggctgcttccccacagcaccggcaggaaatgaaggtgcacttatatgcatccctgcaggaataaagagtgggtggcctgcccagcccagcaccacagcctttccccagccaggagagaccacctaaggatcaaggcagctcctgttttcttggttctgtgacactcgagtctgagccagcccctcaggaattgcctcaaaagagaaaaacaaaaaaaagtcctccttcccaaggcctgctactccaaggtttggctccatcccttgcctttgggtcctgcctatttccccactcctggtctcttatctttggggccaccagtggggagtcacccgggccccaatccctctaaggcgctaagttgaaggaggccttcccagagtgactattggtgccaaagtcccagttcctgttggacttggggtaaaaacaggagatggtgagtgggtgtaaggcccaaatgcccagagaagttaactcgaacccatgggacctgtcccagcctgtcagtccctgatgagtgtaacttccttcccctgggggcctggcccttctctccaacccagtggccatgctttctcacccagccttgtgcccggcctgcatttctgtatatattgctgtgtattgtgtgtatgtatgtattcctggacaagtgtgttcatctgcagcccttgcctgaggataaggtttaggattgggtaaagatcagaataccagggccagctaaggcaacgactccctccccaaacccttgggacctcagccagtcccaaggctgccctgacaatcaggcaggctccccaccgtgagccaagcctcctctgccactgccagcatggcccaagggaggcttggccttgcgcttgccagcctcagctctgccctgacaagggtcttgtatccagggcagaggcctgaggtgacccaggcttgctttgtggctgatgccagcaggcttggttctagtgggcaccactggtgggcaacctccataactggcccttaggcctaccttcctacacagctaggctataatgggcctgagtgagagggtagcttccccagccccaagcacaggcagaggggtggagagcaatttttggttttatttttgtttctgaagtggtgcctgtacctccagcccccaggggccttccctggccacacttctctgccccacccaggcatcgccatcccagcactttgctccatgtcacccgtaagatgccctttgctgaatgtacctgagtgtatgtatttaaaaggactcacatgggcatcagagaatttatggctctgtatccaataaaaaagatggtgaaactggtctatctgccccagagaggt

SEQ ID NO: 752 - DNA, 19447 bp, Homo sapiens
aatttacaaagttatctgaagtcttacattttatttaaatagcctccagtaagaagagagtgggccaattactaccccttccttgtaaaatgaagtaaccaagccaaggagggtaagtgcacccagcagccagccagccatgtgatgggtggggtgcctctcagtgggggcggccacgacacggccccggcctgctgctgtgggagcatccacagtcgagcgggggttcttgatggtttcatctacagacacgatcaggcacgcagcctcagaggctgctgtcagcgcattgatccgcaccatagctggctcccacacgaaagcttcaaagttgtcagcaatgtcctcgttgttgatgtctactccataccatgtacccccctaaaagagtaggaaaagaaaggaggtaatatggaactactttcaactttcctcttgtaaactggtactccaaaagacactgctaggaacccgcagactctctgaacttggtggcatttcgctgaagaatactgcatcttcctatgagcatgccaggaacctggaaacacccctactcccgccaactcctccccttagccctggacataccacacaagacctctgggatcttctcccaggcaagctgttgtgttttggggcggccccatcctcaggtcacctgaggactatatatatatatatatatatatatatcaaacaatgagttctcaagataaacaggaataacaaaaatactatcccatctttcatctcattgcttcaaatagcccgattttacagatgaggcaagtgagacacagaggtaaagtgactttaagcaaaagtcctaatacaagccagaagcagggtcattcactgggtgctaagcacttaacaaacctctatctatttaacaaatggagaaattaaactctcagagaggttgaagtaactagcccagggtcacacttgtagggctctggagagcttcaccacaccagtaagcccactccatgtggtcagtatgtgcttccaggaaggtggatgcaaggttcctcctgtggtaccataagaagcaatcatactctttttttttttttgagatggagtctcacactaccacccgggctggagtgcagcggcacgatctctgctcactgcaagctctgcctcctgggttcaagcaattctcctgcctcagcctcctgagtagctgggattacaggtgcccaccaccacgcctggctaattttttgtatttttagtagacatagggtttcactatgttggccaggctggtctcgaactcctgacctcatgatccgcccacctcggcctcccgaatgttgggattacaggcgtgagccaccgcacctggccacgatcatactcttggtagaagcaatgaagaaaccctggatctcctgtgctagcaccatggctttccttctgccctcagaggagggagttggtcaggcagacaggctggggggagttgcagcctatctcctgggccaggcgtgcacagcttgagtaagcacagctcacattcagaatctagccccacccgcccaaaccctgaaccctggggagagaaaggacccacctgggcatgccgagcccgcagcttgttgagaatgtttgtggcatcaaagccagcattgtcacacagctggcgtgggataatctccaaggccttggcatatgccccaatcaacagctgctgttttcctggaatagtccttgagtaatcccgcaggtacttggagagttccatctcaatggccccgccaccagccaccactgaatcattctgcagagatcagaccacctctcaatgtaagagggcccctggtccaagcttccatgctgggccactcagtaggtcccttcagcccagaaagagtggttcttcattccttcctccatcccaagccccaaacgcccagacacagcccctatctagaacatcccaacttcaacctggtgaaccttatggtttctgactattttcaaggtcacctgcagctcaaggacactggcacaattactggaatatctgactacattagctccagtttgctaacaaaacgaagtctttttcttctgcttgctctgttgcccaggctggagtgcagtggtgtgatcatagctcactgtaacctccaactcctgggctcaaggcatctttccacctcagcctcccgagtagctgggactgactacaggcacatgccaccattcctggctaatttttttatttttgtagagacaggatctcgctatgttgcccaggctggtgtcaaactcttggtcttatgcaaccctcccatctcggccttccaaagtgctgggattacaggtgtgagctaccacgcccggctaaaagaacaagtcttagctttcaaggcaggatgacctatttttgagaaactgaggctcagtttctctaccatttgtggggcaaatcagggctcaccacaccacccaggaaagggcaggttatatagagaaggaatcaccacacaaatccaaggtctgatcagctagggagataggagagagtaggctgtgcaagcaggaggatatcagcccagtaccttgatggccctcctgacgatcatgatggcatcatgcagggaccgctctgtctcctccataaactgctcggcgccgccacggagaatgaaggtgcatgtcttggccttggggcagccagtaaaaaaattgtacctatgcccaggattaaacagtacacacatgaactcttgtctgccaccatcctactgtattgtcctcactgccagcccccccaacactcagcagctgctcttacattcttcactcaggttacccaatcccaaccttatagacattttcttggaaaggtctgcagctgtaccactagggcataaaagattgtggagtcaaggcttttagatcttcctgtaatcctgtatattatctgagctctttatggctcaaaggtgagactctgtaaaagctgtataccactttgtacacaaaggtgagactttgtaaaagctgtataccacagccaaaagatggcagaagaccagacccaggcaggtttgtgagctcggcctgggcccacggctcacctctcgcctccaatctgggtctcttcaaacacctggcatcgacccagcacatctgctgacagagcattcacactggtctggattgagcctccacaggcctagggagcaaggaaggcaagatctagcagtgaaggttcccgaggccaggcagcttcctgccacctcgtctcaaagccaattcccacgcatgcccccagagcctctacattacccgccctttcccttgacttccaggcgacccttccccctctctgaaagagcaaaaaaaaaacaaaatagaactaaaacacatcaaaggcaaacagaagaagttaaaaggagatagggacccattcaattcagcttatactccctcccctaaactagggtggcactgggtccagcaactgaactcaggagtactttaaacctaaaagtatcttttgtgggatgctcatgaaagggaaaaaatctggctggaagaatcaatatttgagtttgtccagctaatcatagcattactgctaggttctctcacaaaccagatttctggacttgttttggttagactaaagtagtttgtgctactgggcacacacacatggaaatggaatgtgtcctggaaaaaaaagagttaaaaaaaaaaaacagggctcaattcacacgccaacctgacagtacactctgttataccaggggtcagtgaaaacccttcagggccacaaaggccgagaagcagcctgtgaaaatctggttaccatcattgtcctcttcagatcctcctcaggtactcggccagcacagaacatgtccctgtcagcaaagtactgggtggccacatccccaatggggagtttggacaagacaactttggctccagaatgatggatcttctctaacttgtcatagagaatgttccactcagcatcaacaattgcctgataatcctggagagacccagaaaaggatgagaatgctttggggtgaaggttgacatatacggtagggtaaaatatacccatctgcccccaccaaataaaacatgctgattcatctgggaattaacagagataaacagaatagctactcctcagtccaagcaaataaggaccccatgagatgacttaggaatcacctgaaactccccaacacaaaagcagaaagtaaccccaaggctgagaaccacagctggtgctgtccagatgcgagaaatagtttaaactggctgaggtctagactcttctgaggtgctggattcatggagttcccaataagacccctttggccgggcacagtggctcatgcctgtaatcacagaactttgggaggccaaggcaggtagatcacctgaggtcagaagttcaagaccagcctggccaacatggtgaaaccctgtctctactaaaaatacaaaaaaaaattagctgggcatggtggcacatacctgtaatcccagctactcagaaggctaaggcaggggaatcacttgaacccaggaggcagaggttacagtgagccgagattgcaccactgcactccagcctgggcaacagagcgagactccgtcttaaaggaaaaaaaaaaaagaccccttccccaagaactgctcaaaggtgggtgacatggctacctccagaggtagcctgggtaacatcaacaatgagagcacacctgtctctgcagcactaggtctagtctagaagtggaggaactcacacttgcaccaacaagaggaaccaaaataccgggcaggctatgtagctagagagtccctgccatccccttccccaggaccacagcgtatttcaacaggtgttccctatccaaatttcctcaggtcaaggtcactcagggagaacacagagtatggaaagaagggggcctagtacttagacatcaatattcaggggggcaggaagagaaaggggcccacaatagccatgaagacccagggctctggctcagaaagctgcccatttccatgcccccaccaactggtgaacccacctacctcaactgtgtggactcttatctcagcattgtctttctcagctttcaactcgagctcgacattcaaaagggcaatcttgggattgtggtactttttgggttgcatttcaaacccagcgtaagagaaagtcttcttgaatgcaacaccagctaccagctgagaatcctgttttaaaaaaacaaacactttaatggtttggtactaacatgaaataaaatcaagctagttgtttgctggctagtgcttatccattcctgtgagcctgagctaatcatgtctttatttcactgctgtaacacagcctttctgttatcataaaatcgaagacaaatccttttttttttttttaaataacacaacatattatttcagtcaccccttaagcataaggaaaatcatctggttagcagaggcaaagcatggtaaaggcctactgggctgtcctctaagactggcctctgcagcactggccgatggataatgctgtacaaacttccaaaaagtatgccagaagaggagccaggtgtttacaaagaaggcaaaacaaaagctgtgcaatgctaccctcttctatgccccagctcccaaatctcaagtatcctcctgtacacctccatgtacccataatttgcactgcaccctccacccccacacccccaacagcatggatactatagccttgacgcttcctccctccagaagatgatgccaaaaggtcttaagaatcagaaatcccctgcataatttctaagctatcactgcagctcctcagacctcaatccctcaaggtagggatcttctaccacttgttctgcaacagagcttctctgtgggttggatttaacagcagggcataatagaaagcacactgcacccagggctgactcagcactaccgtgagacttaggttccaatctcagatcttttccttactaaatgaccgagtcatttcccacaccataaaaaagggtattcagttcaataacctttagtttctctgccagtgctcatctacaattctaatctataatactgtaacccatgggtgaagagtatctgtccccagttcctgcatcattcaaatccacagcttcctaaagggagtgatgcctgagctgaatgacagatgagcagaaattagtcaaagagaaaaaaggaaaaaaggggttctcctaagaggtgggaggcagtgttgtggaatcagagaatgaaaagccatttgaagttgctagaatttagagggtaagaaccagccagtgaagaagagagaggggaagtaggcaggggccagtttagaaggatcttacaggctttgttaatgcctggctttgtatagggaatgtagatatcagaaggctttacgcagaagaataaagtaggaaacttcaccctgcaaatagtaaataagtacaatggatttaggggatccaagactggaagaggggtggcaatagtaccagaaagagtaaaagagacagactcaataaataattaggaaatcacgaggtaaaatggaacaatggtaattgacaggctggagtcagaagggttttcaaggatgatcccagatttctggtttgagtgactgaataaacggtggtgacaccaactatgacaagaaatacagaaaatgctatcacaggagtggaggacaagataaagcgtttaacagcagttagacacaagaaagagcatgaggctcagaggagaggtgagtactaaagatatggatcagaaaattcccagttaaccctggtaacaagtaaataatcactaccactatttattgaattctgggtcaggtttgtatgtatttaacgaatgtaggacagtctcggaaaaacgcaagtgtggcttagagtccctggctctcttgccaggtaagattattagtcctgatttctaatctatgtagattagaaatggatgccatttctagattagaagtggatgccaatctaatctcaaccatttatggaagtaggaaggcccaagagaagatgaaaaatcgctactaaagcagtgagtaaagacaaagtcagcaagccatgatgaagatagggaaatggctcagatgacctccaggttcctcacagctttattacatacagagaatctcagcccactggtctgacatgtgccacaataggaggggaaatggcaaagtgggaatgcaatttgggagggtaaaatttaaagagaagggccaggctatctttcaagctggtcctcctctatccaaatcgcttcagttgaggtcactgacgaagagtaataagtaaagcaggccagagactgaaaaggccaaaagcagcatggagataccaaggacgtttccagacagatactactgtgttaaaaagaaggagttgtgctgtccaagacagtagccactagctacatgttgccatttaaatggaaataaaattaagattcagttcttcagttacattagttgcatttcaggtgctcagtagccaagtgtggatggggctatcatattggacagcgcagatatgtaacagtcccaccaccctacagaaagctctactggagggtgctgagttaagagctacacacgctaatgtggatcaatttctaaaatatgttgttgaatggacaaaagcaagctacagaacactatataagcaatcttttgtctttaaaaaacagtatttacatacatgttcatatatgcacaaagtaattctgcaaggatacacacaaactaatagtggctgtatatggggcaggggtagtgcatgaaacacttttaactttaggccccttcacagtttgaaatatgtatcatctattcaagataaatgaatgaaagaagggcaagcttaacagtatcacttaggagtaagcagtgaactgaaaaatccctctcagatgtattaattgggaggtcattgatgatttgagctagtcctactacccctccaccacccactgacacagagaacctgagattctgaaaatcatacagtccaattttctactctgctgacaaataatatccacagaggttaccaagttcatctagtaacagcctctaatggcagtatggaaagtacaatgtaagtctgacttcctgcctaacatgcattctctttattcctgtaatgagtacccctctgccatatgaagctgtctgaagggtcaatatgaaagcaagagctgtctaggaaggccacagcaggcttacctcgagggctccaccctgtaccttcttgattccaatcattttaagctgcagcaaatcatcgagcatcatcactgcatccaccaccatcttagcaaagaaagctttctgctgggagatcagcttggagctcagagcggtcatggcacacttttccagcagcttcctctgctccctgggacacaagggcagaatctgcatcaggtcttgaaaaccaaatccctcttatctgattctactacagtgtggaggtagttcccttccagtctctaaactcagccctctccaacttcaccttttgtatctttagggcagattatcagtgacagatggtgactgcagtcaaagatctcatatgtggcagcttttaaactacagtcgacagcttcttttgtgctctgtgggctgggacacagccaagggtctggcaggagccaaacagccccaggcacatagagggattgcagcatgcttctgcatccaatttggccacaggaagtcagtcaaggttctgacaaaggcctgacacggtgactcacacctgtaatcccagcactttgggagtcgcaggtgggagatcacttgagccagtagttcaagactagcctgggcaatacagcaaggctccgtctctttaaaaaaaaaaaaaaaaacccactacagacttacactttatctgccttcttcacggtcacagcaatctctttgatcttgttaactgcctgccaagaacagaagttgaatgagtctctcatgctaaagacaaactgctgaagtggacctcaatctctcaatagtcctgagtctgttcactcccaaatcctaagcatttctactctacagctgaaaaaacacttctaggtcttgtaactgctcagaaaaatgtaaaactctatagttcagaaaattccaagtcagaaatgcagagtgggtatacagttctgaagaatcagggtgcttccaagattttgctctgggtctgcaggtaacacgctacaacgaatgagtggaaacagctgtgacacgagattaagccaaacctcctggtttactaaaaacacctacgacaacttctagcactttatatattagttatatataaaatatgcatacaaatatataaactttttatttttttccaaagtactcctcatatattatttcattttaatgtcaccactcaaattagagatagcaaagaaagtaaggcctagaaagattaaatgacttgccccagatcacaaatgaaggttagagggcaaataatagctaggtctcaatatacaccatgaggtgcttgagtatagcatgtagtagtagtatgccatgagtctcttagtccttactaaaagactatgtctacatcatagtctaccaggctgactctaacctgaggcttaaagagattaagtaatacacctcatcaaatggctacagattagtagaactgagattactaaggagatgtcagaaaatgcccaaagtaccctgttccccagtccctccacactcctgaaaagaaattccccttcctaagagaaatgtgaaggtgtccaggcccaagagaaggttaatcagtactgccataccagctgggtggctgtgcggaaagctcgaatgatgatctgggggtgtaaaccttcctccacatagggtttcacctgcttcagaaactctgcagccagcaaggtcactgaggtggtgccatcacccacctggaagatgatgacaggaaatacacgttttctgatgttcagggaataaagccctgaaactccatttttaggcacgctacccatttaaactgcatattatttaaatggatgtcaagcttttttctggaagcacaggtttttgcaataagtagaaagaagctaatggtagttacatatccatcatgtcaaacagtcctgggctaccaaattaattccccagacagccccattctctaaagagggctgatgtggacaatcaaatgtcctcagggtaaaaaattacacacatgaactgagaacttatgttacgtacaaggcattgtgatgaataaaacagtccttgtcatgcttattgtaatacaatacttaaaataatcatggtaccaagaagcaagagacaaacattgtttaagaagcaaaaggtggctgggcacggtggctcacacctgtaatctcagcactttgggaggctgaggcaggtggatcacctgaggtcaggagttcaagaccagcctggacaacacggtgaaaccctgtctctactaaaaatacaaaaattagctgggcgtgatgcgggcgcctgtaatcccagctactcaggaggctgaggcaggagaattgcttgaacctgggaggcagaggttgcagtgagccaagatcgcaccacagcactccagcctgggcgacagagtgagactccgtctcaagaagcaaaaggtactgcaggagttcctttcttttttaatagagaaagggtctccctatgttgtctagactggttttgaactcctggcctcaagcaatcctcccacctcggcctcccaaagtgctagaattacaggcatgagccactgcatctggccaggagttaaaaaaaaaaaaaggtaactttcagtcaaatcacactaaaacaaacgtcctaggaccagccaaagttctttatatttcaaaaactatgaggaggccaggcacggtggctcatgcctgtaatcccagcacttggggaggccgaggcgggctgatcacctgaggtcaggagttcgagaccagcctggccaacatggtgaaaccccgtctctaccaaaaatacaaaaattacccgggcgtggtggtgggtgcctgcaatctcagctactcgggaggctgaggcaagagaattgcttgatcccaggaggcggaggttgcagtgagccaagatcacaccattgcactccagcctgggcaacaagaatgaaaccccctctcaaaagaaaaaaaaaaaaaactactgggaataagcagattactagtctgctaatcttttttagatggtgcttttctgtgatgggatctaaatcctatttaatgagggtgaaaaagaaaaagagctttctaagaaaattggataaactctaaactggaagaaatttatttcggtagagatggggtcgtgctgtattgcccaggctgatctcaaactcctggactgaagggatcctcccaccttggcctcctaaagtaatgagacacaagcatgagccaccatgctcagcccagaaatttatttttaacttcatgtatgttcactgtgtaaggtaagaaattctcaaggggcaaaaaaaaaaaggttactatagagaaggtttaagtgggcagatttctggaccaaaaggcattattccctcgttgaagacaaaaacaaatcaaatccagactcttctctctttaattttatatatgctatacctgttttataggcttggctcctaataaaccttttaacgtaacttcaagacatacctgtagtatacatattttgcagtactctaaaatacaaaacctatctgtcaacacatttattaatactccagtgttagaatttatttttaaaagatagactggttaatgccatgaattatacacttaaacatggtattaagaataaatattatgtctgttttatcatcagtttaaaaaaaaaaaaaaaaaagcctggtgtagtggggaatgccagtagttccaacgactaaggaagctgaggtgagagaaggcttgagccccggagttcaaggccaacctgggaaacatagtaagaccctatctctttaaaaaaaaaaaaaaaagaaagaaaggcagattggaagtcttagtttacagccccattttgtaagagatgagaagtcaaattatttaacctagcaactcacacaaatgacagcacacaacctgttaagatctcaggcagtagacttatatctaaagactgttgtcattcaccaatgtattaatggatatgaaaagctacatgtaacgaaatagtatgaattttaaaaggctgttaattctaaatacttttataagcatgtattacttgtacaattataattatataaaatcttaaaaaaatttaatagaggagaactaaggagcaagcaagcatgtgtttcaacctccatttaaacacacaactattttcctacctcagcatcttgggatttggcaatgtctaccaaagtctttgctgcaggatggacaacatcaagaagtttcagaattgtggccccatcattagaaattgttgctttgccttaaaagaaacaaacaaaaatctaaagcccctttcttaaatgctgtcttcaagtgggacctagaacccatctacactttactgggatggggcagaggggatcacggcagggctgaagggaaaggatacctatctgatctttctatacagaattagctctgtacacaaagggtctaaaatcacaagcttttgcagaccacagactcccaattttccttgaagagcaattaatacaggtcaactggatacagaaaagattttttaaataaaagtaaccacttagatattcttaccacagttgataccctcacacatcaattaatataccaagatataaacaggaattttctcatcttgataacaatggaagtgaacacaggaaactccagatggttctatttcatgtttctaggccacgtctccctatgaggcaacaggctcctgagcctaggttctctcatatagtcccacacgggctcagcagtcaggacaatataagaattggaactgcttcagagtgagtcatctttcaacgatcttaaaagcagtgggatttctgataccaacctatgctagtcccaaacaccccctcaggagcctcctttcctgcacacaggcctgaggaactctgtagacttacctctgccatctacaataagcttgtccatgccacggggacccagggtagttcttacagcctcagcaatcacctggcaggcactgatgttactcacaagctgggggatgccttgggagctatcagtcccctctttcaataggataactggtgtgggctagaaaagaaagaaattaactgcttttaataatcatctattataatgagactggcaggggaaaggggaaaatgctcccatctctcccttaacagaattatctagaggtcttcttaaaccacattcccccaactgtctaccacatccattccccaaccagcctctacctccagagacactatcaaatttagcctaccctgcaggtatgctagacaggaaaatggtttgagaagcactgacctaatctaaaagaaaaaatcatgagttctccagtacccagctgaatgaccatggccttttcaacttctgaccttactccctgtgctgaggaattgggtcacaacacaggaggaagaggcagaccctgctaagtgttcattccgcagcaaaacatccacttgtctgtgttacagctcaatcttagagaagcagatgggacactgatgcaaaatgcaagatgccaagagcttgaggtgttgtcctagagatgcctaggcagtcagctttatgtaacagtgatgttcagctgcagtgtaggaaaacaggcagagaaacaaacagcacctttgccctgttttgaaaaatgatggcaaatctaattcatacagcaatgtttccatctctcatgctggctgaataaagcttctgtgtgactaatttccaatcagataccccaaagaagttttcctctttctatattgcattggtctccagaacattccctatccccgtaagggcttcatttgcagacctgctttagaaactgagaaacagggatacttgcttgttttaaagggcccgctcagatatctttgctctagtgaccaccattattagcagagagagcaatttctcagcttagcaaaccagactactttctctccacattcaaatctgagccttcagagataagcccacgaactagatccagtcttctcaagtgtttctggctaattttgtgtgtgacacagaatgtagtaaggataaatactatttcaaaacttttattgtgttaaatttgttactaggctatgattaaaaatgtatttcttactgtggaatgcaataaaaagtttgaaagccatcacctagtccttagaggtacgtggatgtctgagcaaggaaggcacaggaaagcacagagctttcccaacctaacaatgaggagtgaggaattcctgccaaagacagagtcttgccactcatgaggctgattccttattaactggtcaattccttaaaaagttcaactcttttggccagcgcagctggagggtagtaagcaagaggaagactggaataaagctgaagaggcaggcaggaaccagatcacatacacactcgtagacacactatggtgaggagttcagatttcattcctaaaaaggaaagccctgggaagctttcagcagaggaatggcatactgtgatttacataaaaaacaaaaaccactgtagaaaaaagaggatcacttgagctcatggagttcaagaccagcctggggaacatggcaagaccctgtctctacaaaaagaaaacgaaaaatacccaataaactctacggaataagagagtgggagtaatttaatatattattcattttttaatatatatttctaagagacagggtcttgctccaccacccatgctggagtgcagtggtgagatcatagcttactataagctcaagcctcctgagtagctggaccgcaatgcatgaggtaccacacctggctaattttttaaatttgtatttaaaaaatgttgcccaggctggtctccaactcctggcctctaacaaccctcctgcctcagccttctgaagtgctaggattacaggcatgaggcaccatgccaggccctcattaaatttttttaaatgcttgtcaaataatcatacattactccttttattttttattttaaaaagaatgcttgtcatgtaaacccctacatttgggatcaggcgtcaactgaagggaaaattccttccttttgctggagtgtcccaggtctggtggcaagaaatggcttctctatactcccagcattctttctggctcttcagctggcccagtccctggcaccttctgtaagggaaagatgtgtgtcctgaaaggccctaccatctcccagtcttgctaaatcattccttatggcagccccaagtcttctctggtccacccctgccacggatggagtcttacactttaaatcaaaaactaacatgagtctcaatcacttcctatcaccttcaacaggttctttcacctcaacaggttaacttacccaatgcttgtgtatactttttctcacctcaacctgcaaagtgtacccccatctaaaatagtcactctgccatcttctaccaaaaccactttctcaccaccaggccaccaattcctcagagctccaattcttccaagaagttttctctacagtaataaacaagggcatctgaataggggaatcccataactttctcttcacttgcccttgctcgcaactttttatcaccatccagcttaagtacaagctttccaaagacaaggaccaaaataaccttaatttgaagagtgccaagatttggccacacatgaagcaatattcagcagcttttggggctgaaaatccaactgctacttgtaagtgcttgacagcactggcttcttgacttttggggagaaaagcactggcactacagtaacactacatttactgagagttcttaagcacaatgcaagaagagcttggaagcagctaaccacagattccccaggttccctatgctttgcaggccctgaagaaacagcaggctgggtagagagcatctatggggtggaaaaggtggcagagctggattgagtcaagccaagacaagcaggataggtcctcttctaacagttccccagcagcaggcactgtatgcaaagtccagtttccatcccttagttactttcaacctcgctccttttttttattcctctaataaataagaaacaaggtcgggtgcggtggctcacgcctgtaatcccagcactttgggagtccaaggtgggtgaatcacaaggtcaggtgttcgagaccagcctggtcaacacggtgaaaccccgtctctactaaaaatacaaaaattagccaggcgtggtggcgtatgcctgtaatcccagctacttgggaggctgaggcaggagaattgcttgaacctgggaatggaggttgcagtgagccaagatggtgccactgcactccagcctgggcaacagagcaagactccatctcgggaaaaaaaaaaaagaaaaagaaacaagagcagactccagtaattggccacaggtataatggaaggttttggaatttcagcttactgatcttcctcttcatcctactttaaaactttcactaagcatcattaagcttaatggcttacaaaacaagtgtgtctatgccaaggcacacagcgctcaacgccacaaaggcaaggacatacattttatgcaagctgtaccaacatcacaggactgaggtttcaggggaccttttcacctctctttcgattacagaagtattctagaatatcaggggccaatttgaagacaggaagactcttggagatagaagtttcacattccaaaaatggggaggagatatcaagagccaatacagcagggaaacgtcaatctgacagaggaggggtcagttcagggaaaatccaagtgtgatgatctagagcccactggtgaagttttatcacggcagagaatggcggttctgatccctagctgtgtgaatgtgaaccaaagctcttacggaagccctggcagcgggatggactgatttcagagatgaaaggaagcaaacaaccacctcgccgagtaagagctaacattgctgagtgcttactatctgctaggcacactgacaaactgagaaccagaaattaaataacatgctcaaagtcacacagctagtaagtggcagagctaagttacaaacctaggcattcagtgtagctccagaggccttactctcaactgctgtactatgctgcctctgcacagaagatgaagacgacttcaagaatgagcaatgctagagacataaaggggagaggaagtactgttaaatgctaatttccttctaccttgggtacaagcgggattcatagggcatttggtagaacacctaaaaggtgtctgcgtccctaacaggacagagaaaagctgcaggaagcaggaaaagagcagaagatagagtcggacaggccaaaatgaataagtgaactgccaagtgcacagaaagcagtatctcagtcagggtcaaacaccacctcggaagctggccctactcaataacaacccaggagataccatcgaggcttgggacccacggaaagtatctaaagctccgagagacagagaaaagaagtgtgggaagtagggctacaaggagcactttaggtggctccaggactcacagcaactccctcgccccaaatttcaagaaaacgagacccagagttaggtagccaactagaaaagcctttcttatgtcaccagagtccgagcctgggtcttcccacctccgatacagtgtctccatctacctttcccgttctcctggctgagaggctgcaacccccagcaaccaccagggcctggtacattcagtaggcactaaagacgcgtttatttaatgactgagcgaatgagtgaatgaattaaaagtactagggaaggcgtctgcttctctgcacgctgcggtgagggtcagcgagtgaacatagtgagtccctaggcgggcacaatatgaggtccccaatgtgcctgtgccggttccaagaagcacacgtctttacagcccgcaaatctcagagcagccccagcttccaagtctagctgccgaccgcgtaaccacggccgacctgcactcgtttcacgcaagtcccgatcatgcggggctaaaaaagaggtccccgacgtgggttcgcgggcccgaagcaccctgggacttgtagtccccaaccggccagcccagagactcctctaaagccccacgcagccctcgccaacggctccagcgccgtgctcgggccgagccaggccgcggctggctggggtcgcccctaagctggggatctgggcgaggacagaggcggcaagcaaaagagggtcctacagagcaagcccaggccgagcggcgccggccaccggccagatggcagctgatggcgacggatgcgcgagacgccactcaccatcattttggaagcttattcagcggcccgccactctcccctcttctccgagaccgggccgcccagcaacccacaatgcctcgcgcaatagaaatacccagaagcttgggccgggagaggaagagaacggaccacttccgctactctatggttcgttaccaccgactcggtgcggctagaaggacctgaggctgggcttcggggactctctagtgaggggcgttcattaaagaggggtcgccgcatttcggtcgtgcttcttagagcacggagggtctttgctcggcccgcatcacctactaacttaattccaccctcctccatccccggacgccagaccaaggaatgcaataaaggcaaaagtgtgggacgcaaagtgtgggataggctggtgccaaagcactttacgtgagcgatctcatttaatcctcacaaccctattgcgttggtcctattaaggccattttactgatgacagaaaggaggctgagaggtcaaggtgtccagtgtcacagttacatagtcagtgtcaacgggacgagcgtgggaagctgcccccaatgcccgttttctggctttgcactggccagaggctcctcgtggatggcgtgcgccaggccgcggccccagcgcctatccacggtgagcgcgcaagcgttggtggcactgggcggaagaccccctggcgcaagacgagtgccttcccgtgaaggcgtggggaggagggaagcgcagctcggaggagggaagcgcagctgggagaaggctaatcgtcgtcaatcgaggcggccttggagtggacaggaccgaga

SEQ ID NO: 753 - DNA, 1721 bp, Homo sapiens
gaaggcttaaattaagtatgttgacaataccccaaactactggatgatatttgtaatgaatttcaccctatatcagtacagaagggtgtcacagttcagcaaaacaaaagagaatacgctttgttaaacctctactttctgaattttaggacagtgaggaaatttaacattttcaatttttttttcttttcttgactgaaaagaaagtcaagccagcaatatgtttctgagagagcagtgatgcatttcacaacactgttaactgtctgcttggctttttgaggcttccagagttcagaattgtcttctcttgaataggtcagtgcatttttttccttcagtttttctccttaagcagcaaaacagaccatttaacttccaaatatttacagcttgcaaacagataaacttcccaaatctgtttttttttatgaaaaggaaaacgatcagccacaataatctataatacgatatatttgaatcaaagttattagatgccctagggtcttttcatggcagattttatatatcaccaccattaataaatctgttatcagaattatgtctttctctctgttgatagttatttttagactaacatattcatacctccttctgatgaaaaacattaaaatttgaataaggcatattagaaaaccctaaagctctgtatttacacaaaggagactcataaatattggtttttcagggtgaagcattgtgtgttattccattttgtaccacagggaaagcctagtcacacatggggcctcattaaaagaggatctaaagaaatatttaatggttgaaatataaggtcttattctgaatatctaccttcactttataataatagaaactgaactgaaaagattcagtaagtgatttagaacatccactcattttaaaagtaatgtctaggcctaggaaagtgacatcatgttccaaatgttacaaatccagcgtttttccttgatgtctttataaatacattgtttacagtttttattctcctccatatatgatgccccttttctaagattatttcgtaggtatatcctttaatgagagaacctcataaataaacttcctgaatttgaaaacgagtgagaggagacttcaagtttgtggactgagctaaacatgtgtctactctcccttcaaacatcccatggaaatggcagtaaagacagaacaaagagaatacatttctgaatatactgaggaacatatactccagagagcagaaacaggaagaggggcctctgctaaagctgaaggagtcttcaggagggaacccagctgggctctgtgttctggttggcagatacagagagtagccaaggtcaaaagcagacaaacagaaagtgaggtgattggccacaggtttggaaatggctcaggtttgctctttccaaccccttgcatgtcactgcacatttacctccagaagtaaagcaggagaactctgcaaagggaaccaacaatctgcatgggagggcattgcctccaagtgtgtgggctggcgaccaagtgcagccctctgccctagttatgggagttggagagggacttactggtttgcatgttccatgcaagagctaaagcaaagcacatctcggagaagtgagccaggaaagtggatcaatccatgccaacaacctatattaattaacctgataattaatatgtatataaagtgaaaaaaaagaaagaaaaaa

SEQ ID NO: 754 - DNA, 10115 bp, Homo sapiens
ctgaacctcttctttacaacgaaatgatgctcaaggtattgtagcattttatgtgacttacttaaattgcttttctagcagacttcttccttcctcaatttcttcagttgccctctccttttaagaactacctgcttctgctttaacttttctttcaacctgtgggctacctaattaactgcatggtggctttcattactgttttacaaatgagatacatgattctattgtacaaagttaggaagggaatgaattatgacaagttcattgaattttaaccccctagttttatgtgtccattatgacgctgccagattgcatttctgttaatctatttactgtcaccaccttctgtataagataagctttttgaggcaggaaccatccagtattgacttggcagtcttgagagcttagaacagtgctggactcatagtaagaacttgtgggccgggcacagtggctcaggcctgtaatcccagcactttgggaggccgaggcggatggatcacgagatcaggggagatcgacaccatgctcgctaactcggtaaaacccggtctctactaagaatacaaaaaattagctgggcgtggtggcaggcgcccgtagtcccagctactcgggaggctgaggcaggagaatggcgtgaacccgggaggtggagcttgcagtgagccgagatcgtgtcactgtactccagcctagcgacagagcgagactccgtcttgaaaaaaaaaaattgtgaaattgatttgttcagtggctttatgttattctttaacttaaataatcactgtatttaactaaacagagatgcaaatgccatgagaaggtcaagcagatcagaagatattttggaaatagatgaacgcaaggaccacagacagctgagcagctgtgtgtttattcccctcacgtttcgttccttcaggggccagggacagccatgtgttctttggcacacagggtgctgttcaggacttccagaggattccagggctccaccttcctgtatcaccagcagcacggtctcatatggatggatggtgcaagtacctccagggctccatgtcaccaccccacctcccccactgctccccagtctcacattcctccataagacacccctgggtcagatctagccctgaagagatgaatgatcaatcactacatgcccccagctgtggggtttgtgggggtgagaagagaggtttaaaagaggtagttttgcttagagtcagggatccaatcaatatttgaaactcttaagtttaaaccctttcttcctctctctttctgcccctaaaaatattttaactgcaatttctagcagcgtgaaaatcaacattattgttattcttccaccctaatctgaaacctttgtgccaccatcctttctctctcccagccatcttctctcctgctttcgcccaccccatacacccctccacctttctatcaaagccctcagagacataaaaaatagcccatccttttgaaaatggcaagtgttccttgacttgataaacctgacatgaggctctgtaaatgggactagtcagtgtccaggttgaaggacgttcagctaggcacgggttccatctctgtagctctgtcctggcactgagctcagtatcaaagaaccccagataccccaggtcccctaatccaatagcccctcaccctacagctaagatttaaaaatgaagtatctgatgttgagagagacaaattaagttgtgcaatgatgtagtaaccagaacaagaaagggaagcaatccaatattcactaggtggtgagcagatagtgaaacctgacttaagagtggatgtttttaactctacataatagatgctctcttgtgaaaatgtgtagaaaacaaaataacagtctacatattgaagaatttgaattttaaaagaattgcagagtactccactgcttatgaaattcaagtaatcttacatgtttttcttatctagcttatgggtagaagcagaatgagcttctccagtgggatgaacacagacacttcatattcaacaagttcacactgagcccatcatcattgcttggaaggctgctcctcttcctgtgttctctctcttggccaatggcactgccatttccccatccagaacctgggatactgcagcagtcttttcactgcccctgtctacccctctccaatccattctctacacaactgcctacaggaatctttccaaaacattagttctgaccataactctacttttcttaagacagcactttggctccccattgacatcacagtctttagagtgatgtaatgttcatcattcggtcataagctgcaaatccattctccttctcacctctgtctcctgcatgcaactccacagctgaaaggagccaaactccctccactctctcacacctcccagccttggcccttgcttccacttctacctttaccctccattctcatcaccctacactattatctgatgactactcttaagttttcataaccagatcaagtatcgatgtctccaccaacagggaagagcaggcagtggttctcaagtcacatatgtaatttaaaattttctagtattttaaattttagaaaatgtttagaagaaactgatcaattaataacatgttttatttacaccatatcccatatattattatgttgatatcaatatattgaattttttttattaagatgagaggagtctcactctgttgcccaggcgggagtgcggtggcatgatctcagctcactgcaacctccgcctcccaggttcaagcaattctcccacctcagcttcctgagtagctgggattacaggtacccaccaccacacccggctaatttttgtatttttagtagagatggggttttgccaccttggccaggctgttcttgaactgctgacctcaagtgatccatctgccttggtctcccaaagtgctgggattacgggcatgagccaccacacctggtcaatgaatagaacattgattcagcatgcaatcaatatttttaaattattgagatgctttatatcctttttttcctactaagctttcaaaaatcagtctttattttactcttatgacacatctcaatttgctgcatttcaagtgctcagtagccacattagggagtagctgccatattgtacgtaagagcaccagagcacttgagagcctcctagagatcctaatgaaaacagaatcctgtgctatgcttccagaggttccatttctggggagagtctaattttggtggtctggagtggggaccagaaatgttccttttcagcaagaaccccaggcagttctgaggtacatgttcgtctgaccatttgggacttgatagctagatgcactgattgtcgagttacacctataggggtttatgttcagattccaccacctaaaagctgtgaaaattagtaacttcagttctctaggtctcagtctcctcacctgcaaaaataactacctagagacttgtgggtattaaaagggtaatatatttgagacattcagcacagtgcctggcaggtgtctcataatagcagctgtgcactgcacccgcagaaatctctatcacacagacgaggtgtcccttgcatcctcctcccacaactctctgtgcttccctccaccaccacccatcacgcaatgctgtgtcctgtgcttgctatgctgcccctcaactcaactgagaagataaactggctgctgtgtgctcccacattactctgcctcacacatagtaggtgcttagtacacatctttttttttttagaaattaaactaaatctgagcaactgggtttcttgtagtggagcaaaactctttatgcaaaagtgcctcaaggtgtcttatagaacagaagtgtgtaagtaaagtggggtgtatccctgtcctaacactcttccctttaaagtctatcacagaaagctttgccacagcaatccatggcttgaaagtgggacacctgacagatcgtgttattcagaggagcaagaggatgattctagacactctgggtgctgggttcctgggaaccactacggaagtgtttcacatagccagccaatatagcaaggtaagaagctcaaggtctacattagagataaaacccagtgcatacatatgtgttacatttactctatacttcgttttatagacagcacttgatgtacatagcactgttctatatcatttttataatttcctatgttccattatctgagttttaatagtcatccatattctttactaagtcactgtcttaaaaccatacacagtgaggcacagtggctcatatctgtaatcccagcactaccagaggccaaggtgggcagacggtttgagcctaggaatttgagaccagccttggcaacatggcaaagacccatttctacaaaaacaaaaaacataaaaattagccaggtgtgatagcacacgcctatagtcccagctactcgggaggctgagaggtgggaggatcacttgagcctgagaggttggggttgtagtaagtcaagatcatgccactgcactccagccaaggcaacagagcatgaccttgtcttaaaaacaaacaaacaaataaacagaaaaaaaatatgctaataatatctcacagtttattattattattctctggagaaaagcctggtcaagtactctgagcagagtggggatgtatgtgagagctcctgctctccctagggtgtattagagataaacagttagtccatcttccctggtatttaccccaaggagtaaataagagtaacttcagatgtgcttccttggagcacttccggatcatgatctaggatcaagcaacgacatctcctccccctttcacaggggagagctgtgtattctacaaggatgagaggtattcaatgactagggcttctatctgtggcaaaggttcaagtaagaactatgaataatgcctccaaagatgaagaataactcttgaaatggtgacttggtatactgtattcacactatcactggttgatttgcttttgttccagatctacagttccaacatatccagcactgtttggggtcagccagacatcaggctcccgcccacatatgctgcttttgtgaacggtgtggctgtaaggaggttttcacgtcttttcaactattagataatcataataattttagagtcaggaaatatctcagaaattgcccaaattctatattttacagatgaaagaactgaaagtcagacagataaagtggcttaccctctctcctatgtagtaattcagttttcatgtttttacagtaaattgatgcttttcaaacagattgtgtagcagaggaaagaagatggaaggatttagataaaaacaccctaaggtatcccaattcaaaaccttgaatataaatagcaaaaaaatataaaacccatatccagacctaatatcttctgtttttcctgttgtggggccagtttctctcaagtaatgtgttctttattcattcactcattcatccattcaacagatagttattgagaaaggaacaatggccttatagtgtctgtattttctgaaccaaaaatctgtacttctcatctgacagatgatttttatgctttttctgtgtgtcacgggaaatattctacaagatgtaacttggaaacagacatgttgggatttccgagatatttttatgatttatgggtacaatagctcaggagattgaaagttaaagccaacggtgcattccaaagcaatgtcctgaaagcagtgggaaatgcaccagtgacagcaaatagatataaaaatctatttttaaatgaacttctggatattactgttttaatataaagaaaaagaaaatggctaggagaaagaggaataagatcttaaagcagaaaataatgatttttaaaatatatagctgaaaagttaatctgagtttgacagttattgtgctattcttacaacttctctaaaagtttgaaattatttcataataaaaaggtacaaaaacgtatggcctcatatggaataaatgacattaaacttgcagtgcaacttatttaaagggtggaggaggaattgccagccacctgattctgcagctttgtttttaaaagggaatatagatctttccaggggccacagcagagggagctcaggccaccagggcaagacccaagctccttggggctcacaagctgctctccaaggtactcccttcctctggcagaggaacagcatttcccagtgcccggccatgtgattaataatcacagccaggccaggtgtggtggctcacgcctgtaatcctagcactttgggaggctgaggcgggcggataacgaggtcaggagtttgagaccaccctggccaacatagtgaaactccgtctctactaaaaatacaaaaattagccaggtgcggtggtgggcacctgttatcccagctgctccagaggctgaggcaggagaattgcttgaacccaggaggcagaggttgcagtgagccaggatcatgccactgcactccagcctaggtgacagagcaagactctgtctcaaaaaaaaaaaaaaaaaaaaaaaaaagaaaaaaaatcacagacatttctcagattttcttttctgagaatcagatcaaaagaatctcacataaaacaaggttattactaaactaagtccttagtggtccaaaagccattgcattaagggaaaatttaaggctttttgttgctgtttgtgtctgtttatacagattcactccatggattttgatgacacgtggcaccctgccacccacccttctggggctgtccttcctgtcctcacagctttagcagaagccctgccaaggagtccaaagttttctggccttgacctgctgctggctttcaatgttggtattgaagtgcaaggccgattactgcatttcgccaaggaggccaatgacatgccaaagaggtatggagagaatttgccccatcaaaaggtagtcacatccccttcatctatcaatcattatctccgtagagctttctgacttagaggccggttcagaggaagatgttaacattagcacaggtagataagtcaatacaccagtcacatacgaaaccctctatccacatttaaagaagtgacttcaagagtgcaacctggaccgtgagattaattgggcctctcgttgcaaggtgattcatgtcattctggcattcatgggtgtactgagtattccttatttcattctcaaagcagaatctattctgagactagctagcgtccctcagactaatgaggacattcagaatatccttactctgactgttcatcctgcagataaaaaatggtcaaatgtcggccacatcatatggctcagtctcagatttatgttgccacttgctccagcctgccaggagagaagtaaattgaaatactaggtagtgaagtttcagtttcttcaaggcccacaattctcacagtgacttagatgagatctcagcaatcaatagctgttgcctttctggcaataattgtaatggtaccatttataaagaactcactatgtgctagcactattgtaaacatgttaatttattcaaagctcctaaaactctaagaggtagatgttattattatcaccattttattttattttttgagatggagtctcgctctgttgccaggctggagtgcagtggtgtaatcttggctcattgcaacctccgcctcctgggttcaagtgattctcctgcctcagcctcccaagtagctgggactacaggcatgcaccaccatgcccagctaatttttgtatttttagtagagacggggtttcgtcatgttggccaggatggtctcgagctcttgaccttgtgatctgcctgcctcagcctcccaaagtgctgggattacaggcgtgagccatcgtgcccggccttattattattatttttattattatatttttttgagacagtctcactctgtcacctaggctggagtgcagcagcatgatctcagctcactgcagcgtctgcctcccaggttcaagggattctcctgcctcagtctcccaagtagctgggactgcaggcacccaccaccacatccggcaaatttttgtatttttagtagagtcagtgttttgccatgttggccaacctagtctcaaactcctgacctcagatgaccctcccaccttggcctcccaaagtcctgggattacaggcatgaaccaccacacctcgcctatcaccattttgtgtaagaaaaactctacagagaagttgaataattttccccagatcatatagctaataaagtaatggagctgagatctgaacccagacagtgtgactccattatcaatgttcttgatgactacgctatcctgcctcctggtggttacggtttgtacatctccaactctgcttctttgcttttcagattccatcccccttccgtggtaggaacgttgggtagtgctgctgctgcatccaagtttttaggacttagctcgacaaagtgccgagaagctctggccattgctgtttcccatgctggggcacccatggccaatgctgccacccagaccaagcccctccacattggcaatgctgccaagcatgggatagaagctgcatttttggcaatgttgggtctccaaggaaacaagcaggtcttggacttggaggcaggatttggggccttttatgccaactattccccaaaagtccttccaagcatagcttcctacagttggctgctggaccagcaggacgtggcctttaagcgttttcctgcacatttatctacccactgggtggcagacgcagctgcatctgtgagaaagcaccttgtagcagagagagccctgcttccaactgactacattaagagaattgtgctcaggataccaaatgtccagtatgtaaacaggccctttccagtttcggagcatgaagcccgtcattcattccagtatgtggcctgtgccatgctgcttgatggtggcatcactgtcccctcattccatgaatgccagatcaacaggccacaggtgagagagctgctcagtaaggtggagctggagtaccctccggacaacttgccaagcttcaacatactgtactgtgaaataagtgtcaccctcaaggatggagccaccttcacagatcgctctgataccttctatgggcactggagaaaaccactgagccaggaggacctagaggaaaagttcagagccaatgcctccaagatgctgtcctgggacacagtggaaagccttataaagatagtcaaaaatctagaagacctagaagactgttctgtgttaactacacttctcaaaggaccctctccaccagaggtagcttcaaactctccagcatgtaataattctatcacaaatctctcctgaggcttaccaacatctaaatgactttgcatttggggagattcaatgatttggtttgtaaagcaagggtctgctgcttggttttcccaggaaaaatgaacaaagatggagagagtccagaaacagaactacatatatctggaaggagccttctcctgaaaattttgcaggacagttccacttacctaaatcaagatgaaacacacacacaaaaatgagtttgtaagcattcacaagggtgaaattcaactcacctgtgatttacttataaaattaatctcttcataggaattatgtgtggacttcatgagcctcaaggttttagagggatgtgaacctgcatgtatattttctgacagtggagagggctctggtgcattgtgtcaccaacagatctcctagaccatggcttattaccaagccctccacagtgcaaggggtgctactggggaatgggtgggtttaaatcctgcctctgccattcactagatgtagccttgagcatgttaccattagccctctgcctcagtttccctatttgtcaagccgaagtaaaaagcagtctggaaaaatcgcattttggctctagaacccatggtcttaagcactgcaatatatcacctttcagtataaaaatatttgaatcagagttgcaataaagaatgaaa

SEQ ID NO: 755 - DNA, 6404 bp, Homo sapiens
  misc_feature (1484)..(1484): n equals a,t,g, or c
ctcaactcaactgagaagataaactggctgctgtgtgctcccacattactctgcctcacacatagtaggtgcttagtacacatctttttttttttagaaattaaactaaatctgagcaactgggtttcttgtagtggagcaaaactctttatgcaaaagtgcctcaaggtgtcttatagaacagaagtgtgtaagtaaagtggggtgtatccctgtcctaacactcttccctttaaagtctatcacagaaagctttgccacagcaatccatggcttgaaagtgggacacctgacagatcgtgttattcagaggagcaagaggatgattctagacactctgggtgctgggttcctgggaaccactacggaagtgtttcacatagccagccaatatagcaaggtaagaagctcaaggtctacattagagataaaacccagtgcatacatatgtgttacatttactctatacttcgttttatagacagcacttgatgtacatagcactgttctatatcatttttataatttcccatgttccattatctgagttttaatagtcatccatattctttactaagtcactgtcttaaaaccatacacagtgaggcacagtggctcatatctgtaatcccagcactaccagaggccaaggtgggcagacggtttgagcctaggaatttgagaccagccttggcaacatggcaaagacccatttctacaaaaacaaaaaacataaaaattagccaggtgtgatagcacacgcctatagtcccagctactcgggaggctgagaggtgggaggatcacttgagcctgagaggttggggttgtagtaagtcaagatcatgccactgcactccagccaaggcaacagagcatgaccttgtcttaaaaacaaacaaacaaataaacagaaaaaaaatatgctaataatatctcacagtttattattattattctctggagaaaagcctggtcaagtactctgagcagagtggggatgtatgtgagagctcctgctctccctagggtgtattagagataaacagttagtccatcttccctggtatttaccccaaggagtaaataagagtaacttcagatgtgcttccttggagcacttccggatcatgatctaggatcaagcaacgacatctcctccccctttcacaggggagagctgtgtattctacaaggatgagaggtattcaatgactagggcttctatctgtggcaaaggttcaagtaagaactatgaataatgcctccaaagatgaagaataactcttgaaatggtgacttggtatactgtactcacactatcactggttgatttgcttttgttccagatctacagttccaacatatccagcactgtttggggtcagccagacatcaggctccctcccacatatgctgcttttgtgaacggtgtggctgtaaggaggttttcacgtcttttcaactattacataatcataatnattttagagtcacgaaatatctcagaaattgcccaaattctatatttcacagatgaaagaactgcaagtcacacagataacgtcgctcggcttaccctctctcctatgtagtaattcagttttcatgtttttacagtaaattgatgcttttcaaacagattgtgtagcagaggaaagaagatggaaggatttagataaaaacaccctaaggtatcccaattcaaaaccttgaatataaatagcaaaaaaatataaaacccatatccagacctaatatcttctgtttttcctgttgtggggccagtttctctcaagtaatgtgttctttattcattcactcattcatccattcaacagatagttattgagaaaggaacaatggccttatagtgtctgtattttctgaaccaaaaatctgtacttctcatctgacagatgatttttatgctttttctgtgtgtcacgggaaatattctacaagatgtaacttggaaacagacatgttgggatttccgagatatttttatgatttatgggtacaatagctcaggagattgaaagttaaagccaacggtgcattccaaagcaatgtcctgaaagcagtgggaaatgcaccagtgacagcaaatagatataaaaatctatttttaaatgaacttctggatattactgttttaatataaagaaaaagaaaatggctaggagaaagaggaataagatcttaaagcagaaaataatgatttttaaaatatatagctgaaaagttaatctgagtttgacagttattgtgctattcttacaacttctctaaaagtttgaaattatttcataataaaaaggtacaaaaacgtatggcctcatatggaataaatgacattaaacttgcagtgcaacttatttaaagggtggaggaggaattgccagccacctgattctgcagctttgtttttaaaagggaatatagatctttccaggggccacagcagagggagctcaggccaccagggcaagacccaagctccttggggctcacaagctgctctccaaggtactcccttcctctggcagaggaacagcatttcccagtgcccggccatgtgattaataatcacagccaggccaggtgtggtggctcacgcctgtaatcctagcactttgggaggctgaggcgggcggataacgaggtcaggagtttgagaccaccctggccaacatagtgaaactccgtctctactaaaaatacaaaaattagccaggtgcggtggtgggcacctgttatcccagctgctccagaggctgaggcaggagaattgcttgaacccaggaggcagaggttgcagtgagccaggatcatgccactgcactccagcctaggtgacagagcaagactctgtctcaaaaaaaaaaaaaaaaaaaaaaaaagaaaaaaaatcacagacatttctcagattttcttttctgagaatcagatcaaaagaatctcacataaaacaaggttattactaaactaagtccttagtggtccaaaagccattgcattaagggaaaatttaaggctttttgttgctgtttgtgtctgtttatacagattcactccatggattttgatgacacgtggcaccctgccacccacccttctggggctgtccttcctgtcctcacagctttagcagaagccctgccaaggagtccaaagttttctggccttgacctgctgctggctttcaatgttggtattgaagtgcaaggccgattactgcatttcgccaaggaggccagtgacatgccaaagaggtatggagagaatttgccccatcaaaaggtagtcacatccccttcatctatcaatcattatctccgtagagctttctgacttagaggccggttcagaggaagatgttaacattagcacaggtagataagtcaatacaccagtcacatacgaaaccctctatccacatttaaagaagtgacttcaagagtgcaacctggaccgtgagattaattgggcctctcgttgcaaggtgattcatgtcattctggcattcatgggtgtactgagtattccttatttcattctcaaagcagaatctattctgagactagctagcgtccctcagactaatgaggacattcagaatatccttactctgactgttcatcctgcagataaaaaatggtcaaatgtcggccacatcatatggctcagtctcagatttatgttgccacttgctccagcctgccaggagagaagtaaattgaaatactaggtagtgaagtttcagtttcttcaaggcccacaattctcacagtgacttagatgagatctcagcaatcaatagctgttgcctttctggcaataattgtaatggtaccatttataaagaactcactatgtgctagcactattgtaaacatgttaatttattcaaagctcctaaaactctaagaggtagatgttattattatcaccattttattttattttttgagatggagtctcgctctgttgccaggctggagtgcagtggtgtaatcttggctcattgcaacctccgcctcctgggttcaagtgattctcctgcctcagcctcccaagtagctgggactacaggcatgcaccaccatgcccagctaatttttgtatttttagtagagacggggtttcgtcatgttggccaggatggtctcgagctcttgaccttgtgatctgcctgcctcagcctcccaaagtgctgggattacaggcgtgagccatcgtgcccggccttattattattatttttattattatatttttttgagacagtctcactctgtcacctaggctggagtgcagcagcatgatctcagctcactgcagcgtctgcctcccaggttcaagggattctcctgcctcagtctcccaagtagctgggactgcaggcacccaccaccacatccggcaaatttttgtatttttagtagagtcagtgttttgccatgttggccaacctagtctcaaactcctgacctcagatgaccctcccaccttggcctcccaaagtcctgggattacaggcatgaaccaccacacctcgcctatcaccattttgtgtaagaaaaactctacagagaagttgaataattttccccagatcatatagctaataaagtaatggagctgagatctgaacccagacagtgtgactccattatcaatgttcttgatgactacgctatcctgcctcctggtggttacggtttgtacatctccaactctgcttctttgcttttcagattccatcccccttccgtggtaggaacgttgggtagtgctgctgctgcatccaagtttttaggacttagctcgacaaagtgccgagaagctctggccattgctgtttcccatgctggggcacccatggccaatgctgccacccagaccaagcccctccacattggcaatgctgccaagcatgggatagaagctgcatttttggcaatgttgggtctccaaggaaacaagcaggtcttggacttggaggcaggatttggggccttttatgccaactattccccaaaagtccttccaagcatagcttcctacagttggctgctggaccagcaggacgtggcctttaagcgttttcctgcacatttatctacccactgggtggcagacgcagctgcatctgtgagaaagcaccttgtagcagagagagccctgcttccaactgactacattaagagaattgtgctcaggataccaaatgtccagtatgtaaacaggccctttccagtttcggagcatgaagcccgtcattcattccagtatgtggcctgtgccatgctgcttgatggtggcatcactgtcccctcattccatgaatgccagatcaacaggccacaggtgagagagctgctcagtaaggtggagctggagtaccctccggacaacttgccaagcttcaacatactgtactgtgaaataagtgtcaccctcaaggatggagccaccttcacagatcgctctgataccttctatgggcactggagaaaaccactgagccaggaggacctagaggaaaagttcagagccaatgcctccaagatgctgtcctgggacacagtggaaagccttataaagatagtcaaaaatctagaagacctagaagactgttctgtgttaactacacttctcaaaggaccctctccaccagaggtagcttcaaactctccagcatgtaataattctatcacaaatctctcctgaggcttaccaacatctaaatgactttgcatttggggagattcaatgatttggtttgtaaagcaagggtctgctgcttggttttcccaggaaaaatgaacaaagatggagagagtccagaaacagaactacatatatctggaaggagccttctcctgaaaattttgcaggacagttccacttacctaaatcaagatgaaacacacacacaaaaatgagtttgtaagcattcacaagggtgaaattcaactcacctgtgatttacttataaaattaatctcttcataggaattatgtgtggacttcatgagcctcaaggttttagagggatgtgaacctgcatgtatattttctgacagtggagagggctctggtgcattgtgtcaccaacagatctcctagaccatggcttattaccaagccctccacagtgcaaggggtgctactggggaatgggtgggtttaaatcctgcctctgccattcactagatgtagccttgagcatgttaccattagccctctgcctcagtttccctatttgtcaagccgaagtaaaaagcagtctggaaaaatcgcattttggctctagaacccatggtcttaagcactgcaatatatcacctttcagtataaaaatatttgaatcagagttgcaataaagaatgaaa

SEQ ID NO: 756 - DNA, 10292 bp, Homo sapiens
  misc_feature (2498)..(2498): n equals a,t,g, or c
  misc_feature (9168)..(9168): n equals a,t,g, or c
tgcagcagaaagatctcagagtaaagaagaacttaaagaaattcagatatgtgaagttgatttccatggaaacctcgtcatcctctgatgacagttgtgacagctttgcttctgataattttgcaaacacggtaagtgctgcctgagaataaacagaattgagtctgcagtgctcaaaatgccccagatgctttgtgcgtgattaaaactgcttgctttttgcctacatttctatacagccgttatgaaaatacagtatgcactataatttcatttcactttttgctgtggttctaggtagtaattgttggaggtagattagctacttattctatccttttgaaatgtcgcctaacctaacatgcatgatgatttgccataacaactcagaaatcatttgtaaacctctgaaccatttttctttgtaacaaaagctgttctcttgtagtgcacttgtaaatgtgatttgctctctgcacggtttatggaaaattggttcttgaaaaagaaaaaaaatgcacaaccgcatttatttatttattttacagaaacctaaattcaggtcagatatcagtgaagaactggcaaatgttttttatgaggactctgataatgaatctttctgcggcttttcagaaagtgaggtgcaagatgtattagaccattgtggatttttacagaaaccaaggccagatgtcactaacgaactggccggtatttttcatgccgactctgacgatgaatcattttgcggtttctcagagagtgagatacaagatggaatggtgagttcgagaatttcaccagtttcaagaagtaagatacatttagaggcatgacatatttttagaaatttttttcttgtgattttgattttagtcatgccagcagactttgttgaccttttaaaaatttttagtgttttcttcatgtcttaaagcagtgtttactaatgtagtcggacttacaaatcatgaacattttgtaggctctgaaaatttggaaactggtaagataaaattggccaatctccagattttcgtttccacaaaaatccagcctaatcaggaagcacactagttctaaatattatctacatttgcatttaagttcaagtgcccagcctagtgcctgtcatagagcagacctttgataaatgttggtctcatagtagatctgtggctgcatcttgaaaacctgtgataacttacgtgcaggagctccattgcagataatgacattgagggcccttcctgctgctacttttgctccttggttggcttttcctatgcacgctaccttcctttaactgccgctgccactgttgtgctgtgcctcggtcccactcttctgagcatactgcttaattctgcacacattttcctgttccaaagactttcttgacaaaggaagcagtgcattcactgataatcaagtgcatgctcttcaactcactggtctgacatggatccactgcctgaggttcatggtttgagtaacattgatagaagtggcagtgcctggccaaggagtgttttggtccaaatcagtgcatactggagtttgttgcagggggtccagtctgcagatctggatgcgacacaaacattgtcaatagcctgaataatttctgggcagtgtttcagttctttgaagatactgtcatgattaataaaatgccaattcattataattgttaggaactcatgaaaggtttttgttgttttgtactctctcaatccatggacactaaaagtacaaaaagctgtttgtgggcatgtaagacttttgagacagggtcttgcactgtcaaccaggctggagtgcactggtgtgatcatggctcactgcagcctccacctcctgggcttaagcgattctccctcagcctacccagtagctgagactacaggcgtgtaccaccatgcctgggaacttttaaaaattttttatagagatgtgggctcactttgttgctcaggctggtctcgaactcctaggcccaagcaatcctcccgtctcggcctccaaaagtgctgggattacagccaagagccaccttgctggccttgataaatattttaatgttaaaactgagtctttatgggtgaaattctgggatttatgggtgatttttttcttctctctctctttttttttaacctgcaaccattaccatagtcaattttggaataactttatgaccccaaaaaatgactctgtacccattaacagtcactccctattctttcccaacacccccagctcctggcaaccatcagtctgctttctgtcgtcatagattagcccgttgtggatatttcataaaaattgaatcatgatatgtggtcttttgtgactggcttctttcacttaggataatgatgtcaaggtttatttatgttgtggcatgtgttagttcttcattttattgcagaatattctgttgtgtgaatcagccacatttgatttacccattcatcagttgatggataagntgggttgtttgcacttttttggctattatgaataatgctactgtgaacattcatgtacaagtttttgtgtagtttttgtgtatactcttaggtatatacataggaatagaattgtgggtcatgtagtaactgtttaaccttttgagaaatagacaaagtggctacaccagtttacattcctaccagcagtgtgtgagggttacagtttctccaaatttttgctaatacttttttttattttccttttgctttttttttttttttttgagacagagtctcactctgtcacccaggctggcgtacagtggcataattttggctcaccacaacctccgcctcctgggttcaagcgattcttgtgtctcagcatctgagtagctgggactacaggcatgtgccaccacacctggctaattttttatatttttagtagagacggggttttgccatcttggccagactggtctcgaactcctgacctcaggtgatctgcccatctcagcctcccaaagagctgggattacagatgtgagccaccatacccagccttcttttgctttttagctctactatgaagtggtgtctcactatgttttgtgtttttttttatttttatttttcggagacggagtcttgctctgtagcccaggctggagtgcagtggtgtggtctcagtgatctctgctcactgcaacctccgcttcctgggttcaagcgattctcttgcctcagcctcccaagtagctgggattacaggcgtgtgccactgtgcctggctaatttttgtatttttagtagaaacgggatttcaccatgttggccagactggtgtcaaactcctgacgtcaggtgatccgcctgccccggccttccaaagtgctgggattataggcatgagctaccgcacccagccttgcattgtgattttgatttacattaccctatggctaatttggataaatttttaatgatgaaaacctatattacttttggaatctggaaatattttcattttgaacttctaaaagtagattagagaagtacctagagaagtcaaatgtatagacagaaaataggatgatggttgccaggggcggagggaaagagggaatgaggaattactgtttaatgggtatggatggagttttagttggagaagatgaaaacattctggagatggatggtggtgatggctgcacaacaatgtgcatgtatttaatgccattgacttgtatacttagaaatggttaaaatgataaatcttatgtatattatattatatattttttaaagtagagaattgagatctgttaatataatttaatattgccataaacattgaagccatatttataggggaacacatttttttccctttttttttttttcaagacagggtctggctctgtaacccagccctggcatacagtggcacgaacacggctcactgagcctctgccccctgggctcaagccatccacccacctcagccttccaagtagctgggaccacaggcatgcgccaccatgcccagctaatttttgtatttttttttgcagagacggggtttcaccatgttgcccaggctggtctcgaactcctaggctcaagtgattcacccgcctcagcctcccaaagtgctgggattacagatgtgagccactgcacccagccaggagaacacatttgttcttgtcagaattcttttaaaatacataaagatctgtttctaaagaaatgaaaagcaggtggtaggaattttaacattttaaaaaaaggctcagaaccacaggcctagggactatgaaaatagcttataacagtgtggtccagatgggctacatggaattaaactgcactctgttgatgtactctttgtggttcctgattttgttacccagaggtatcaatgttcagttaaaattcatttcatacaagtgtctcattgaaaagggactttgtagttatactgatgcagcttgtctgctgatcaagtcctaatgactcaattgttgtgattagaggctgcagtcagttcgggaaggctgtaggacccgcagccagtgcaggcactctggacctctcagggtggcgatgaagtttccagcgcggagtaccaggggagcaaccaacaaaaaagcagagtcccgccagccctcagagaattctgtgactgattccaactccgattcagaagatgaaagtggaatgaattttttggagaaaagggctttaaatataaagcaaaacaaagcaatggtaggtatctgactttgtgttagaattaatttttcctctctaagcgactcattacttaaatctgttccatcacgcaaaagttatttttttctgttacatgaataaaaagttatttttgtttacctgtgaagtcttcaatgtgtgcctcaaaatgtgtttctttccctgaactactttttttaaatctgttaaaggcctggttaagtgtataggggaaatcagaaactctgaatgtgtcagcttactatcaaatataaaaccatgagatgtacttgagtattttccagaagttagttgctcattttcgacagttattctaagccaatgatatcagtttaatttcctccctttttagcttgcaaaactcatgtctgaattagaaagcttccctggctcgttccgtggaagacatcccctcccaggctccgactcagtaagtaccagttcttgtttatatacagtagtgttttgggcacacctaaggtcgatctgtgttgtatttaaaaatctaatttctttatttgtgtggccttctagacaaacgaaggggacctagaggaaaccccctgacagatctctggatgatcctccttgaatcctgggcagtttggtctctccttgctgtgctcctgtggcactaaactccttttgattggttctttctttccttcccagctagactaagcccctcatgggcaggtaatgaagattgaaaacttttttctgttctccagtgtgagcacattcctcctacatggtagatgtgcaatagatgtttttaaaattggagaatgaaaataaaagaagaaaatcacaatttcttatcaagttgtagcttggtatcatacacaattgcattctgaggaattaaggtggtacaacttagggagatttggtgtgtctgctgtgatagaaaagatttctttttcctggctttccctgaggaaaggaaagatggaaagagggaagccatacagatatccctctattttgcagtgtagaaactgaatgtgtttctacagggtcaagagacatcagagaaaatttttttttttagaacagaagatcatttcttacatcttcattaagtaaaagaataaatagctcatctctcaagttgaaagaaactgggcttggtattacaaaagcaaaattaagatggccatataggttttaggctcattttgccatgcattatgcaaaggacaaagaaaaagaaaaaatagagctctctttacttaaaacatccttaaggagaagctatgaattccccaaagtactacttctctttattatggaataaatggattcccttatacgtgctttgtttagcaatcaaggagaccgcgaaggcgtacattcccgggtgttgcttccaggagaaaccctgaacggagagctcgtcctcttaccaggtcaaggtcccggatcctcgggtcccttgacgctctacccatggaggaggaggaggaagaggataagtacatgttggtgagaaagaggaagaccgtggatggctacatgaatgtgagttctccgcattggtacttgctcttctgattctcatcttcggtaggcctggcatcatacacagcacaggtacacgcacatccttaacaccaggcgatccatagtaaatgttttcctctaaccattcagaactgtaaacgtcacataagcttacttggtaattttattagcaggcgagaattgggttttcttcatctcttcttaattgtaggcatcgtttccaaaatgtccagttaggctacagtaagcgtatggcctgttcccctaccataagctctaggagagatttccaggttgaagtttgtgtgaagaaattacaagtcaagtatctgagattcaaagctggggagagccagttttgaatctctgtgtttcatatttgaatctgttttttcagttttgaatctctttcagtttttcagttttgaagttctgtgttttgtattccttgtaatgcaggaagatgacctgcccagaagccgtcgctccagatcatccgtgacccttccgcatataattcgcccagtggaagaaattacagaggaggagttggagaacgtctgcagcaattctcgagagaagatatataaccgttcactggtgagagcctctaaattacacctgagaatgtaaacatctgtgagaggaagagagcttctgtccctaagcgttgcccaggttctaaagggcctagcatgtgaaatctgtacctatatgtttttttcacacaaggaaggaaaagttttacagtatccctgggatttagccctctttcacagtggaattatctgcttagtaagtctgtagtcatggtaaatcttttctcctaatttagaaatcaattcattcaacatatatttactgcatatctattatgtgtgtatacatagctaggtgctggagtgtggtggtacaccaaagataaaagtggatttgggtaggttattttttaataagaccttttcttaaagggaaagcggttttaccacaccaggctaatttttatatttttagtggagatggggttttgccatattgcccaggctggtcttgaactccttggctcaagcgatccactctcctcagtctcccggaatgctggggttacaggtgtgagccactgcacctggttgagttatttttcataccctggcatatacatgtgtatgtagagattcatagacaaaatgtaagcctatactacgaagagggacattctgtaaatatgccatttcctctgttgaaaaacagtggttttttttgttttttttcttaatggcttatttgtagggctctacttgtcatcaatgccgtcagaagactattgataccaaaacaaactgcagaaacccagactgctggggcgttcgaggccagttctgtggcccctgccttcgaaaccgttatggtgaagaggtcagggatgctctgctggatccggtaggtgcctgccaggggttggtcctgtgggcttgaaggtcagccacaaactgtgatgaggccagaaaaaggcattggtgaaggggtggagccctttctgttatggggtgctcttctttttttttaagatggagtctcattctgtcgccaggctgcagtgcagtggcgcgatctcagctcactgcaacctcctcctcctgggttcaagcgattctcctgcctcagcctcccaagtagctgggactacaggcacgcgccaccacacctagctaatttttgtatttttagtagagacggggtttcaccacattggccaggatggtgtggtggtacaagatctcttgacctcgtgatccacccgcctcggcctcctgaagtgctgggattacaggtgtgagccaccacgcccggcccagggtgctcttaattcagaacacaaatgaattcagagggatggtgctgcataggcatgagccgcttctacgatactcgggtctgaactgtccctgggaagttgctgctccatttatccctggtagctgcttgtaacttccactcctggaaggaagcattaggcattaggaaacattaggcatgactaatgcctattaatcatataaatttttaaccataaagaaggggttaaatgtaatgtagataagttggtgggggaggtaaggtttaacttaattgtgccgtttgacaatcctccttcagaactggcattgcccgccttgtcgaggaatctgcaactgcagtttctgccggcagcgagatggacggtgtgcgactggggtccttgtgtatttagccaaatatcatggctttgggaatgtgcatgcctacttgaaaaggtagtgggtgtttttttttcccttccacatctgaattttatattcatttatgtcttaatgagaagatgatagatgtcagaagagtggttatctctggcggggtggagactgactggaacggggcacactggaagggatgggaacattttctgtcttcacttaggtggtggtaacccgggtgggtgggtgtgtatgaaaaagtcaggtaatatacttgaagatgcgcacacttgaccatagtgatgttataactcaataaaaatggttttaaaaatgaattaggctttcaaaagagaattctttggttgaaaactatgtcctgacacatttccttttgtttttcacagcctgaaacaggaatttgaaatgcaagcataatatctggaaaatttgctgcctgccttctacttctcaaatctttcttgtaaaagtttccaattttttcactgaaacctgagttaaaaatcttgatgatcagcctgtttcataagaaactccaatcaagttaatcttagcagacatgtgtttctggagcatcacagaaggtatattgctagttacactttgccctcctgcagttttttctntgctcccaacccccatctcacagcatccccctctatttccaatgctcctctccaaccgcttagtttctgaatttcttttaaattacagttttatgaaagcatattttatttacttggtgttgaaatagccctcataaaacctaagcacttggaaacacaataatagtattaactaactagatctattgaatttcagagaagagccttctaacttgtttacacaaaaacgagtatgatttagcattcatactagttgaaatttttaatagaatcaaggcacaaaagtcttaaaaccatgtggaaaaattaggtaattattgcagattgatgtctctcaatcccatgtattgcgcttatgttacaagttgttgtcacagttgagacttaatttctcctaatttcttctgcccgaagggtaagtggtgcgtccagcttacacaatcataattcaaaggttggtgggcaatgtaatacttaattaaaataatgatggaagagctatctggagattatgagtaagctgatttgaattttcagtataaaactttagtataattgtagtttgcaaagtttatttcagttcacatgtaaggtattgcaaataaattcttggacaattttgtatggaaacttgatattaaaaactagtctgtggttctttgcagtttcttgtaaatttataaaccaggcacaaggttcaagtttagattttaagcacttttataacaatgataagtgcctttttggagatgtaacttttagcagtttgttaacctgacatctctgccagtctagtttctgggcaggtttcctgtgtcagtattccccctcctctttgcattaatcaaggtatttggtagaggtggaatctaagtgtttgtatgtccaatttacttgcatatgtaaaccattgctgtgccattcaatgtttgatgcataattggaccttgaatcgataagtgtaaatacagcttttgatctgtaatgcttttatacaaaagtttattttaataataaaatgtttgttctaacttgtctgcttttttaaaaataatcttactgtacttaattctaattttttcctcatatttaaataaaaggccatttccaccttttctaaaaaa

SEQ ID NO: 757 - DNA, 14150 bp, Homo sapiens
tcggcgcgcccagcctgccagccgcgctgctgctgctcctcctgctgtgggaccgctgaccgcgcggctgctccgctctccccgctccaagcgccgatctgggcacccgccaccagcatggacgctcgccgcgtgccggtgagggctgggcgggcgaacccgaggggcgggcgcggtgggtgctggacgcaggcgggcgcgggccgaccctctccaactccgcagcctagcgctgccttaactggtggcctgcctaggcgttgcccgcttgggcaagcccctgattttgtgcacctgggataactgagggccatggggacgttcctgcgtggcgtgcgcacccgaagtgcgggcggcgtggagacttgagtcgtttgcaggatggctagcagcgctggaaagccctaggcacgtgcgtccgccaaaggccggacagcggccgggagcgctggccggtcccgattttgcctgccaggcagagccagcctgcctgccccctgggaggttgtcccgcagcggcccagccctttcccgcacacaactcggagccagtgcgtggctcgccgcgtctatacccgcgctcagtgggtggcccttgggcgcgcaccccgcccggcaagagacgcgtccgcttctaaccgctgagggccagcgcgtctgaggtttaaggtcttgcgaaccggtctcctagaacttgggctgcgcacgcagtgtgaagcgaccgtagtcccgggcggtggttaagtgcatttaaagggcttggtgggtcaaagcgttcgccgaccatttgctcgtttcctacttcctccaccccaacccccaaccccccaccccccaccccccagccttactcttagctgcaggacgttgctctgagtggaacgttactttttgctctaacggaagccagaacgtagggtcgggctcctggagagggtagaagagtgggggttgggtgaaacggaagacaatgacatgtttaaaataaatatcaggggttagggaccctcgcgggggtgggtgcgatggggcgtggtttcagagctgagtcgccgccccggtggagctgggcattggctttccggatgaagaaaaccatgtgtagctggtcttggaacctgacatgcctgagttcaaatctgagccaccatgggacttgagtaatccatttcgctttcctgagcctcagtttcctcattggctaagtgagaataacgatagcacctttgttgcaaagaattaaacctgacgtgaaagtgtacttaacatagtgcctggcacgaaaaacgcctactataaatggtattagttattacttacctgccaaagaagttcatctccgtcttgactatttgccttgctgcttttttgtggcttttcctccaaagatacgtttgcctggtaaataactcttggcttgtgctgacttgttaaagctcagcctgtatttctcggacagcttccaatagaatgccgcctttgaggctgtctggggcctctgactgcttgcaggtagattgatgagtaaagggtggtaattcctgcagtaatgcgatgaacactgctgcttaagaagatggcagacttgagttctccttcctgcccctgtgatcttgcagtctattacaccttcctggggccttgaatatcctcatctggaaaatgggatctgagatccttttcagctcccaacattcattgtgtcccaggctggagtgcagtggcacagtcacggctcactgcagcctaccgggctcaagcagtcttcccacctcagcctcccaagtaactgggattacatgtacgcaccgccacatccggctgatttttgtgtttttagtagagacggggtttcaccatattccccacgctggtctcgaactcgtgggctcaagtgatcctcccaccttggcttcccaaagcgctgagattacaggtgtgagccacccccctacacatacacctaacctttatatttagtagctctaccttttacacgttgtcctgccttgttaagagggcaaaagacaaaaacttcctaagatgattgaacggagtttacttaggggtatagggatgttgggagtgccatcatcatgaaaataactttatctgcaagagactgaaatgcgtaatgttaggccaagaaggagggcaagaatgttctggtcacctgacatcttacatcttagcatattttgtagaatctataccagagcttgccctttcaaagttttcagtgtaaggaatcacttctgctattccatggccccatttaaggaataaaaacacaggacctaatgcaacacttaggaaatctcgttaaatattaagaaatgacaaaccactatcctttttttatacaagatagatgccaattacattttctgagagcagtgccaggctgttcagtatttatgaatgaatgaagcatttctatgtaagtaatttgcactttataaaaggacttttaaaaacttaagtcttgtatagcaaagggacagcaacaagaactgaatgacagcctcaagtaatagagtgctaaaatggaatccggtatcccacctgcatttggagtgctatttgatctttaacttggctccttgtaccatttgttgaagcgtttgatgtatttgctttgtaaggacttctgtggaaatcacgatagccctcttgattggaaaggggcctgcttggaagcctgccatcttgaagtagaggtcctgcccagtttttgtagtttgtgaaattagcatcacagtacatagcccaaagcttacataaaaatacctcattagcttgattttggctgagggagaaaatctttctccccttttgtacttttgaaatttccttttagaagtacagtttaatttttttaaaaaaacaggttggattttaggagtttagcattaaaatctcctgtggggctcagtataatgctaagagctaaagattaggggctcataaaggtgggttgagaggtagctctacagatgtttgaataaattgataaatgtctttacaattttcctgcaaagggatcccttcttagaatttgacctggttttggccgggcgcggtggctcacgcctgtaatcccagcactttgggaggccgaggcaggcagatcacgaggtcaggagattgagaccattctggctaacacggtgaaaccccgtctctactaaaaatacaaaaaattaaccgggcgtggtggcgggcgcctgtaatcccagctactctggaggctgaggcaggagaatggcgtgaatccatgaggcggagcttgcagtgagccgagatcgcgccactgcactccagcctgggcgacacagcgagactccgtctcaaaaaaaaaaaaaaaaagaatttgacctggttttaaagatttttgggtccagatacagtagctaatgcctgtaatccaagccctttgggaggctccggtgggaggatcacttgagcccaggagtttgagaccaacctgggcaacatagcaagaccccatctctaaaaagaaataaaataagttagctgggcatggtggcacatgcatgtagtcctgtctactcaggaggctgaggcaggaggcttgcttgagctcaggagttccaggttgtagtaagctatgatctcagcactgcactttagcctggaagacagagcgagatcctgcttcttacaaaaaaaagaaagaaaaaattttttgtagcagttaacaaacttccttttctatgtagggtatgataaatggacatatctactctgtgctgtttgaacctactaaactaaaaaaaaatgatgtctttagttaaataaagtaagcatcacgcttaataggattgctatttccatttgcagcagaaagatctcagagtaaagaagaacttaaagaaattcagatatgtgaagttgatttccatggaaacctcgtcatcctctgatgacagttgtgacagctttgcttctgataattttgcaaacacggtaagtgctgcctgagaataaacagaattgagtctgcagtgctcaaaatgccccagatgctttgtgcgtgattaaaactgcttgctttttgcctacatttctatacagccgttatgaaaatacagtatgcactataatttcatttcactttttgctgtggttctaggtagtaattgttggaggtagattagctacttattctatccttttgaaatgtcgcctaacctaacatgcatgatgatttgccataacaactcagaaatcatttgtaaacctctgaaccatttttctttgtaacaaaagctgttctcttgtagtgcacttgtaaatgtgatttgctctctgcacggtttatggaaaattggttcttgaaaaagaaaaaaaatgcacaaccgcatttatttatttattttacagaaacctaaattcaggtcagatatcagtgaagaactggcaaatgttttttatgaggactctgataatgaatctttctgcggcttttcagaaagtgaggtgcaagatgtattagaccattgtggatttttacagaaaccaaggccagatgtcactaacgaactggccggtatttttcatgccgactctgacgatgaatcattttgcggtttctcagagagtgagatacaagatggaatggtgagttcgagaatttcaccagtttcaagaagtaagatacatttagaggcatgacatatttttagaaatttttttcttgtgattttgattttagtcatgccagcagactttgttgaccttttaaaaatttttagtgttttcttcatgtcttaaagcagtgtttactaatgtagtcggacttacaaatcatgaacattttgtaggctctgaaaatttggaaactggtaagataaaattggccaatctccagattttcgtttccacaaaaatccagcctaatcaggaagcacactagttctaaatattatctacatttgcatttaagttcaagtgcccagcctagtgcctgtcatagagcagacctttgataaatgttggtctcatagtagatctgtggctgcatcttgaaaacctgtgataacttacgtgcaggagctccattgcagataatgacattgagggcccttcctgctgctacttttgctccttggttggcttttcctatgcacgctaccttcctttaactgccgctgccactgttgtgctgtgcctcggtcccactcttctgagcatactgcttaattctgcacacattttcctgttccaaagactttcttgacaaaggaagcagtgcattcactgataatcaagtgcatgctcttcaactcactggtctgacatggatccactgcctgaggttcatggtttgagtaacattgatagaagtggcagtgcctggccaaggagtgttttggtccaaatcagtgcatactggagtttgttgcagggggtccagtctgcagatctggatgcgacacaaacattgtcaatagcctgaataatttctgggcagtgtttcagttctttgaagatactgtcatgattaataaaatgccaattcattataattgttaggaactcatgaaaggtttttgttgttttgtactctctcaatccatggacactaaaagtacaaaaagctgtttgtgggcatgtaagacttttgagacagggtcttgcactgtcaaccaggctggagtgcactggtgtgatcatggctcactgcagcctccacctcctgggcttaagcgattctccctcagcctacccagtagctgagactacaggcgtgtaccaccatgcctgggaacttttaaaaattttttatagagatgtgggctcactttgttgctcaggctggtctcgaactcctaggcccaagcaatcctcccgtctcggcctccaaaagtgctgggattacagccaagagccaccttgctggccttgataaatattttaatgttaaaactgagtctttatgggtgaaattctgggatttatgggtgatttttttcttctctctctctttttttttaacctgcaaccattaccatagtcaattttggaataactttatgaccccaaaaaatgactctgtacccattaacagtcactccctattctttcccaacacccccagctcctggcaaccatcagtctgctttctgtcgtcatagattagcccgttgtggatatttcataaaaattgaatcatgatatgtggtcttttgtgactggcttctttcacttaggataatgatgtcaaggtttatttatgttgtggcatgtgttagttcttcattttattgcagaatattctgttgtgtgaatcagccacatttgatttacccattcatcagttgatggataagtgggttgtttgcacttttttggctattatgaataatgctactgtgaacattcatgtacaagtttttgtgtagtttttgtgtatactcttaggtatatacataggaatagaattgtgggtcatgtagtaactgtttaaccttttgagaaatagacaaagtggctacaccagtttacattcctaccagcagtgtgtgagggttacagtttctccaaatttttgctaatacttttttttattttccttttgctttttttttttttttttgagacagagtctcactctgtcacccaggctggcgtacagtggcataattttggctcaccacaacctccgcctcctgggttcaagcgattcttgtgtctcagcatctgagtagctgggactacaggcatgtgccaccacacctggctaattttttatatttttagtagagacggggttttgccatcttggccagactggtctcgaactcctgacctcaggtgatctgcccatctcagcctcccaaagagctgggattacagatgtgagccaccatacccagccttcttttgctttttagctctactatgaagtggtgtctcactatgttttgtgtttttttttatttttatttttcggagacggagtcttgctctgtagcccaggctggagtgcagtggtgtggtctcagtgatctctgctcactgcaacctccgcttcctgggttcaagcgattctcttgcctcagcctcccaagtagctgggattacaggcgtgtgccactgtgcctggctaatttttgtatttttagtagaaacgggatttcaccatgttggccagactggtgtcaaactcctgacgtcaggtgatccgcctgccccggccttccaaagtgctgggattataggcatgagctaccgcacccagccttgcattgtgattttgatttacattaccctatggctaatttggataaatttttaatgatgaaaacctatattacttttggaatctggaaatattttcattttgaacttctaaaagtagattagagaagtacctagagaagtcaaatgtatagacagaaaataggatgatggttgccaggggcggagggaaagagggaatgaggaattactgtttaatgggtatggatggagttttagttggagaagatgaaaacattctggagatggatggtggtgatggctgcacaacaatgtgcatgtatttaatgccattgacttgtatacttagaaatggttaaaatgataaatcttatgtatattatattatatattttttaaagtagagaattgagatctgttaatataatttaatattgccataaacattgaagccatatttataggggaacacatttttttccctttttttttttttcaagacagggtctggctctgtaacccagccctggcatacagtggcacgaacacggctcactgagcctctgccccctgggctcaagccatccacccacctcagccttccaagtagctgggaccacaggcatgcgccaccatgcccagctaatttttgtatttttttttgcagagacggggtttcaccatgttgcccaggctggtctcgaactcctaggctcaagtgattcacccgcctcagcctcccaaagtgctgggattacagatgtgagccactgcacccagccaggagaacacatttgttcttgtcagaattcttttaaaatacataaagatctgtttctaaagaaatgaaaagcaggtggtaggaattttaacattttaaaaaaaggctcagaaccacaggcctagggactatgaaaatagcttataacagtgtggtccagatgggctacatggaattaaactgcactctgttgatgtactctttgtggttcctgattttgttacccagaggtatcaatgttcagttaaaattcatttcatacaagtgtctcattgaaaagggactttgtagttatactgatgcagcttgtctgctgatcaagtcctaatgactcaattgttgtgattagaggctgcagtcagttcgggaaggctgtaggacccgcagccagtgcaggcactctggacctctcagggtggcgatgaagtttccagcgcggagtaccaggggagcaaccaacaaaaaagcagagtcccgccagccctcagagaattctgtgactgattccaactccgattcagaagatgaaagtggaatgaattttttggagaaaagggctttaaatataaagcaaaacaaagcaatggtaggtatctgactttgtgttagaattaatttttcctctctaagcgactcattacttaaatctgttccatcacgcaaaagttatttttttctgttacatgaataaaaagttatttttgtttacctgtgaagtcttcaatgtgtgcctcaaaatgtgtttctttccctgaactactttttttaaatctgttaaaggcctggttaagtgtataggggaaatcagaaactctgaatgtgtcagcttactatcaaatataaaaccatgagatgtacttgagtattttccagaagttagttgctcattttcgacagttattctaagccaatgatatcagtttaatttcctccctttttagcttgcaaaactcatgtctgaattagaaagcttccctggctcgttccgtggaagacatcccctcccaggctccgactcagtaagtaccagttcttgtttatatacagtagtgttttgggcacacctaaggtcgatctgtgttgtatttaaaaatctaatttctttatttgtgtggccttctagacaaacgaaggggacctagaggaaaccccctgacagatctctggatgatcctccttgaatcctgggcagtttggtctctccttgctgtgctcctgtggcactaaactccttttgattggttctttctttccttcccagctagactaagcccctcatgggcaggtaatgaagattgaaaacttttttctgttctccagtgtgagcacattcctcctacatggtagatgtgcaatagatgtttttaaaattggagaatgaaaataaaagaagaaaatcacaatttcttatcaagttgtagcttggtatcatacacaattgcattctgaggaattaaggtggtacaacttagggagatttggtgtgtctgctgtgatagaaaagatttctttttcctggctttccctgaggaaaggaaagatggaaagagggaagccatacagatatccctctattttgcagtgtagaaactgaatgtgtttctacagggtcaagagacatcagagaaaatttttttttttagaacagaagatcatttcttacatcttcattaagtaaaagaataaatagctcatctctcaagttgaaagaaactgggcttggtattacaaaagcaaaattaagatggccatataggttttaggctcattttgccatgcattatgcaaaggacaaagaaaaagaaaaaatagagctctctttacttaaaacatccttaaggagaagctatgaattccccaaagtactacttctctttattatggaataaatggattcccttatacgtgctttgtttagcaatcaaggagaccgcgaaggcgtacattcccgggtgttgcttccaggagaaaccctgaacggagagctcgtcctcttaccaggtcaaggtcccggatcctcgggtcccttgacgctctacccatggaggaggaggaggaagaggataagtacatgttggtgagaaagaggaagaccgtggatggctacatgaatgtgagttctccgcattggtacttgctcttctgattctcatcttcggtaggcctggcatcatacacagcacaggtacacgcacatccttaacaccaggcgatccatagtaaatgttttcctctaaccattcagaactgtaaacgtcacataagcttacttggtaattttattagcaggcgagaattgggttttcttcatctcttcttaattgtaggcatcgtttccaaaatgtccagttaggctacagtaagcgtatggcctgttcccctaccataagctctaggagagatttccaggttgaagtttgtgtgaagaaattacaagtcaagtatctgagattcaaagctggggagagccagttttgaatctctgtgtttcatatttgaatctgttttttcagttttgaatctctttcagtttttcagttttgaagttctgtgttttgtattccttgtaatgcaggaagatgacctgcccagaagccgtcgctccagatcatccgtgacccttccgcatataattcgcccagtggaagaaattacagaggaggagttggagaacgtctgcagcaattctcgagagaagatatataaccgttcactggtgagagcctctaaattacacctgagaatgtaaacatctgtgagaggaagagagcttctgtccctaagcgttgcccaggttctaaagggcctagcatgtgaaatctgtacctatatgtttttttcacacaaggaaggaaaagttttacagtatccctgggatttagccctctttcacagtggaattatctgcttagtaagtctgtagtcatggtaaatcttttctcctaatttagaaatcaattcattcaacatatatttactgcatatctattatgtgtgtatacatagctaggtgctggagtgtggtggtacaccaaagataaaagtggatttgggtaggttattttttaataagaccttttcttaaagggaaagcggttttaccacaccaggctaatttttatatttttagtggagatggggttttgccatattgcccaggctggtcttgaactccttggctcaagcgatccactctcctcagtctcccggaatgctggggttacaggtgtgagccactgcacctggttgagttatttttcataccctggcatatacatgtgtatgtagagattcatagacaaaatgtaagcctatactacgaagagggacattctgtaaatatgccatttcctctgttgaaaaacagtggttttttttgttttttttcttaatggcttatttgtagggctctacttgtcatcaatgccgtcagaagactattgataccaaaacaaactgcagaaacccagactgctggggcgttcgaggccagttctgtggcccctgccttcgaaaccgttatggtgaagaggtcagggatgctctgctggatccggtaggtgcctgccaggggttggtcctgtgggcttgaaggtcagccacaaactgtgatgaggccagaaaaaggcattggtgaaggggtggagccctttctgttatggggtgctcttctttttttttaagatggagtctcattctgtcgccaggctgcagtgcagtggcgcgatctcagctcactgcaacctcctcctcctgggttcaagcgattctcctgcctcagcctcccaagtagctgggactacaggcacgcgccaccacacctagctaatttttgtatttttagtagagacggggtttcaccacattggccaggatggtgtggtggtacaagatctcttgacctcgtgatccacccgcctcggcctcctgaagtgctgggattacaggtgtgagccaccacgcccggcccagggtgctcttaattcagaacacaaatgaattcagagggatggtgctgcataggcatgagccgcttctacgatactcgggtctgaactgtccctgggaagttgctgctccatttatccctggtagctgcttgtaacttccactcctggaaggaagcattaggcattaggaaacattaggcatgactaatgcctattaatcatataaatttttaaccataaagaaggggttaaatgtaatgtagataagttggtgggggaggtaaggtttaacttaattgtgccgtttgacaatcctccttcagaactggcattgcccgccttgtcgaggaatctgcaactgcagtttctgccggcagcgagatggacggtgtgcgactggggtccttgtgtatttagccaaatatcatggctttgggaatgtgcatgcctacttgaaaaggtagtgggtgtttttttttcccttccacatctgaattttatattcatttatgtcttaatgagaagatgatagatgtcagaagagtggttatctctggcggggtggagactgactggaacggggcacactggaagggatgggaacattttctgtcttcacttaggtggtggtaacccgggtgggtgggtgtgtatgaaaaagtcaggtaatatacttgaagatgcgcacacttgaccatagtgatgttataactcaataaaaatggttttaaaaatgaattaggctttcaaaagagaattctttggttgaaaactatgtcctgacacatttccttttgtttttcacagcctgaaacaggaatttgaaatgcaagcataatatctggaaaatttgctgcctgccttctacttctcaaatctttcttgtaaaagtttccaattttttcactgaaacctgagttaaaaatcttgatgatcagcctgtttcataagaaactccaatcaagttaatcttagcagacatgtgtttctggagcatcacagaaggtatattgctagttacactttgccctcctgcagtttcttctctgctcccaacccccatctcacagcatccccctctatttccaatgctcctctccaaccgcttagtttctgaatttcttttaaattacagttttatgaaagcatattttatttacttggtgttgaaatagccctcataaaacctaagcacttggaaacacaataatagtattaactaactagatctattgaatttcagagaagagccttctaacttgtttacacaaaaacgagtatgatttagcattcatactagttgaaatttttaatagaatcaaggcacaaaagtcttaaaaccatgtggaaaaattaggtaattattgcagattgatgtctctcaatcccatgtattgcgcttatgttacaagttgttgtcacagttgagacttaatttctcctaatttcttctgcccgaagggtaagtggtgcgtccagcttacacaatcataattcaaaggttggtgggcaatgtaatacttaattaaaataatgatggaagagctatctggagattatgagtaagctgatttgaattttcagtataaaactttagtataattgtagtttgcaaagtttatttcagttcacatgtaaggtattgcaaataaattcttggacaattttgtatggaaacttgatattaaaaactagtctgtggttctttgcagtttcttgtaaatttataaaccaggcacaaggttcaagtttagattttaagcacttttataacaatgataagtgcctttttggagatgtaacttttagcagtttgttaacctgacatctctgccagtctagtttctgggcaggtttcctgtgtcagtattccccctcctctttgcattaatcaaggtatttggtagaggtggaatctaagtgtttgtatgtccaatttacttgcatatgtaaaccattgctgtgccattcaatgtttgatgcataattggaccttgaatcgataagtgtaaatacagcttttgatctgtaatgcttttatacaaaagtttattttaataataaaatgtttgttctaacttgtctgcttttttaaaaataatcttactgtacttaattctaattttttcctcatatttaaataaaaggccatttccaccttttctaaaaaa

SEQ ID NO: 758 - DNA, 303 bp, Homo sapiens
ttggccgggcgcggtggctcacgcctgtaatcccagcactttgggaggccgaggcaggcagatcacgaggtcaggagattgagaccattctggctaacacggtgaaaccccgtctctactaaaaatacaaaaaattaaccgggcgtggtggcgggcgcctgtaatcccagctactctggaggctgaggcaggagaatggcgtgaatccatgaggcggagcttgcagtgagccgagatcgcgccactgcactccagcctgggcgacacagcgagactccgtctcaaaaaaaaaaaaaaaaagaa

SEQ ID NO: 759 - DNA, 522 bp, Homo sapiens
cttcctcaaaagtatataaaatttgaaaagacctagaagtgatctagtggaatgaagacgctgaggtaccattgaggttggggaaactactgggacgtgcttacaggataaactgcaaaacaaaagcacaagtttgtaatcatggaatgacatgccttattctgaaaacttaacgtttgtagcgtaccttataattcataagacatttaaaaatggtattgaatcccaataacctatgcgtagggttggatcttgttgttatccctgttttttaatggaaaatctgaggcctgaagatggtaggccatgtatatgcctgccccgccgttgagcctggctcctgctgttggagaaactttcccagtctgtagagagaggatgtggtcctggcaagcctggctcctgcctgattctgtatcttctggtaacacacagccgtcatttaaaaaaaaaaagacaaggtctttccctctgacagactaaaagctgaatccgcttatttcgaactctgccttgaggcgg

SEQ ID NO: 760 - DNA, 607 bp, Homo sapiens
ctcaaaaatacttcatccatttgagcaatatgaaagaataggctagagagaaacagatttggtttttcaagctaaaaagaataacagaaagtgggcgagtcttcagtgagctgtctgcctttgaaacctaggaagtaaacttaatttggatgtgcatttaggagatgaagcactacaggtggtgaaatgctctagcaatgaagcagggaagggagaggggggaaaggaaatttgagccaagcaacctgaaggtcaggggaagccggtcttacagatgttaagggaggaatccaagtaggcaaaggggatgaacagcagtgcaaaggctctggggcagcaggttgcccggtatgttccagaacaggaaggaggccagtgtggctggcatggagagctaaggctcaaaggagaaagtgaagagaaagaggtagtaagggaccaggaggaattgagcccggccagccgtgctactgatgttagcccacatgtcacagtgtgtgagggagatagagtccttgggaacaataatatgcagagcttttaaaaactttcatactgtagccatcaattccatcatcatggtggtggtatccctgggtggtggtgg

SEQ ID NO: 761 - DNA, 741 bp, Homo sapiens
tagagatcctggcttcacaggaaagagccaagggcatgggttttgctgagggcgtaagagcttggggaaggtgagggctaggtgtgtacgggtgccctgatgtcctcttagcctgctggtgaggaaagtgcatgtttaataaatgggctccagccaactgtgtgcagttatttgtagcctgcataattttaaaaatgtggttgagcatttaggtctatcttcagaatttaggctccatttgacttagttttcctgaaatatgtagaaaactaatggtgaaagaggacctaattcttgaattatctgcttgaactgtgttgctagttattccaagtagaatttgtaaaatggtccatcattctctaagcaaaatgagggaaataacaattattttctagaaatttcatatatattgaatattacaaaatcatgtaactagaaatgtttaaatggtcacactgggccaggcacggtggctcacgcctgtgatcccagcactttgggagaccaaggctggtggattacaagatcaggagtttgagaccatcctggccaatatgatgaaaccctatctctactaaaaatagaaaaattagctaggtgtggtggcgcatgcctgtagtcccagctgcttaggaggctgaggcaggagaatcgctggaacccgtgaagcggaggttgcagcgagccgagattgcaccactgcgctccagcctgggcaacagagcgagactccatctc

SEQ ID NO: 762 - DNA, 1423 bp, Homo sapiens
agcagaggtaattaataggcagttacaatgtggaagattctggaaagtagagttctgttgtctgaaatttagtctgacagaggaatattagcaagataaatgtatttggaccaagcactcccgagaggaagggcatgctcaaattgtttctgtaaaaagtctctggcggtgtttggctcccttctgcgtccttcatgaaacagttctccttgagtattacggttggcaagcatgtgggtgggggagatgtcacacgcacccgctccagctgtacaagcaagccactgcgaggattagacgcttgttagttatgaacttaggtgtctggtctgtttctttgcctttcaaaggcacttcctggcagagaggtacaatggtgctttgcaggaaaccctgtgcccacagcatctgttctgcagcttggcagaccgcagctggccctgagcatggcctactaattctctgggtcaggtgtggctgtggtgagatggatctcagccaggtaagaccctctaatctctgttttctttctcctgccatagatacactgatgattggagggtatgacaggaattcttgcctgcctttgggtcgtgagggaaacagagacagcgtaatggctttttggagtgccaggagcagagtccccagagttcattcttagaaaactatgaagctgttctttgaactccaactttttctcctatattcattcagggctctttcctctacaaccccctcattcttgctgttgatagatgcctctttcctactctctaaatgtccaattttatcttcctttggaatgccatcaaattcttcctccctttttctgtaccccacctccaaaaataatcccaacacccacctcgtcagagtgtccatttatttcctcagggctaatcccagaaggagcatacaagttggtgaactcatactaatatgtgaatgattgttgcccttggatggttagaaaatcaaggtagttgtccactgtagaagattgtttaaagccaagtggttaagaatattctatatccttccttttgcatatattatctcgttcatccttgtgaagcagataatctcaccatctcaatgtacagaaaaggaaactgaggctcagaacattttgagtagcctacttaaatagtctaggcagagattgaacccccacgtctctggccccaagaggtcttgataattccctcacaactgctgcctaacagcagataaaatatatttggattcttctcacctttaagaaaacctagtaagttaatctctaaaaatcagcaatctgctcaggggatacagggagaactaggactattgtcccaaatgtgtagtcatatttatctgcttaccaaatgaccatgtgttgaatccctgaaaaccatgggagaaataccaattaaaaaaa

SEQ ID NO: 763 - DNA, 913 bp, Homo sapiens
tgtacacattttatttccttttcatgtcttgttgcactagctagaactttcagtattgaaagtagtaaaagaagccatgcttgccttggtcctttgtcttagtgggaaagcttccagtttctcaccaacatgatgttagctgtagtttctttgtagatgttctttaagcagttgaggaagttcctctttattttcagtctttggagagtttttatttttatcccatacttcatttcaaaatgctgagaggtttctttgttgttttgttttgtttgatcatgaatgggtgttggattttgtcacatgctcgttcagcatctattggtatgatcatgtgatatttctttagtctgttgatgcgatggattgcattaattgatttttcaaatattgagtctgccttggttgtggtatataattctttttattaaattgttgcattccgtttgctaatattttgaggatttttacatctttatttatgacagatactttaatatccataggatttgcagtgatgcctgctctttcatttcttactttttttttttgagatggaatctggagcccaggctggagtgctgtggcgaaatctcggctcactgcaacctccgccttccggttcaagtgattctcttgcctcagcttcccaagtagctggaactacaggtgtgtgccactacgcccagctattttttattcttttttgagacagagtctcgctctgtctcccaggctggagtgctgtggggcaatctcggctcactgcaacctccacctcccaggttccagcgattctcctgcctcggcctcccgagtagctgggactacaagcgcccaccaccacgcccggctaatttttgtattttcagtagagacggggtttcaccatattggcctggatggtctcgag

SEQ ID NO: 764 - DNA, 406 bp, Homo sapiens
atttctttttattgctgattaatatcccattgtctgaatataccacagtttatttattccttcatctactgaaggacgtcttgattgcccacaagttttggcaattatgaataaagctgctataaacattcatgtgcaggtttttgtgtgggcactaagtttcctctcctatggatgaataccaaggagtatgattgctggatcatatggtaagagtatgtttagttttgtaagaaaccaccaatctgtcttccaaagtggctgtcccattttatgttctaccagcaatgaatggagtttctgttgcttcacagcctccccagcatttggtggtgtccgtgttctgaattttggccaatctaataggggcatagtggtatcttatgttttaatttttatgccccca

SEQ ID NO: 765 - DNA, 297 bp, Homo sapiens
ggttttctttcgtttttgagacggagtctcgctctgttgcccaggctggagtgcagtggcgcgatctcggctcactgcaagctccgcctcccggattcatgccattctcctgcctcagcctcgcaagtagctgggactacaggcgcccgccaccacgcccggctaatttttttttgtatttttagtagagtcggggtttcaccgtgttatccaggacggtgtcgatctcctgacctcgtaatccgcccgcctaggcctcccaaattgctgggattacaggtgtgagccaccacaccc

SEQ ID NO: 766 - DNA, 1403 bp, Homo sapiens
actgtaccaaggcttcagagtgagcagggggacatctggataggttagccagggccacagagagaagagctgcttacacctgaattgtttcacccttttcaagaacagggttgtccttctccccatctggatccttgggctagatctctgccgaggggctccgtcaagtcccgcaaggctagagaagggagccccacatcatttccactttcaaagagggaagatgctcgtcattcaaattacttctgttgatttccatggtatccccctgtccgtcccacaatctcttaccaggcgtcaatgcacatgcaggggatggaaagaggatgagccgatgagcagactttgcattaatcaaggagaaagaaaaagcagatggaaggaggtaggtagatggagaaagcaacagctccttttagcccttgatgatggccctgaaggcctgtctcttttagtgactcctctttgggtcctcttcccctacctctcagtgactaggttcctcatattaattccctgctgtgagtttggctccttgtgctgggcaattcagtcatcctcagaaagagcaaagttggtcttggaattaaggtgcaggtggggaaaaagagggactcagctagacacgaagaaaggctctcttcccagtctaagcccttctaccgtaaggggcattttatcaagacagccacccaactccccatcccatctcccctcctttgtagaaacagcatttgactcaccaagcctttctctccctttccgtgtgtcttgcttagtttctggattgagagaatttctatccttgctccctcgaactctaaaagagcttcttttgaaaactggggagtatcaggcctacctctacatgtgcaacagtgccaggattcaaaggaaaagctcattccagcctctgcctcttgggagatggttcagagtgccacatagggactgaaagagggtgtctgaatccttcaggaatgctttaagtgacattgttgaaaagagataaagaaaaggaaaacaatggaattgggtttctaaggtccctggaaatatcctgggggtctaatagagaaagaaaataagaggaaatttgaagactcacttcttccttcatctgaatccactcagatggcaactgatctctgtcccaaggaccctctaccccacccaattcataatcatctcagattagaaaaggcagaattccttcccattctcaaatcagcatttgggttaggggcccctaagttacgtgagcatgttagaaatgtgaccccaggcctcaagagagaggctctgccacatgagaggagataggaatcatgactgaaaggggattagcacagaacagagaaaactgatttgatagacaaatcaaatagaaaatataaaaaaaa

SEQ ID NO: 767 - DNA, 10337 bp, Homo sapiens
gcctcatcatcgttgtcatagttgggcacagtgctgaagctgccagctcgctgctcatgggtaataccacattcgggcaagttttctacggacctcgtactccgaattcggttctcggggatccgggcagggacactggtggtgtcaaagttttcacattcaaggacttccacataaatcaggtagggagcctgggggaagagtgagacagtatttgcaacttacttccaccactaacccccaaatctcaactctgttagcaaggttcttcctgctgtcctttctcctagctccagccttcatccaatagtcctctgaaactatgaacactatatttagggcagatacttgtcctatgatcacctatgtaaagaatttgtgtgacagaatccttaagtcttcaaaatatttcaactgagctccaaaatgtacagatgatgtgcttgggccaaaccactctagactatcaattacaggctgtaagggaggcctagatgcctctgtgggctcgtcctgaagacagggcccagggagctacagtggacaaaaagactgggacaaagctgggcactgtcccaaggagtgtcccaaacttcagtatttcctttgaaagaagaatatgggccgggcgcggtggctcacgcctgtaatcctagcactttggggggccgaggcgggtggatcatgaggtcaggagttcaagaccagcctggccaagatggcgaaaccccgtcgctactaaaactacaaaaattagccgggtgtggtggcaggcgcctgtaatcccagctactcaggaggctaaggcaggagaatcgcttgaacctgggttgcggaggttgcagtaagccaagattgtgccactgcactccagcctccgcaatagagtgagactccatctcaaaaaaaaaagaagaatctgaaccatgaatactcattccagtcagcacacaaattcagctaattctctccagtgtgaattgggcatccttctctccttttgtcggctcattctgatcagaaaaggtcttagaaacaaaatatttctctatccttatggttgctgtatctggaaagcccaagagttatagaaaggctggagaaaagctaccaaaatgaccataaggtggggtgaagagcaattctcctaagatacagcaagaaggaagctaaaaagattaggtttctttggtccagaaaaacaaaacccaaaaagggatacaggggggctctcaaaatcacaatcgcactgagacagagtcatggttgacatatgcatcatgaactatgaagggagtctaggatgttggtgagggcctcactggtcatacacgcaaactctgaacaaccatgggtgaagagtcacgtccagggtaggggtttgggccagaacccatctaccttgtccttggagttgaggacaacagcctgtgtgtggggtacacggaccacgtggtggtcaaagccagcagtgggcagccagactcgggcagggagcttatggttgagcagggagagctctgagatcagcctctgtgttttctgctctttggtggggagcgtggccagccgcttgccgatcgccatcagggacttgatgaattctctctcaggagccagtcgaacaggctacaggggtttggggtaagacaaaagatggtgaagaaaccatagaatacaatggcacacccactcagtcactcctggccatgcaggccggggaccccactatctggagaactccaggaaaggagctgctttttagtcttagtaggagcttccacccacccttcacaacttgaattgagaatagccagcacattccttccctataggctatcccttgagggtaagggaggccatgagtccaggtaactgggatgcactcctcttctcctggacttgggttccttaaggactgtaccaaggcttcagagtgagcagggggacatctggataggttagccagggccacagagagaagagctgcttacacctgaattgtttcacccttttcaagaacagggttgtccttctccccatctggatccttgggctagatctctgccgaggggctccgtcaagtcccgcaaggctagagaagggagccccacatcatttccactttcaaagagggaagatgctcgtcattcaaattacttctgttgatttccatggtatccccctgtccgtcccacaatctcttaccaggcgtcaatgcacatgcaggggatggaaagaggatgagccgatgagcagactttgcattaatcaaggagaaagaaaaagcagatggaaggaggtaggtagatggagaaagcaacagctccttttagcccttgatgatggccctgaaggcctgtctcttttagtgactcctctttgggtcctcttcccctacctctcagtgactaggttcctcatattaattccctgctgtgagtttggctccttgtgctgggcaattcagtcatcctcagaaagagcaaagttggtcttggaattaaggtgcaggtggggaaaaagagggactcagctagacacgaagaaaggctctcttcccagtctaagcccttctaccgtaaggggcattttatcaagacagccacccaactccccatcccatctcccctcctttgtagaaacagcatttgactcaccaagcctttctctccctttccgtgtgtcttgcttagtttctggattgagagaatttctatccttgctccctcgaactctaaaagagcttcttttgaaaactggggagtatcaggcctacctctacatgtgcaacagtgccaggattcaaaggaaaagctcattccagcctctgcctcttgggagatggttcagagtgccacatagggactgaaagagggtgtctgaatccttcaggaatgctttaagtgacattgttgaaaagagataaagaaaaggaaaacaatggaattgggtttctaaggtccctggaaatatcctgggggtctaatagagaaagaaaataagaggaaatttgaagactcacttcttccttcatctgaatccactcagatggcaactgatctctgtcccaaggaccctctaccccacccaattcataatcatctcagattagaaaaggcagaattccttcccattctcaaatcagcatttgggttaggggcccctaagttacgtgagcatgttagaaatgtgaccccaggcctcaagagagaggctctgccacatgagaggagataggaatcatgactgaaaggggattagcacagaacagagaaaactgatttgatagacaaatcaaatagaaaatataaaaaaaatcagccaaactcccagaggtcctgcatttcctctcacgtctttgcccagcaacaaggtccaagaccctgtgggaccaaagggtcaggggttagtccagagggaacaagaaaggagaggggattaaggaacatcctgggcagtgagctgggaaaagggaagaactcagacctggaaaaaatgtggttgaagttaaaaaagaaaaccagttgtggagaggcaaaactttccttcaggccaagtcctatttgtttttggagtcagctcaccagcacagggcctagcatttagaagattatgaataaatatttgataatctgacggcagaagccatggggaaagggttctgggtgggagaaacaggatcctgggggtttctgccaggcagtttttggctctaatccaggagtgaattctacctctctcccagctgtttgctccagacactcaggagctgggggctgagcagcactgtactccagctgtctctgagagaaggatcagctgagctcatctcagcctgggctcaggatttccaccgcaaaggtcaggggaactccagcagatctgggaggtctgggagggaggagctgatctcccagtaagaaaaggggcattttaactccagccttggcctgggggctcagaagacctggggacggagaggaaatgcggccactgggggagcctgccaccccgtcccagcctggccccacttacggaactgaatgaattatcaatactctcggtgctggaggagagctcctgggaaagggccagagggcaaagggagaaggagggggtgggaagggaggggagagagacaaaggtaaagaatttagctccaacttggatcgtaactgcttctctagtgcagttctacctttctgctttaataaaagaaagtcaactcagaaatgctacttgcccagatgcttgaccacttgtaggagatgctggaagggcagctcagactttaaggtcagaaggactgaagagacaaagcagcctctgcttttcactttattcacttctattctcaactgaatggatcttccttctaggccaaagctctaaagctgggtccctagggcagtaactgcactgccaagcttccctgctctttttttttacccactcacatgctctcaaccaaatccttctccatggggaccaccacaggactgaacttaataagctgcatggctcccatactggaaaccccatgttcctccagctttttggaaacctcagggaggaagaaaagctaaactttcagtggcaggtatacctcttctctaattagcctcattatcaccctgggaagctgaatcccaaccttgaacctctgtgacaaagagcatcctagaccaataagcccaaaatctctgggctggatgctgatgggagtgaaggataaatcaatctcctatctaccaaacctccttaggcttcctatcaggctatccacatgacaatcaatatactacaatttttgatataagttggggagttagctatatccatctagaaagctgactagctggatagcagctgtcctagtcccagcccagaggatttatctaaacatcaccccattgctgtgtcatatgtgtccgtgtgcaaaaacaggggaaagagatggtgtcaaactctcactcagcagctctgaggcaacactcatgcacagggctcatcctgggttctgtccaacatggtctaccagggcagggaacagagcagcacgtgtgcacaaatctaggttgtgggggacgttgaggtcggggtgggggaggttagacttaaaagacaaagtcctaagagctcccagggcaggagggcagtggtgagtttctactctgaaatctgctgagtagattcaagcatccacttgaactcaattccatggtttcagttctattctagctggaggtcctatagtcaggtccttccttgaagaatctggggactggagcactttgagggagaagccacatttggaaacatgcccctaaggcaacaactcttccattttgggtagaaggtggtgggagaattaaggcagtgaggatgtcagagtctattatgaattagtggttctatttctacctatgagctggttggagaaggaacagcaggcaagatattggctccctgagcaacgctccagctgattctgtcacagacaggtcctgtctgactcattgacagccctgggggaagggaggtatatcatgacctgctcctctcctactccctgggcttgagtcactcacactgagtcagctccggggagtaaagatgaagcaagaagctgacatcacaccatatcaagctagaaggcctactggggcttccagtgtgacatgcggcagatttctctgtacaaaggttgcagtcctgaaaagacaaagctaatctactaacagtgtcatcatatcggggagggtgtgatacctaaatcactctctccttttagctcccccattctataccaaaatatttgccatttggttacaaatgggaggacaaactgcctgggcagagttccccgactaggctgataaaatggctttgaagcggcaggctttgaggagcagtggtggaaaatgtgaaaaatcagcacaaagccttctgactgtgggagagagtgtaaaggattcctcatagtaagaaagagaacactgtgagagctgagcagagaacaactctgcagggagaccatgggcaggaagagaactgtacatgctgcccctgagcctcttctttgaggcccgacctcatccttgggagcccctctactggtggtaggagcatagtattaaactcagaacctaaaagaaaagcaagagactgggagcagagtgttagggtctacctagagattctcctagagtatctctgcttaggtcttagataattatgtgcctcattttagtaagctgtatacttcctgcttatggcagaaaacaactttttcaagagagtcacaaactaaacagttccatagatactggggttttcattattacttcacatgttcctagagggaaggataacattttatcccccgtcctccacagcacagctcacggctttggacattgtacaaagtcaataactacatgttgagtgaatgaatgttacatgaaagggaagaaggatgagtaaaaggaaaaccaattcctttggtatttaggggacaaaagccttgacagacgcatcctcaaaatgccaaaggggctgggtctagtcactcatgcctgtaatcccagtgacttgggaggctgaggcgagaggatgacttgaagccaggagtttgagactagcttgggcaatagagcacgacctcatctttacaaaaaaattttttaaaaattagccaggtgtggtggtacatagctgtagccccaggtacttgggaggctaagatgggaggattgcttgagcccaggagttaaaggctacagtgagctatgactgtgccactgcacgccagcctgggcaacagagcaagaccctgttgcaagaaaaagggcggacggacagacagacgggtgggcggaaggaaggaaggaaggaaggaaggaaggacggatggaaggaaaagggctgggagagacccctgtgctgacgactctaatgcttagaaacctagtgatattcatgtttctgtctctttcttgctctcccattttctgtggagccataatgaattcaggtatttcattctgtcagtatcagataacgcaggagtgcctgggaacatagtatctccttcctctcctggatctagtgacccaagataaggagtcaggttggaagaacggcagctacagaacccaccctaaatgatgtaagtattcacctaatacctgcctctcagtgccatccataatcttatcctggagtgggagttagatgtaaggaaagagggaccaaggatcagcagagtaagaaaagccctgaggcctcagcttttctggtcctaagatgagcactacaaaatggataaagagaaaagccaagcctgacaagaggcaccaaggaattcacttccagctgctcaccctctgctacaggtttgactccaagatgagacagctatccaacccttcatgttccactagaatctggatgactcttcttgttctgcagcaacttctcttcatgacccagggctctgctgccaagctcaaccagatatgaaaacggttcattctagttctgacaacagttttggctttgcctgtgcatggatgtggaagctcagatggccatagcctgggccgttcttccccacatggcttctgacagctggggaccttgggaagtagatattgagaaataaccaaggtagttcagctgaatgattatgagcaccagctggagatttgagtcctggtctgacattcactagttgagggaccttgggcaaaacatctaatctttctaagcctcagtttccttgctggcaaaataatacctgtctctcagcatggttgtgaggattaaatgtaaagtacttggcaagatgcctggcacataagtgctgaataaatgttagcacttttagctttaccattattaaactatcctaacaaaattccaaatttccagagagcaggctctatagtctccctccctcttccttttctctagtcactctgacttccctctatttgaaagaagtcccattgtatcaaaaacgtgggtgggttatatgccccacagaggcagatgccaagaccatagctatccgcatttttcaaaaagtgcaaattcctcctttttttctccctcttttctaggctgggttggaagccaggatgggagcctggccaatggtgagtcagaggggaggactggagcaccattgtctggctgggacaccaggtcactgacacttggtagtccactgggcagctttccctgctatctgtccagatgtggagtgaagagtgggtataacctattcatgtggccacctcttccctgctctatatcctaagttatacctccaactgctgctgtagcttcctcttcttcccagcctccaggtccttgactaggcactatatttactctatactaagagtgctttctcttccctttgtgcttctcccaaatggtatgggaaagataccagcaaggcactcttccccctaaggaaaggcaggcaatgaaggcattctccagatgcctcagtgataagaaataaaccttacacttatgtcaacaaaaggtaggatcttcagagggtagtgaaaagggattagattatgaggaggagtggccaggagaatgaagccgatgttctaacatctcccctaccccagcacacagaaagacaatagtaccttttcctttcccacagatgctgctctgagaggctctggtagctatctcaagtctcaggtcagggtgtggagggcttctgccacagttctcattaacatagtagatgttaatggaatggcagtttatttatttatttatttatttagagacggagtctcactctgtcgcccaagctggagtgcagtggcgcgatctctggtcactgcaacctctgcctcccaggttcaagtgattctcctgtctcagcctcccaagtagctgggattacacgcgcccaccaccacgcctggctaatttttgtatttttagtagagatgggattttgccatgttggccaggctggtctcaaactcctgacctcgtgatctgcctgcctcagcctcccaaagtgctgggattacaagcgtgagccaccgcgcctggccagtgcagtttaataaaaatgatttgggacacagtcaggagcgtcagccttgccatgacctatatgacctgaggcaactcactttatctctctgggtctgagttcttcctttgtaaactaaggcaggcaaaatacatgaattctaaggcctttccattctaacattccatgcttttatcagtgaaatgaaacagggaggacagaaagaacagcgtaaccctgtgtgtatataggaggcatcctgtctccatgcagccctctaccaccttttgtctctggccctccccagaattttacctcatcctcattctccactttagggttgctggctgttcgtttcaggttgctgctgagacttatgctggcagtggcatctgacttagagcgctggtgagtccttttggagggagacagccctgtgtcaggggccgggctcaaggagggcagctccctcttcctgtgagctggctttagctcatctgagaggatcagcttccgtagcttggtcccacgggagtgtcgttgagtggaaatgtgcatgtctgaagaataggccccaagcaacagggcacactggagggaaaagttaatgctctggcggcaacggtggactatgtagggcttaatggcatcacccacgtcctcatccatgtggatgtacatgttaagcaactggggcagatagaagtccacgtcctcgttgcgaaagcagaagagccggttgccaatgtaggcttgtactccaggctccttggagttatacaggtatgaaatggccatggagatgtcaaacagttttgactcaaacagcctcagcagccaagactgtttagctgagttgttctgccgccgtcttcttgctcctttggctgtgcctgaggccacagcggcccccatctcatcttcctcctccctgatctgggcaggtggatcatctaggcaacggatctcactgtccacaccatccccattgaccaactccagtggggtgcctctgctagagactgccacgcctccatgcaaaagcttgactttctccaacacctcctggcaggccttctgggccacctcagggtcaatcactgatagttccccgaccccctccgtgatgacacttagcagggaccccccattattccctggtgggccagaagtgggctcagaagttggcttcaagggggcaggctccactactgtatctcccatggccacagccagacttcgagcttccaag

SEQ ID NO: 768 - DNA, 274 bp, Homo sapiens
ctccatctcaaaaaaaaaagaagaatctgaaccatgaatactcattccagtcagcacacaaattcagctaattctctccagtgtgaattgggcatccttctctccttttgtcggctcattctgatcagaaaaggtcttagaaacaaaatatttctctatccttatggttgctgtatctggaaagcccaagagttatagaaaggctggagaaaagctaccaaaatgaccataaggtggggtgaagagcaattctcctaagatacagcaagaagga

SEQ ID NO: 769 - DNA, 117 bp, Homo sapiens
ttgttgttgttgagacggagtctcgctctgtcacccaggctggagtgcagtggcgcaatctcagctcactgtaagttccgcctcccgggttcacaccattctcctgcctcagcctcc

SEQ ID NO: 770 - DNA, 456 bp, Homo sapiens
gcttgccttgtggcactggcagcagcagccaaccacagtggcagatgcagatgagaaatgtcaatggggctacagggatgtggagatgcaggggctattgggccccagggcagaatgcaatctggtggctggctctcaaaatggtactgtgctgtagctgcttagggctcggggagttcatgagacccagcatgagctccctgtctggagcagtgccattatgaggtctctaggaagctcctcatgttagtctcagggcctgtgagggttgaggagcattcccattgataggattgcaggagtcttcaatggaaatatggaccactgggggtctctcactctttctccacattgagaaacctctctgcgctcccagctaatcctggctgagcaggatgcctggcttcctgctccttccttgccttggatgtttcctgtcacttctctgttgaatgc

SEQ ID NO: 771 - DNA, 260 bp, Homo sapiens
tgagatggagtctcgctctgtcacccaggctggagtgcagtggcacgatctcagctcactgcaagctccaccccctgggttcacaccattctcctgcctcagcctccccagtagctgggactataggcccccgccaccatgcccggctaattttttgtatttttagtagagacggagtttcaccattttagccaggatggtctcgatctcccaacctcgtgatctgcccacctcagcctcccaaagtgctgggattacag

SEQ ID NO: 772 - DNA, 1532 bp, Homo sapiens
tgtaactgtataatattgacaatcgaacaaacagcttcaatcatgtctattcatatctccaggcaaagttttgttcttcttcctttattttacaaatgtaagcttcaaaggacacatacttttgtggataaacaatttccactagaagaagaacagcaaaggtagctatttaatatatgcagttagagccatgaggtatggatcatagtaaataatattttgcaatgatactagcactaataaagatgatgacatttgcatgattagctatgtttttagtaaagcaaaattaacggataggaatatttagcttgaaggatacatacaacatgctgacaaacaaaactgagtttcagcataaaaatggatatattacacagagagtatacataggctcctaatgtctctgtgtgcatttgtatgcatattattcatctagtattttctttttacttccaagttggaatgcatttacttcatatcttattataagcccatttggtaacacttctgtcagatttcagttgcatattcactgttgaataaatcagtggttaataaatgtccttggaaatgtgtttagagataaataatgaactgctgtatctgatcattaagtgtacatcaagctcacatttttactctcagaatcctaaaaggaagatagcatgacctactatatatgtacatggaaaaaagggaaataattatagagaaaacatgtaaaaggagcctggtttattactcttaaatgggtacatgatagatcaaaataaatgttattacaactgatcaaaaaatcctactgcaaaggaaataataaataaagatggagagtcaacctgtccatcataagtgctttttgttacaaagccaaggacttggagtgtggacccaaccccacagcatgcaaaaccgtggggctctcaggattccaagcctagcatccccaccctctcataggcgcttcggagctgaccgcaggcacacttttaatttgtggcaagatggtctgacaaacagcttgggaggacagcagaggtgaaaatacagatcaagtgcagataaaaatatgttcaccttgaaaaatacaaacaagacttttaggtaataatgcacagggaaatacctatcaaaaaatgagaagaatagaaccactgctttctcattaacagttttcacaatcccttttagcttgtattccaacttctgtccataatccaatatctgcatactccttacatctatacttaaataatatagatttttgtcccctgtacatatcttataaatgtcaatccatcccacctcaaagtttcttggtattcagcaagttttttaaaaagtcaatcatgtaggagatcctttagcaatacttcaaggtattatccctataaaaagtgaagagggatctgaggtcctaaaaagaaaaataatgacagagaatggctgtaatttcatatgttcctgatggaaatctcactgctcagaaaaaaaaagaacacatatgccaaaataaaagaaaaaaaaaa

SEQ ID NO: 773 - DNA, 12473 bp, Homo sapiens
tgctgggactgctatgcatgaccttggagcactccatttgttcatcccacgagccggacagcacgtaatgggccttgccctggctgtcactcaccactcctgtcacctgtggacattggcaggaccagcgtaggtgcagactctgccctgggccccctggggtgcttagaggtggctggtcctgcttaccttccgggctgcctctttggagaagtagctgtagggcaggaacttcagctggcaccggtcattggtcttatggttcacaatctcgatgtcccctgactggcgaaggagggcagtggtcagcggccagcccccgggccatgcaccccctccccaagggcgcccctgacctggtcgatccagagcttgcccacgatgatgttgtgaacagttgaggtgctcttcctccacacgtagtgattcccactggcctggaattctaagtggatggcacctggaggcaggggacaggtcagaggtcatgcccccccatgcagggctctggccagtctgcccttaggcctggtgtcttgagaactaggctggggggttgaagaggcaggcctacagggaggtctcccttggaagcccccagctggcttttgcatcaccagaatcctccctcttatgcacaatgtctctgtgtcccaggaaggcaccgggccccagctcacctagcggcatgatggagatgtattttccccggaacttgctggagatggtgatctcctgccagaggctccagccatgcttggagaacacgtagtgcgcagctgagggggggtggtggctcacctgagaccagacccataggatgtgagcatctgccagacatgagcccaggttccacttgccccagccagggagggacagcttgccctgcctcagcaggcacagctctgtggccataggagcagtcctggctgttcctcaggtggccatggacccaaggcaggcccccaggaaggcactgccttgagcagaaaagcatccgggtgctgtcctgagcctctcagtgcctggctcctgggctgtgaaataggggtgatggtggacctcatgctcaaagacatgtctgtgacaggtgcactgagggctgataaagggtgtcacactatgccgaaggttccatgtccacttctcatctaatcctccccacacaccaggtgtgtctgctgtgccatgttataccaagggggcccagactggcagagtgattttagccaaggggcagtcgggccctgcctctggccagcctggctccagagcaggcatccacatcgatgcactgccccgggcccggccctcccctgccttgctggcagttccaccaagcctcccttgtctgttcttccttattccatgctgctctggctgtggggcccaggcttccctctcctaagtctacccactccccaggacagcagccctagcctagccctgcccctggcctccagctgcccttggacatctcatctcccctcagacaggcagagccgggatcccgctgcccgcagtgtgcctcgcctcacttcctgtctctgtaagaggtgcccacttgcttcctatgccccaggagatgggttagctggccctgagctcagctgatccctccccaaggagcccataggaagctctgcctcctcctcgcctatacctcagcatcctgcccttccagctgctcacaccaaacgctctgcagcctctctggccctcctcatgctcctcctctaaccctaagcaaacccttcctgcccttccttcaaatcgcatccagcatctgccccctccactcccacctccatctccccaggcttccctgtgggccactccctccatcgcagtggagggttcctctggcaggtcaggaggcaggccccacccggggtgcaccgccctccagctgctgcttcttcaccctcctttcctttcctcccctcactctttctgcatcagcaaagctgctccctgaccaccccctttctaaaagagctggaagcagccacagtatctgccttgctttcccagccccatgagaaccagagccgtgtctgttcacttcccagctgaaacctccatgtctgagcagcacctggcatgtcgagggcacctaatgtctgctaagtggagaaatacattcactccagggttcaggccaaggacccaagatcaccctgactgccccccacccccgtatccaaagcgtcggcaaaccagctggctcatccttcaaaagctgcctgtgttctggcctcccccttcccccaggtctggccaccacacccctgcgtgtgtcactgcagccacctcctaacggggccttgcagcagctgcagcctcttcaactagcagcagggtctgtgaatggccagcatcccacactcatgccaggagccagggcaacgccagcaccaacagaatcacctcgtttccaaccaggacgcccaggttcagcatggggctgccactgctgaggctcctgggcctgggtcttggcatatctctgtggggaaggggtggtggggacaggctgctgtcactggctggggcagagtccatcccaccgcacccaggctcctcctgccagccgccttcagctcggtagtgaccccatgctcctccccagcagtgcccacagatgcccctccacctctgctccacaacaccctggactggagcttatcctcccgctccctgcaaccaggcctgaccttgtcctcaccaagctgagttctcatgcccctcgccatctccaggaggccgtgtgcctgcccctgccatggaaggccctgctccctggctggacctcagcttgatggccccttgggtatgggcagtcagggtcagacagacgctgcctcccatttgtcaccttgggcctggcaggaacagcttggccagagtgtgggtgggcgccacccagtgccagcctagccccctcacctgctcacagagggagcgcaggcccatgtcgtcgaggcggtccagctcgaaggtctcccccagcatggggttgaagggcttggcgatgcggtgcactgtggtggagtaggaggacacagagaaggcggccaccaggcacatctgctccactgagctggtgcagtgcactgccttgtccagcaggtggtggtactccaggtcctctgtcagccgctggagcatggacaggggctcattgaagttcacctgtgggtggacaggtgggtggtcaggctgggcaccagccccggcttggcatggtgcccttgcttttctcggatgttcagggacatccctgctcagacagcaccttcacagtgaggctcctcagatggccctgtccaacagtgtggcccccaagccatcacctccctggcccctcctggctgttttctccacagcccttcccactttctggtctgctgcatcctacacacttttatcatgttcactgttgctctcctctgctcggatggacacccaccaaggccaggggttctgcctggcccactgctgtatcttgagtgcagaatcttaggaagcagtgactgaatgggcacatgagtctgtgggtggaggaagtgggtcttccccatgttgcgagctgtgatggggcccggcacaggatgggttaggcccaaggcccctatctcggtgtcacatagggcagggtcactctccccaccatgatgccatcgggtacgagtctcagcttcctcgtgttatcttgctccatcctcccagacactgaagaggacgctgtgtttctccccaccctacacatgtggacacagaggctggagatgtgaaggaacttgttctgggtcacacagcagaaccgtctggcctagtggagatgccactgtagccaggtggcatgaggatccaagctctgagcctgcatttcctggggatggcaccagggatggctgccagctgaaggagggcccacccctccacacacagccccatcctgccactccccatctacagatcgggacagctgggacatggtaaggtcctgtgagatccagaggtgctctggggctccccaggttgctgatccatgcagagcttctccctggctcctcctgtcagagcccaaagatccctgtactttggaagattgggcaatgcctatgtgcacgattagataattagttacatgctcctcaggtgccgttaagaaaatgacactccaaggctgtgtgtacttcacacaggccattactgctcatccacgcacaggaaagcagccccagaggacctgtcggggctgccctgcccgagccacccaccggcatggggatcctggagagctcccggccgatgcagttcttcatgatgctccagaggttaaggctgtagttgggcttgttgggaatgcggactcgcctcttgactttggatgaacccttgggcacgagcgaggcaccatctagtacctgccacataagtggggaccccctcaccgtcagcagaggccagagcgcccccttggcttccaagtttctgccctccaccctgaggactggcaccaagccggccactggtacgctgctggtggaaggccaggatggtgctcctggactggggcatgggcctgcctgctggcccccagttcttggtgctggcctgtccctcccaccccctaggccagaagctgccttctggcccttacagtgctccccctcacttacattgtctgctgagctccagtccacggaacttgtcccggtgctaccttcagcttttctgctggaaatacaaagcgggaggcaagttactaatgaatcccgaggtctccttgggacctggcccatcctctctccagacaacatcattttcattgctagtaaatgtcctggtcactgccgtgtgttctgtgtgtagacaggcaccgcaataacaacatttcaagggtggatagtgtatatgacagtggtcccataagactatcatatcgtatttttaatataccttttctatgtttagatacacaaatccttaaccattgtgtcacaattgcctacaatattcagtacagtcacatgttgtacaggtttgtagcccaggagctataggctgtgccatatagcccaggtgtgtggcaggctctatcagctaggtttgtgtaagtatactctatgaggctcacacaacaatgaaatcccatctggagcaagaccgatagattattgattttttgagacagggtctctctgttgcccaggctagagtgcagtggcatgaccatggctcactgcagcctccacctccctgggctcaagcgaccctcccacttcagcctcccaagtagctgggactacaggcctgcactaccatgcctggctagtttttgtattttttgtagagacagggtttcgccatgttgcccaggctggtctcaaactcttgtattcaagcaatcttcttacccttggcctcccaaagtgctgggagccactgggcctggccaaagcaagatttaaaggaaagaaaaccccaagtagacaactagatagctggtgaaaagaccagatgcagcctaagaccagggtgggggaggctctgcccagctgcagccaccttacctgtcttccttggcctcggtgatcacggtgatgaaggatgtggagtcttccatggcatcaaagtactcggtatcttcatcttcctcactgtcctctcctttgggagtcaagaggcttcctagagacacagacagagctttaatttgtaacctcacaaaaggctcaatctcgcctccctaagtccagagccaagggctcccccaacccccatctggcctcactcccctcctgcttcagtcacctgggcagccctgattccctgggctgcggccacccttgctccctctgctagaatcatgtgctttcaacgcattcaccgcacaggagcctctttctggaagcccccccgatctctcaacatgtgggtcagtctttctgtggcccagcttccctttctgatggacccctgtccagggtccccatgacccccaacccaaggctaggtgggtggccacctggcaccaggacacccctgtcacacaggggacagctgggctcattaaatttaactcttgagaatgtgaacctaggtgcagacaaactgttgccagtgggtgatggacatgggagatacaaaaccacgaagaggcagtcaagagttggccaaggccagcccacatgtgggcacagccagggatgtgcatgtgggggcgcagaagttgtgtatgcagagccagctggcagaaggtcatgggacagccctgccctggctgcccactcaccctcaatgaagctcttggaggggttggccggccggccaggggcactgtggaaggcccgctcgaggctgttgtgctgcttcgccagctgctcaatggtttcctccaagtgcacgcgctgctcctgctcatactgcagtgcccgctgccatttccgactgtgtatctctgctagttccaagaagtccctgcaggcctggggagggaggagtggcggtatgagaccctggcctctggcaggggcccatctgtcagaggcatgtgaaccagagcaactccaccttaaacaggagctgggtaagatgaggctgaaacctactgggctgcattcccagacagctaaggcattctaagtcacaggatgagatacaaaatacaggtcataaagaccttgctgataaaacaggttgcagtaaaggagccggccaaaacccatcaaaaccaaaatggcgacgagagtgacctctggtcgtcctcactgctacactcccaccagcgccacagttcacagatgccatggcaacatcaggaagtcatcctctatggtctaaaaaggggaggcatgaataatccaccccttgtttagcatatcagcaagaaataaccataaaaatgggcaacaagcagccccgggggctgctctatctatggagtagccattcttttattcctttactttcttgataaacttgctctcactttgcacagcagactcgccttgaattctttcttgtgtgagatccaagaaccctctcgtggggtctggatcaggacccctttcctataacacatctgctcccccacctccattccctgtgaggactaagctctgatattttttatcttgcccaaattcctatctaaggcgtctggggagtcatgccctaaaaaccatacattctcatcagatgggctttatttagccctatatatcgtgacttactttccaacctgactctggcataacattacgagtcaaggaagaaaaagtatttcatcccaaaacatgcttctttgccatattttgaagtggccctgcaaagctgtcctttgtgggggaaaacgtgcatctgtaaagaatctctattcacagagctagatcgttttcttccaggccctcccaaccctgaagagatgaagtaagagtcttagcacctttttaaaggtctgattaggaaacatttgtcatctattgtctccaaggggagccactataagacttaaaaagaaccttggtctccacaatctttcatcttaacctgaacatttcctttctattgatcccaggtctttagacaactcaaccaagtgccaaccagaaaatgtttaaatttacctatagcctggaaggccccctccccaccttgcttttgagctgtcccgcctttctgaaccaaaccaatgtatttcttaaatgtatttgattgctgcctcatgcctccctaaaatatataaaaccaagctgcgccccaaccaccttgggcacatgttctcaggacctcccaagagctatgtcatggctgtggtcactcatatttggctgagaataaatctcttcaaatattttgcagagtctgtttttgttgacacctgcagtgaagaaggccctgggggccatctagctgccccctctgctgggatggtcacaaacatgcttactgccccctttggcctccttggggatgtgggaaccctggccttctcagagcccgcccagcaaccagcacccaccttggttggcctcccacggtcaggatgccagttggggaacagcaaacctgggtgccacgggtctgcacgctgcctccccagcagcagctggtttggttcagcctggagctgaggtggctgctgttgctcattatggtagggcccgagcattctgcggccacgtcctccctgcagtgttaggcctcaggtttgtcactggcccttgtctaccctgggccagtccctggccgtggcacagaaggaaggaaagccacgttctgctatcctccccagctcagagaggtaattggtcttgtctggcagaagtgggactggcactttctaccaagctacatcagagtctgaatcacataactgcttttaaggttttcccttcaagcttgtggcctactgagacatccagaatcttttcagcttcccaggtccacagatggttccaccaccagttttgaagcaggggttggtcattctgccctgtcattacagtggagaggatggctcaggcttcagctgtccctggagggcagtgagatcaaatctaggaacctctggatttgccctttctggacacattcttgaagccagtaggaagggacgtttccttggcccgcatctgcatcagtggccccagctgccactccccagcacttcctccccacccaattgccccagctgacctggagcacccactgagctccatgcacatcacaggctgtcccaccccaaaggaggaagatgggcacaccagtcctcacctgtgacacagggacaaggcagctgttgaggaaatatcaggaggtgatgtggcaggcagggcgagggagcactcaacagacgtgcctcatggatcccctcccgcatctgccctggcacctggtgcccaggccacaaccactaactcccaccactcctcagacctctgcagcatcgctctcccaggcaacggcctgcccctcagtcagaaccgctcagatgcctgcccattgggtcggtctctccagcgactgtgccaggaatgcccctgaatcagcagctgctcccagacatttgctgccaagtgacacctaccggggggtgggactgacagcagtgggagcgagacgggggtgtcctgaggcggcctcaggagaacacctccaagggtgggaggctccccaaggctgtgcactggggcaccctgcctggggactcgcccaccccacagggagagcccgagctctcgtggctggcctggctcggtggaaaggggcccccagcctgccccagggatgccactccttgaacaagccctcctctgggcaccttccctcccccatctccctcaagcaccacacagggtgggcagggcaaggtgtgcctcctcatcccagagatgtgaaatggggcctggagatgcaacatggcctgcccaaggaagccagcagagtgtggtggccaggggtgcactatcaggagttggaaaacctgggttccagcagaagccccttggaccctctgagcccacatcctctctgtgagacagacggtgatgcccgacagatgctgtgcccacaagctgccctgtctccgctcatccggcaaaattctccaggtgggaggagtgcagtcacccccattggacagatgaaggtctcctccctgcaggttgaggcagggggaaaggcctcctcgaggaaagaaagaaacctccttatctcatgcgcctcatcctgatgatgtgtgagactgagtccagggtgttgaaggtctgggctattttgagttcatgggtcttataaggctgtcccttgggtgtgggactgcagtcactgtccatcatacaatttgcagaccccatagtgggcctgggtgagtcctgggagacgcagctccaggcctgactccactgctccctggcttgtgactgggagccgagcctttcaccacctggagtcctacagcggccgtcctgcttcacccacaaccctgtccctctctcactgctgtaggccttagagtgaggaccctgaaaacagactcagagacaatgtgccccagcagccagaccagatggcacctctttgctggttttgtgccagtgggtgtaagggcggtggcggaggcagggggacggtatccctctgggtgcctcaggaatgttccagacccttacagaagccccatgagttgggtagacagagactcccaccccatcccaagacagcaaagctagccctgagggcacccagcaaggaggtggcagagccagatccagaacccaggtcctcaactgagagcttgctctaacatcctacctggctgcagctcccaggaggccctcctccccacattgccctaagcttggcccagtgctctgtcaagttagtcttggttccagccacctgttcatgggctctctgacactgctgctctgctgaccctggcccatgcaggtctccaggctctgctgagctggtctcaaggctcagagtgcaagtgaggaaggacaccctcatctccctgggtgctgcttcagggaagtcccctgcatcccgggactgggagaaggggctaatcgggtcagtacagggtgaacaggatgggatcccaggtctgtctagccccagggccacctccacacaaggcacgatccccttgcctgcctgatgcaagtaggggtgcagaggccagggctgtgctgtgcatggtgagagtgaattggtgcttcatggttttctgggttcttgcctatctggctgcacaaggcctctgccccgccctccctcatccctgcaccatcacttcctgccagtctcctacagcccccagaatcatcctctccatccacaagttctcacatagatgggtgctttgttttcatatacctcatgtcatttacaagacttatgaaagagccatacaacagcagtttaaaatagtagccaaaggtcatggtaagaattcccacaaactcacatctgagggtgcctgggcttcccagcagcaaaagcaaagagggaaagatgaccagagaacaaagatgaattaggccccctacctcctacctttgctgttcacagggactctaatactttagaaatgactattttctccttcaagggaaaatggagtatttgttttttccacagatccgggcagctgatagcctctcatagaaaatggtttccaatcctctccagcctcatctcctggggctccgttccttcccagggccctgagtgtggcccaccaggtatcctgtcttcttgcctttccctggctcaaattcaaaccctcctgctgattctgatgccagccccacctccctcacaccgcgggcccactgtggggcagggcattgcaggcattcttacaagcactgaggtagattttttttttttttttatagtgtgcatgaccgaggaggaaatgaaggctcagggtgactgagggactcgcccaaggccacaaggaggtgtgtgtagggccaggatccaagtccctgagcatctcacctgcatgtcccccagggtatggaaccagtgctgttagggtttactttgtaaagccaaatcttgattgccgtctgggagccccttgagggcagggatgttgtgggatcccagagccttcctggtgtggagctaggttcctgggagatattcactaaccaggctgcctgggaataaccctgtccaagcaacagagcccagccctagcctcagggagaaggggtggcctcccagcacccttagccccagctgaggactttgtacacacagccagggttgctggctgatacactggccgtgagtgacctcagtccccctcaaggctaccaaagggccagctggcatcgtgcagcagggagacaggaagtccctaggacagctgggcctcatttgggtacatgtgcctaggctgggcacatgcaggtcgtagagtgtcacagtcacctaaaagcggggcagggtgaaaactgctgtgccctaatatcaaaggcctcatgtggctgcacccaagacctttacccccacagcacatgagctgcctggtcaccccatggatgcagagagcccgtccacctcccccagcccggatgcacccacctggtgtccatccctgactcccagggtctcctctgctgctgccggccttctccaggccccatcctggctgtgctgtggggagaggcaggcgcctggcgtggccctgctgttctcagaatgctgagctgggctgtgtgctgtgtgcttgataagctggattaggcttggggcccggcagagggactggcagggggaggttcccaggggcccagggagggcctggctgacccagcccaggcctgaacgtggtctcatttctctgaggctgtgtgacaactctacctggggccaggagactcgtgctcagctgtgagcaggaggagagacgggctgacctgaagccccctacccgc

SEQ ID NO: 774 - DNA, 976 bp, Homo sapiens
tatccttgactaaaatcttttgctcctccctggaagctattagaattttttcttcggtcttcattttgactatagcatgatctagatgaacatttttctttatttcttgtcttcagcacgctataggccctttcagtacagggtctttcatctctttgcttttactttgggaaatttatcttcattttatctccctctttgttttttttcttcttcttcttctttccttctgggattccagctaaatgggttattttagcggttaccctaggaatcgcaataaacatacttcatacactcagaagcgaatgtgcatcttgatcctcttccagggcagcatggcgggggggcctttgagcagtttccctcccttcattcctcttcgtactgtgcagccacattctaaaatgttgtaccccacgttattcttgtttattcagctttaatttaggtgcacagtatccgttattctcagatcttccctctggggtcagtttcctcctgcctgaggtatatccttttgtgcaggtctgctggtgccaaagtaagctttttgtttgcctgaaaatgccttgatttcaccttcattctttaaagatggtctccctgggtgtataattctaggctggcagtgcatctttcaactcacggaagatatcatttgactgtcttcaagctcccatttctgttgataaggggacagctcctcggaaagtgatgtctttttaaaatctggctgcttaatagtttctctctgatttagtttcactgcatagatttaggtgcaggaatttctttgttatttttatcttcaggtacagtccctctttccttttgggactctcgctagaaatgccaaaccctgctctcaatcttgctgagcaagcttacagaaatgcagattccattgcaggaggtctgacgggagactgcactcaaactcgctcccaggagaggccagggagcctgctccagg

SEQ ID NO: 775 - DNA, 1099 bp, Homo sapiens
gagccaccaccccagcccattatctctattgatcctcactccaaccttgcaaaataggtagcgtattccagtggagaaactgaggcacaaagaggtgaaagacctttcctgtcacagttaggaaagtggcagaagccgtatttgaaccccagcaggtctccctctgaagtccacacacgtcagcgcctctgtgttgtctctttgccagcacagggctccctggagcccagagatgggggtggtgacttgaaggggttggcaagcctgggctcctccagcgaagcattcccttggccctgggcattcctaagcgagaagaggctcaatcctattttcttctcctaattggatgccttttattcctccttcctaattgaagtctggtcattgctggttgccatggcagcagccaaagcgctcatctcactgtggcttgtctctgcctgcggccaatgggaaacctcctttcccatatacggtggggacatggagtgtcaggctgtcgtattctggtggctggaggaggagaggaagtgagatgggaggaaaaaggcctgtcctctcccacgcagagactccggacagcaggatgtgtggaatccccagtctgttttcagccaggcagcaacagcatctgtactgagttgagtctatgtgtctaccagtgggctaagaacttcatgtgcagtatctcatttaatcttcgtgatggccccaggaagataagggatcaaggcccagaaaggctaagtaagctgccaggtcatccaaggagaaaatggcaaagcctggatttgaacagagactccagcttccttatgtgtagccatctcaccatgctacttctcagggggttactatgagtgtctctcatgtccccagacccagattacaggtttggaggaatacacagcccaccttcccaatatcgcaggcaacagttccaccaaatgccctgcatggcatcacagggagcctagttgcccactgctctactgctgagctcaatgccacccagcccgggctctctcgagctagcctgcttctcaggccccactgacgtcccatggttcaccattacaaccgttcccttgcctcc

SEQ ID NO: 776 - DNA, 869 bp, Homo sapiens
tgctctcgccacaggtctttctttttcaaaagcaaacagctacagtatccatcatactccagagcagccctcaaagcctgggctgttgagagtgcacatcctggcctgcggtgacagccgtcagatggtgaggggccccaggcgactgccccagcagcagggcctgggagctgcacaggggagaactcgataaggagcatcatgagcatagtgggtccattgacaacatgcagtccccacggtggtgcctaatgacaaaatgacatcatgccacctgcaaaaaaagtaaaaatgatcagaggcgagcttgtcagagaagctttgaactaggtgactgcatgaaacatctcagaggcggaagagtgcctccccctccccgggactcccacctggtgccctgagctcatcatcccttctcttgtagcatatgctgtcaatacccagggccttttcgaaacggcaatgggtccgaaggcctcgggaccacctttcacacctcccctttatgcagtgtccatacctccttggtgctcagctgctggtcagctccatgtgccctgtggtccctgccctcccaaggcctgtgaacaaatgcttagtcccagattagagtctacgtcaatctgggatgtgagctgagtggcacctgtcgtgaaccaggccagagtctacgcaatctggggtgtgagctgagtggcacctgtcgtgaacgtgcatgcacatgggcattttgtcagtctgcaccggtgaataaatgtcgctgcatttgccagctgagtgtcaccaggttccaggtcccattacacatcaggaattgtgtccgactcttctggatccgctgattggacctgagggatccctgactcgag

SEQ ID NO: 777 - DNA, 851 bp, Homo sapiens
gtctttcttttcaaaagcgaacagtcagtatccatcatactccagagcagccctcaaagcctgggctgttgagagtgcacatcctggcctgcggtgacagccgtcagatggtgaggggccccaggcgactgccccagcagcagggcctggcacctgcacagggtagaactcgataaggagcatcatgagcatacccccccattgacaacatgcagtccccacggtggtgcctaatgacaaaatgacatcatgccacctgcaaaaaaagtaaaaatgatcagaggcgagcttgtcagagaagctttgaactaggtgactgcatgaaacatctcagaggcggaagagtgcctccccctccccgggactcccacctggtgccctgagctcatcatcccttctcttgtagcatatgctgtcaatacccagggccttttcgaaacggcaatgggtccgaaggcctcgggaccacctttcacacctcccctttatgcagtgtccatacctccttggtgctcagctgctggtcagctccatatgccctgtggtccctgccctcccaaggcctgtgaacaaatgcttagtcccagattagagtctacgtcaatctgggatgtgagctgagtggcacctgtcgtgaaccaggccagagtctacgcaatctggggtgtgagctgagtggcacctgtcgtgaacgtgcatgcacatgggcattttgtcagtctgcaccggtgaataaatgtcgctgcatttgccagctgagtgtcaccaggttccaggtcccattacacatcaggaattgtgtccgactcttctggatccgctgattggacctgagggatccctgactcgag

SEQ ID NO: 778 - DNA, 1472 bp, Homo sapiens
tagtttaaaatacaatttaataagaaaatccgggatacattttatatgattccatttattaaagaaaaagaaacttctttccaatatattctacccaattattaaattcattttagatttttgggaagagcaaatccaacttaaaaaaaaaacttgctaggcagttgaaatcctctggttccaaagttttaaaaaatgaggcaagattgtatagtgagagtagaaaaaataagatgaagtggaatcacccatgacaatttgtcatatttgtcattacgaatttcaacatctgcaactgaaaagctacagaaatcaaaaaataaaacacaaagaagattctcaaggaccaaagactgtttgatgatgttgctctaagattttgtcctccatttatttcacacaaaaataagttaagtataaataagaagatgaggagagctggtatgtactcagatgtgttcactggtgcatagtcagagggggtgtgagaacagccaaatgtatttcttcgcccacactcactacacaaaactctcctccatgttgctgcagagtaagaaggagtccaccagccgaggctggaccaactgctgaaagtcagagtcctggaggccttcagggcagaccccagccaatctacgcagagcagcctggggagaagacagaagaggtgacacgtgtcagactgggccatgtcaggtacatgtatttccttcacctaccctgaaatgtgcatttcagaaagtggtgcatttaccagacaatttgggttgatcatcatgttagccacttggcatctcagtcaccatcttggtcacctggtcaacatagcaaccacatctcttggtcagctagctttatttgcaccttgatcactaagatagatgtcatctgaaagctgttaataatcttaataatggtctttattatttccagatccctagagtaaccttagaacagcaagaactattcattcatccataaattcagcaaggtgctatagaaagcactatggaaaaaagaggaaaagagagggagaacatattgtaaaagtagacagggattctgctactgagaaattcaacacctggcaagggggatgaacaggaaagagaggtgctggcagaataaaatcactccccagctccccacacaatgagcaatgagtatgctatttctattttgtgtccatgtgtccttgctcatattcttaatcttcagcccaatgctctacctctgagctataccccctcctccttgctcatactcttacttgtgacttgaagtgacttcctgctcctgcctattgtcacctcccccatgaaggcttccccaattatcctgaagcagagacagtccatccctccctcccctgtgcaaccagggcccctgggctgacctcaagcttctcacacttggccataactagcttttaggtatttatctcccacactagactctgagctcctcga

SEQ ID NO: 779 - DNA, 147 bp, Homo sapiens
aaaaaaccagccaggcatggtggctcacacctgtaatcccagcactttgggaggccgaggtgggtggatcacttgaggtcaggagttcaagaccagcctggacaacatggtgaaaccctgtctctactaaaaatacaaaaattagcc

SEQ ID NO: 780 - DNA, 111 bp, Homo sapiens
ggccaggcacggtggctcacacctgtaatcccagcactttgggaggccgaggtgggcggatcacctgaggtcaggagttcgagaccagccccgccaacatggcgaaacccc

SEQ ID NO: 781 - DNA, 610 bp, Homo sapiens
ggaggaaagagggtggaatctggacagtatgaaggatttgtattgtacctgtaatgtttgatgtctgaagctgggtggtgggcatggctgtttgttattctccatccttttggtatgcctgatacatttcataataattttaaaaaggacaagactattgcagagaaatgcatagagtgagctctgtttgggtttttaaaatgattcctacatctatgcttgcagatgtaagcaccagccctggaaaacattgcaagggattcttagtaggcccaagctttgggaaagggcccagggggctggggagttgattaggaggggatacatgctttttcctgctgccttttgaattttgtaccacacgtagtattacttattaattaaaaaataatctgaactagccaggcgtggtggcacatacctagtctcagttacttggaaggctgaggcaggaggatcacttgagcccaggtggttgcggccagcctgggcaacatagtgagaccctgtctctttagaaaaaacaggccaggcatggtggctcacacctgtaatcccagcactttgggaggctgaggtgggtggatcacctgaggtcgggagctcgaga

SEQ ID NO: 782 - DNA, 610 bp, Homo sapiens
ggaggaaagagggtggaatctggacagtatgaaggatttgtattgtacctgtaatgtttgatgtctgaagctgggtggtgggcatggctgtttgttattctccatccttttggtatgcctgatacatttcataataattttaaaaaggacaagactactgcagagaaatgcatagagtgagctctgtttgggtttttaaaatgattcctacatctatgcttgcagatgtaagcaccagccctggaaaacattgcaagggattcttagtaggcccaagctttgggaaagggcccagggggctggggagttgattaggaggggatacatgctttttcctgctgccttttgaattttgtaccacacgtagtattacttattaattaaaaaataatctgaactagccaggcgtggtggcacatacctagtctcagttacttggaaggctgaggcaggaggatcacttgagcccaggtggttgcggccagcctgggcaacatagtgagaccctgtctctttagaaaaaacaggccaggcatggtggctcacacctgtaatcccagcactttgggaggctgaggtgggtggatcacctgaggtcgggagctcgaga

SEQ ID NO: 783 - DNA, 612 bp, Homo sapiens
ggaggaaagagggtggaatctggacagtatgaaggatttgtattgtacctgtaatgtttgatgtctgaagctgggtggtgggcatggctgtttgttattctccatccttttggtatgcctgatacatttcataataattttaaaaaggacaagactactgcagagaaatgcatagagtgagctctgtttgggtttttaaaatgattcctacatctatgcttgcagatgtaagcaccagccctggaaaacattgcaagggattcttagtaggcccaagctttgggaaagggcccagggggctggggagttgattaggaggggatacatgctttttcctgctgccttttgaattttgtaccacacgtagtattacttattaattaaaaaataatctgaactagccaggcgtggtggcacatacctagtctcagttacttggaaggctgaggcaggaggatcacttgagcccaggtggttgcggccagcctgggcaacatagtgagaccctgtctctttagaaaaaaacaggccaggcatggtggcgtcacacctgtaatcccagcactttgggaggctgaggtgggtggatcacctgaggtcgggagctcgaga

SEQ ID NO: 784 - DNA, 375 bp, Homo sapiens
cagcctacaaagaacaatgatgcctgggaaccatcgccaggctacactgttgactaacaaagccacgggccccgcaagaaacaattcagtaatttccacagggttggagatgactcagcagttccactcctgcacgagcacccgagagttgccctgatagccgtgcacttgggcgttcatcacagcatttgcttcttacatgaatttttaattttggaataatttcagatttacagagaagttacaaatccaatacagagaattcttgtatactaccctgctcagttttctcctacaattaacatcttaatcatgatacatttatgaaaaccaagaaattaacattggtagaatgttgttaattaaatgacagat

SEQ ID NO: 785 - DNA, 873 bp, Homo sapiens
tttggagctgttgggtacacctgcagaaagcctgtcacttcacacttggaagattacacagcggccaggcagaggcgcccctcacctcccagatggggcggccgggcagaggcgcccctcacctcccagacggggcggccatgcagaggcgcccctcacctcccagacgtgggcggccatgtctaggctcccctctactttcccagacagggcggccgggcagaggcgctctcccccccttttcccaaacggggcggcccggcacttggcgctctctcattttcctagacggggtcagccaatgcgataggcgctatcctcacctccgcagaacgggggcggcccagcagtggcgcccctcacctcccagacggggcggccgggcagaggcacccctcacctcccagacggggcggccaggcagagaaaggagacttcactgcccatccacgagggctggttgcatacactgcagaacatctgtgcaaaggaactggacagcctacaaagaacaatgatgcctgggaaccatcgccaggctacactgttgactaacaaagccacgggccccgcaagaaacaattcagtaatttccacagggttggagatgactcagcagttccactcctgcacgagcacccgagagttgccctgatagccgtgcacttgggcgttcatcacagcatttgcttcttacatgaatttttaattttggaataatttcagatttacagagaagttacaaatccaatacagagaattcttgtatactaccctgctcagttttctcctacaattaacatcttaatcatgatacatttatgaaaaccaagaaattaacattggtagaatgttattaattaaatgacagat

SEQ ID NO: 786 - DNA, 375 bp, Homo sapiens
cagcctacaaagaacaatgatgcctgggaaccatcgccaggctacactgttgactaacaaagccacgggccccgcaagaaacaattcagtaatttccacagggttggagatgactcagcagttccactcctgcacgagcacccgagagttgccctgatagccgtgcacttgggcgttcatcacagcatttgcttcttacatgaatttttaattttggaataatttcagatttacagagaagttacaaatccaatacagagaattcttgtatactaccctgctcagttttctcctacaattaacatcttaatcatgatacatttatgaaaaccaagaaattaacattggtagaatgttattaattaaatgacagat

SEQ ID NO: 787 - DNA, 1605 bp, Homo sapiens
gcaaccttgcagagtcagaatcctgatcagcagttttgaccagcacatcaagagtggctttacctcccaggcattgatccagcattagtcaagctacaagacactgatgtagaaaaccataatgtcagtttactaatgtagaataagaaataaaatctcagaagacctgagctctcctgtcagcatgacttgcacttgtacttttcctttttgtagagaagctaaattataatcagaaagttgttttggtgagcttggaatcagaaaataggagtttaagtcatctgttcaacatgcagctttcctcagctgtgatagctttttcctgctgtccagtcttcatgtggagcctggtcaatagcaccagaattctaagtctgctggccaaggtgctgcctcctgcagagagagaaagcccatcaaagttgacttcagtgactcccccttcactcacccctcatcttccacggccaaccaactccctttttgattgacacatcatttctttacatacattaatgccttccatattaccacagagagtttgttagactggaaatcattttatttctttgatctacttcatctttctctgcattgagcctttgcgtactaatttatagctattttctcacaggatagtctatttccattatatctatattttctagtggtcctttgcgtttgcctcttttccagactgtatagggcatggtgccaggcacagtttatttgttttattctatatgctgatagtatcatcttttccatctttagatgttttatctcattcagagtgagaggggcacttggtcagtcctttttgcatctcaatagttgatcctcttttgattaaaaaatatttaatttctaataatgtgtgttagagtgaaaataacaggaattattaggcccagtcaagactaacagttcttgactcatagttccaaatcacagttccaagatttccttaacctttctgatcctcacttccctcccaaaaaagtaagaatggctataattacctacctcatggaaattataaggcttcagcaagattaaatgtactcatttatttaacatgcatagtaagaactataaatgttaatttattcttacttacattaggatactgacttatgaaacagagattaaacacattctgcaaaaggactggtattgacaggctttgattctaatagctcaaaagataggccatggcttgctagagaaaatgaaaggatactcaaggctcattagattaaaaggctgctaatgttctctaagctgtaagtagatttttgcccacatttatgaaggttgatttctaatcagattagaaatggcataggctggtggcgtcatctcagagctgccacagcattctcaggagactcagccatatcatgttgggttgctctaagaacacacagagacctttatgctttttcacaaaagcatactctttccctggagtgtgtaactctatgtgttgacctttagtgggataagttcttacaatggagctattctgggtacaaaacatcactactctgtgagatttaggaagataacactgtttgctgattttacaagcccactcga

SEQ ID NO: 788 - DNA, 561 bp, Homo sapiens
gaatcatcagagatgaaactgtttgagagactcatgtgaccttacgaaaattacaacagcagtcttaaagtatgaaaaagatgcatcacagcagagacattatggcccagttgatatcaaatgtaaaatgtaaatgcatgtaaatgcacacttcattttatgtattatttagtaatttgcagtggtatgtgtttaatatttttgctacctacacattaggcaaaaaaaagatgtaaataatttgggagaaaaagaggaagaacagtgtaaaataaaactttctataagtactccatttcaatgtgttcaacatcatcctaaaaggcaagattttcccacgcaggtgacaaggtggtttatgtactatttaagggcggaaggtgcgtgcccgttcaataagcatgttttttgccaggtaggaaatatgttccatatctttacttatcattgcatttcagatgggaactagaaaaactggagagaaaaatgtaatgaaactgctgctgtaaattattccttttagcatgtattcacttgctaaatacacatttcttcaaaata

SEQ ID NO: 789 - DNA, 561 bp, Homo sapiens; identical to SEQ ID NO: 788

SEQ ID NO: 790 - DNA, 561 bp, Homo sapiens; identical to SEQ ID NO: 788

SEQ ID NO: 791 - DNA, 1741 bp, Homo sapiens
gaaaaatggaatacactgatctactactgatgtcttctttcagctttgatctaaagatgtattttattaaaactataatttaaatgtaccatgaaaaatatgcagtaaaaattagttgttttctaagctagagtaggatttgtcttacaattattgtgctatgtagtttttgttttaaaaattccaatggtgtgctgctttctttggacattttattttcaattctataagagggatagatgacattgttctagaaacacatatacatcattaagagtgaatctctaaaaccaggatataaattatgctttatttctctgagaaaatcaaacaaatggaagctgttcacacctccccttctttaagcattatctaaattaatttttacttgcataatgttcttagaaaaaaaaacagaacatttaagcaggaaaaaaggaagaaacaagttgatttttaagtgcattttactataatgaatcaatgaagggaaaaggaactgcatatttcatgaaaataataagcattgtcttaatatactgttaatagaaaatgtgtcttaattccgtgcttgaatccctgcatgatatttgagactaagatctctcttatgattctaccaagaattatatctgtgtcacttaatttttttaaaagagagagatcaataactattcagagcaacatgttaaaggcaaagtttccaatcatttacatctgtatcaggtgcctcttacctttccttatttaagacaattatttgtacaagaaacacatgactcttttcatatcaatgggagggacttttctacaaagtattttccaggatgcaacccacatttaaacaatgtaaaattctttgtttcctgcaacaacttacaaaataaggtaaaagactaaaattcaagatttgcttccttcattgtcctaagacgattcgttgagaatcactgactttgagatatttaaaactttcagcattatactgtggtttcttttgcactgcactcacctattcaggactcctcccccaggttcctcatcatgcacaaaaatgcaaagaaaacatcttattagtaattaatgaagcaacattgaaattctaactctagctgtctttggattctaattaactcagcatcaatttctcacctcagactacagtgaatttttatttcctatcagctgaaatatttcacagatggaagctcatgtttcagttttaatgactgccttgaataaacaagttgttgccacttgtttcaaacaaaagcctaaaaataatctacattcaattttaggctccattgactaatatggtgttgcttttggaagtactgtatatcctcacatggaagccaaattgttaaattatttgaaggacacaccactgtacagaaagtagtgtttcaaatataaatcgaagaacaaagagtgctccaaaaaataggtcattcttttattttcataaagtatctaaactgtactaacattcagtgttgtgtttcattctaaatttgcagctgaaataaatttatttgcgatagcagaaatatcttattattcatcctcagaaataaaggatttgaagggatagagattatatgataaatttatagaagactttcagaatttgaatgcattttgtttagtgttatgaaatgacaatagaaaaaagtctcgacttcaattaaaagttacacaaacaaacaaatctacaggcatgtctttatataccatc

SEQ ID NO: 792 - DNA, 354 bp, Homo sapiens
ctgggttctatatttatggtgatgatgtgaatttttatgccctttaaattaagtattgttctttttaatgtcatacctaaaaaggaaatgtagggataaatttttataatgtgtcattttcataatcagtttggttttattcaggatccacaaagatgtcagatgactgttattgaaattgcttatcttaaaggtcacagacaagcattttattaatatggagccactagtataatatgttaaaatctttgttttattagctcattttaaaacacaatttccattcaatttaatgaaactgtatcaggtttcatggtttcaaagacagacttaaataggattcaacacccccgt

SEQ ID NO: 793 - DNA, 1741 bp, Homo sapiens
gaaaaatggaatacactgatctactactgatgtcttctttcagctttgatctaaagatgtattttattaaaactataatttaaatgtaccatgaaaaatatgcagtaaaaattagttgttttctaagctagagtaggatttgtcttacaattattgtgctatgtagtttttgttttaaaaattccaatggtgtgctgctttctttggacattttattttcaattctataagagggatagatgacattgttctagaaacacatatacatcattaagagtgaatctctaaaaccaggatataaattatgctttatttctctgagaaaatcaaacaaatggaagctgttcacacctccccttctttaagcattatctaaattaatttttacttgcataatgttcttagaaaaaaaaacagaacatttaagcaggaaaaaaggaagaaacaagttgatttttaagtgcattttactataatgaatcaatgaagggaaaaggaactgcatatttcatgaaaataataagcattgtcttaatatactgttaatagaaaatgtgtcttaattctgtgcttgaatccctgcatgatatttgagactaagatctctcttatgattctaccaagaattatatctgtgtcacttaatttttttaaaagagagagatcaataactattcagagcaacatgttaaaggcaaagtttccaatcatttacatctgtatcaggtgcctcttacctttccttatttaagacaattatttgtacaagaaacacatgactcttttcatatcaatgggagggacttttctacaaagtattttccaggatgcaacccacatttaaacaatgtaaaattctttgtttcctgcaacaacttacaaaataaggtaaaagactaaaattcaagatttgcttccttcattgtcctaagacgattcgttgagaatcactgactttgagatatttaaaactttcagcattatactgtggtttcttttgcactgcactcacctattcaggactcctcccccaggttcctcatcatgcacaaaaatgcaaagaaaacatcttattagtaattaatgaagcaacattgaaattctaactctagctgtctttggattctaattaactcagcatcaatttctcacctcagactacagtgaatttttatttcctatcagctgaaatatttcacagatggaagctcatgtttcagttttaatgactgccttgaataaacaagttgttgccacttgtttcaaacaaaagcctaaaaataatctacattcaattttaggctccattgactaatatggtgttgcttttggaagtactgtatatcctcacatggaagccaaattgttaaattatttgaaggacacaccactgtacagaaagtagtgtttcaaatataaatcgaagaacaaagagtgctccaaaaaataggtcattcttttattttcataaagtatctaaactgtactaacattcagtgttgtgtttcattctaaatttgcagctgaaataaatttatttgcgatagcagaaatatcttattattcatcctcagaaataaaggatttgaagggatagagattatatgataaatttatagaagactttcagaatttgaatgcattttgtttagtgttatgaaatgacaatagaaaaaagtctcgacttcaattaaaagttacacaaacaaacaaatctacaggcatgtctttatataccatc

SEQ ID NO: 794 - DNA, 354 bp, Homo sapiens; identical to SEQ ID NO: 792

SEQ ID NO: 795 - DNA, 1798 bp, Homo sapiens
cctgctgaggacatgaggacccgtctttttgcagtgccaggcagggtggccaaagaggactggactctggacctggagccccgtggtccagttcacattcaccccacaagagtttcaggaggcctcccacggtgcctgtgctgggtggcggtggtggtgccaagaggaatggaatgtcctgggctccttcaggagctctctacccaggggcaaggagagcccagagagaagcgccctggtctcttgagcttcctgatctgctcctgtcccccgctctcctccactcccttgcctttccctaggttgtcccctccctgggcttttgtgtgttttgggagatgtcacctaaccaggacattgatattcaatcccatcccccttcctcccaccctgccccactttgatttaatcctttggctgtgggctgaggcctcccagggaagctgggtggggtgggtgttgagaccccctcagaccagcacagagacctgtccttgtgcagtctgcaccctgcactccctcccttgcctgtagatgttctggatgacagtagaggaaatggacaaggtcagtttgaatatcccagaacacagtgctctgtctcctcccaccagtccagttagcttcccttctggaccaatagacgaggggagaccccatggatcctctggctgggaagccactgaccaggtggccagggggcagggtgggaagaggggttaaggtgcagtgatgatggcctgttttggagtgtgtctgagactgggattgcatttggggtttcccgtgtgcttgggatgctagagggtcacctgcaggaggcctggggccggcgagaaatctcctgtgatgccctgtgaaatggcttgtctcctcccccatcagggcccaccgaaagctcaggggagcacagaagcccatggaagcccagggagatgtccctggggcagacactaaggcaggtgttgaagacaagctgcttgtcaagaagcatttcccggcaagagaggggcaagtctggggctccaactgggtacagcctgggtgcagttataagcccctttggcttacttggtagaagatggctacttggatgtacctcacttaaagatgttttgtaccacactaggtctctgggcccttgtgcttcctgtgggtggggtgagggccaaaggctatggtttcctgcctccaggagaatggagagaaagggcttccaggcccctccaagcctggggaaggacgtggcatccaagctgagccagagggaactgctgctgtcctcccttcatttctgtggaccttggaggctttggctttgtggcagggcctccccaggcagctctgggacctaggagtttgcttctgatagggtcagctttcccatttcccttcaatgcttgggaaccttctcccttagcttcacacttgccgtttcaagccctgctgggaccttgtggcttggctggaatccaggactgtattttcatggagaagaacctgcagattcttccatcctcagctggccatggcccacagctctgcatctgcatctgagcttctcaagactcctggagcatgaggggaatggggcggggccactgctctgtgctgacgggctccgtctcggagattcttgtcctgttttttttctgttgtttttttttggctggtgctggggacaagcctgtgcctgccaaagctcccaggccaagtttgggggctggtgtttggggttgggtttggggttcaggatgctgcagtctgtgcaataataaacccgcatctgctcacgggc

SEQ ID NO: 796 - DNA, 1186 bp, Homo sapiens
gacgtgggtccttcccatctgtgtccttgttctcacgatccttgaggggcagctgaagggcttcagtttgagtgggggctgaaagaccatagagcttctacagtggagtttctaaagcaaacttccagaaacttctatgagtagatgacaatagaatcaagagcctgccctttgaggtggagtccccccagcctccaatgctagcccagccactttcttcgcttctctgagcctcagttttctcatctataaaatggggataattacagagcctacctcctggtagtgaggattacattagatgttgaggctgtagaaagcagtggagaaatggagacgagtgttgttatcacgctatggtgctgttagctctgctacaagccctcttgcgttttggtagaggatcccagggaccccaaagggatggaggtgattcagataccagttgtttagtcagaatatctcaatcagtgggggagcctgaggggatcgccacattccacagaggcttagagcagagggacttgcccaaggtcacgcacacagcaagttggtggcaggaaagcagttctcttgactttttaggaataagtactgcccatgaagttactctcacagccggtggttcccagcgagggggttggagaagaaggtccctcaaccaacagtaggctcgagttcaggcacaccctgtcctcaggagcctggctcccctacccaacccagccctatcactgatgggccatgtgctccctcactccctctttctgtgcctcagtttcctcttctgctgaggagactctaatccctgccccatggtcttcctcataggcaatgcagttgtgaggctcaaatgagatagattatggtgataaagaggttttaagctgggcatggtggctcacacctataattccagcacgttagaggaggctgaggcaggtggatcacttgaggtcaggagtttgagaccagcctggccaacatggcaaaaccccatctctactaaaaaagaaaatacaaaaattagccaagtgtggtggcgcgtacctgtaaacccagctagttgggagactgaggcaggagaagcacttgaaccctggaggcggaggttgcagtgagccaagatcaagccactgcactccagcctgggtgacagagcaagactccatctggaaaaaaaaaa

SEQ ID NO: 797 - DNA, 8125 bp, Homo sapiens
tgggagtgggcatctggctctccgtgtcccaaggcaactttgccaccttctcccccagcttcccttcgttgtctgcagccaacctggtcattgccataggcaccattgtcatggtgacgggcttcctcggctgcctgggggccatcaaggaaaacaagtgcctcctcctcagcgtaagttctgtccaaatccccagcccctccaactcctgatctccttgcacttggacccctgggacaggcaagacctggaatattagacacctgggtgtccaacctgagcccagggaaactgcttctagaacgttctaggcttgaccacacccctcctcctcatggttggttatgcctacccctggttgtccctcccactccctgattagtcagctcctttatgtccctgtcctagctatctgggtttcctcaggaggagctggcttctcccagacctgggaagccccacctaggcgccgcctgtccctgccttccacaccctccttgtcctcagccctgcccattaccacctacccatgcctggccctttcctttccagtttttcatcgtcctgttggtcatcctcctagcagagctgatcttactcatcctcttctttgtctacatggacaaggtaagccttaccagatgggagggggcatatggaatgtcactgcccttagagttgggccaagcaggccagggtcccttccctggccagaggaagagtgctggcaagcagcacctgtgcagaaaggaacatggaaccaagggttgggaaagctaccaaggaaagagcagatggaaggttttgatgggggcagcacggggcaggcaaatttggaggatgggagagttgactttgtatagttccaggaagtggaatcctctgcatgaccagagatggcagtgggctgcctctggcgctagtgagctccctctcactggaaggaattaagctacttggagaagggattcagacctcatcaggtggttgggctgggtgatttgagagcaaaccatgaaaaacaaggaggaactctctgggcgacgctggctgagcaggactgaggcacagggaagctctgtttcctgcactagagcccttgaggacgggcgctgctcctgggttcaggaggatggtgggtgaccccctgtaacctcgccaggctgggcagttcgcagtcaagagcgaggttggccgggatttcagtctcttggggcgtggcaggccctttggtaccatgcactccagaactgtgtaaggagcagttcttgaaatagctgcctgagccacactgaaagttagagacatcgttaggatgagaaagaataatcttttagttttgcactcgtgaaaaggaagaaagaacaattttgagagatttctctgtgccagccctgttcttggcccttttatgagaattgtttcccttaattctaacaacagcgccatgagtagatgctgctgttcaacatcgggtagaacagcggtgagggaggtgaaggtcacatgacctgtcttcctccctctagttcccagggtgtgttttgagaggggcagtctgtggggaagctgtgtagtggggggcgggggtggcagagtggcctgtgtgtgtggctggtcctgggatgggggagtggaggcacgtggtgtgtttttttgcctctgggtgttacagccctggccctgagtttagctctgctgggaggcggtgggtgcaccagggcctgctgtattctgaaactgggagtgtgtgcctaaccccgcacctctgttgggccagcagaggcccccaccccagtgggcagggccttccagaccagctgccttccctgccttcctcactcctcatctgtcacccaccatcctgggtgacctgaggtgggctggagagacgagctgcgtcctggttccaaccgtctcactgtgtccctccgcctggcaggtgaacgagaacgccaagaaggacctgaaggaaggcctgctgctgtaccacaccgagaacaacgtggggctgaagaacgcctggaacatcatccaggctgaggtgcgggctgggccgccctggtggggccaggcagggaggaggggtggcggccggtacttctagctgccttccccggtgacctggccgggcacctgtgctttctggattttagccgggagtggagtggtacccacgggggcatttgcctgaactgctgagtcagatgtgatacagcaaggtacagccagggagggatgaggatacaggaggggcaggcctgagagagctgtggctgagctttgggatgaatgactgaatttattttagcaacagatttgcctccatgatggggcttggcttaggtgaggaggccctggctctaggaggagaacaagtccatagtcccagatgctcccattttaagccctggggaggggccggcagggggttgggtggcagtcagcttgggacggtttacagaaagagcagaggtgctggtgggcaagcacagggctgagccaaggggcccagcccgaggggtgggctgcattgccctctcccgctctggtctccaggaaggagtgctcactcacttctccagtgggcccggctgaagcccaaagaagggacaagaagcaagccctttgtctcctcccttaactgcagggtggccacttttgcggggactggggttggcctgggcaggggaaggccctggggaggaaggggcgggccatggcatgtctgactgccccttccattcctgctggccagatgcgatgctgtggtgtcactgactacacagactggtacccagtgctgggggagaacacggttcccgaccgctgctgcatggagaactcccagggctgcgggcgcaacgccaccacgcctttgtggagaacggtgaggctggggatggaccgcttgggtccaagagcccgtgtgtggatgccccggcacggggagccctataggggaggctgggcccgggacactaagaggttggctgaatgtggcggtggggggctcacaaaaataaagccaaaagacaggtggaaaatggggggtggggctggacccacagttgggagagtcagagggcgaggggttgaatggggtctgaggctctgcagctggccttgcgggtggggcggaggctgcgccaagggatggggacagggctgaggccagggagggctgggaggtaagagtgaggacgaggtggaaggagagagtgagctgggggctgggctgcagggagcgcatgcttgggctgggaccctaacctcgtgggcctcgctccccagggctgctatgaaaaggtgaagatgtggttcgatgacaataagcacgtgctgggcacggtggggatgtgcatcctcatcatgcaggtaagaggggcgtccccagcagcctcacccaccctgctggcctcagccgcagagggaaggaagcacagagaagtgaaagcagtgttggtacacggcggagggtctggaattcatcacagctattcaagcttagcagctgtgcctgccaccgtttccgcagagctctgatatgagagcacgtgtctactcagcactgagagtggtgctcagggctgcctgtggccaggcccaggctgggatattgaagctggagtcaacccccgtgggttcccccagttctgcccaaaccttgagctcagagagccatgcaagacacacacggtgtcccccggtcaccatctttacagcctgtgcacatggcacactctctgtggtgaccgtgagaccacaccgggcttccttctgcctcctgcactcctctgggtccccggctcctttgaggattcaggagggaaggggcacaaacgagtagtgacgtggtcctgagcacacatcactggaaagacagccctgctgctgccaagacatcgcaccatgtgttccacaagcagacaagagaggcttgacaggagtcctttatttttctttttttaagagacagggtctcactttgttgctcaggctggagtgcggtggcgccgtcatagctcgctgcagccacaaactcctgggctcaagccatcgtcccacttcagcctctcaagtagctgggactacaggcatatacaccaccatacctgaatgatttacaacttttttccaaaaacagatggagtctccctctattgcccaggccgatctcaagccatcctcccaccttggcctcctaaagtgccaccgtgcccggctggcctgagtcctgaatgatccctgccacctcccactccccaccttggctcctgtgagcccccacgtagagccaggtcctccgtgcattccgtgcctgcagcgcccctctgagtaggcacacgtatgcatcctgcagaggttcgatggcttctggtctaacagccccacgaggctgagccagagttcacctgtgtgtgtctccagggtgacctctgttcacggttttcttcatgtcttcattccataagcattttcctggcacaccagtggccatccccgcttgctctaggtgccctgtgacatcccaagcctctcggggctgaggtcaggtccaggctgctgcagctcctgcctcaggcccctccccgtgtctttcagatcctgggcatggccttctccatgaccctcttccagcacatccaccggactggtaagaagtacgacgcatgagcgggctggccgggagtgcccaccccgccctgctgccctgtggagggaagaggattgagctttgtgtcgcctgcctgcgctctccagatatgacccctgcacccaccccccacagcctgccctaccccacctaccctgcctcagcctcggacttctcagtgggtggagtgccagggaggaggaggcacacggagacctggggctcggggcccctggattcctgcatctgcatatgcgtatttgccaaagacgacagggtgggctggggtgcgctctggaggaacccccggcactgatgggcttctgcccctgcccttcctcacactgacactttgtccccacatggggtggggagcagagtgcccgccccgtggagataccgccccagcgggggctgcgacatccatggccaccatggggcacctggcggggcgggggtctgccggcctctgggcaaggcccctggagcatctcgcccaggctttttataccttacaatgtaacttttttattttattttactctatgattattcaggaatattatctctcagataagtttagggttagatttctgatttgtaactttttactgtgttgatttctttaatggtttgactttttttccctgagggtgagggatgggtgggaagagaggacatctgtccagtctcaatcaggacagaccaccgtgcgacacccaggaggctctcggatggggcgcgcctgcgccctcagaacgtgtgggaaggagggggcgtggacaggacacgggaccttgccaggcctggtgtctgaggacaggagcctgggagaggcgggtggagcgtgaagcaggctggaggtgcccctgcacgggaggtggcgtttgctaaccaatcgagctggaaatgccagggcaggggggccccacggtgctgtggcagagctagaggggtccttagacttttcactgatgagcagttgttggttttttctttctcccttcctcccgctctctgctggcacgcgaggcttccccttccaccccatgtgggtattcccacaacaggttctgcacaccccagttatttcacagacattcctgctagaaactgtcagacaaatacctctctagttcggatgctgctcactttcccccttgcttctggaaggggaagcagtccttaggttttgctgtgctgggacagtggcaggggacccacaggggtgaggacccacggtcctccccgccagccttgctcagctgtgggttgccctgctgggaaggagggaatcacgtccacctgggtcccaagatcttcgcctccttccctggggccacggacatcagcagtgggttgggtggcgattatatcatctgtgatcccaaggagaagaaatacagaaaacccaagagaggtcagactggctcttgttaccggagccacgggaagaaagcagccggagtcacgcacgtgcagagctgggcatgggagagaaacgggctggggagtgaggccaggagtgggattcagctgcagcagggcgccccctccaaactgcagctggtctggcttactgttttgccgttcaaaaaggtcgcgaatccgtgggactgagcacggggacctcacccgctagccagcgtctgctgcacttgatcaggtggggccttggtgggcggctgcctttcctatacagtttgtcttgtcaccctggtttcccactggggccaggtctcttctccagcctccacctgcctgtctgatccaagagctgagacacggccacccagcaccagtcactcctctgttcaccttaagtaacacacaaaccgggaacaggaggacagaaccgttggcattatcaggattcgtgttttgtgggggtgggagtggagagtagggtggtcttgtgagttgtgcagggtgaagaccgcttccctgagacaggggcagtggtgctgatggaatgtgggggaggcccacatttgagcaaagctgccctgcccttgtcccctggcctggcttcctggtaaggagtttcagccgcctccgcaggaacccccaaagtgcagattccggagcagacacatccgggcggagagactcagcagacaagtgctgcagttgcacggtgggacccggggcctcgtgcgttttttgctgtgggtggggtgggtgggttggtttatgcctatcaatgcaatttttaatttttgttaatatcaacagcaaaagcctagtgcattgggagatgtgcaacctccctgaaaatcttttctgtttctggagtacttcaggggtggcctctggccccagagcctttgccacagtgctcccaccagcccccacctcatccgtctgtttgcagagcctcatctacaggtccccacgctgccttctttactcactctgcgcttggccgttttgttatttggcttagtctacattgggcggaagtctgtgtgcacagagtgggtgttccttcgagccccttccactcagagggccacacccagcgatgccagtgaaggtggcacagcctctcttcagtttctcctgactgtgatctcactggggtagaattcccctgagagaattccctcactcacggctccctttgccagagtcagttcaatcaggtctgatgtgagcaatttacacacttgtctcagaaagtccctcagggtttgtagaggactgcaggggggcatccgctgcagactcagcctttctctgcagccatcctgcagtgggggtgagcgggcacaggctgagaactgctcttgggtggtggaagcaggtgtcacggtgcaagtctccccctgcacccctcccccagcttgagccgtgtcacccccctctccctccagcatgggcctgtgtctcaggctctctggaaggtggccctgccccggaccctcttgcaggtgtcctggtttgacttggaactagatggccatctttccaggctttggtggcccaagagcagtctgggtggatggaagtggctgtcccctcctctccagcccctgcccacccactggtggaggtgctaactagcagggacgtggcataggatgggagctgggcgtgaggtgcttggggtccattctttgtccctcagcttctcagagtccggccagcccttgtgttcccgtgccccacactttcctcctccccactgcagtgagtcaatagtccagggtggggcctggcctccctgccctgattggggactcaggaggtgaggcctggggggcttcctgccccctccttgcccacctgcctgcccccgggcagcacgggagggagagcagggtgagcacgcttgttggtttcagatgcactttctgcttgcattgccgtatctgtgcgttccttcatcctggtcctggctttatggaacaccatgtttttagcatgtttttaaataaaaacggataaagtgtcaaaagcacagca

SEQ ID NO: 798 - DNA, 4150 bp, Homo sapiens
tggtaattgtgacactgtggagctgtccttctttgatgtctcagtcactcagtaagccatgtaatttaaattgaccctctgagtgaccaagttgctctgaaaattttccaagtacatgttacaatgagaatgagagaaggaggagggaaaggcggggacatcatgaaggtagaagaggaggaggtttagaatcaagcacaaagagggctcaaaattacgtggaaattggggctggtcagtcagttagccaggggactaatgactttatgcctgctactctgcagtctaccatcattagggacatcttaaacatagaaaggaaggaacacccaatttcacttcaggcacccagccacaggaactttcctaaggttgagcctttgcgttgaaagtgagaccgttatctaaggattcctctccacaccctgattcctgaggagtgttcaaagactcagaaacaatgacaggcctgctgctgagctttgctgtctgcagtaaatgaacgttcagcccttgccctcctgacctgcttgtctttgtttctacagaacagtgctcggcatggcagggattccagggctcctcttccttctcttctttctgctctgtgctgttgggcaagtgagcccttacagtgccccctggaaacccacttggcctgcataccgcctccctgtcgtcttgccccagtctaccctcaatttagccaagccagactttggagccgaagccaaattagaagtatcttcttcatgtggaccccagtgtcataagggaactccactgcccacttacgaagaggccaagcaatatctgtcttatgaaacgctctatgccaatggcagccgcacagagacgcaggtgggcatctacatcctcagcagtagtggagatggggcccaacaccgagactcagggtcttcaggaaagtctcgaaggaagcggcagatttatggctatgacagcaggttcagcatttttgggaaggacttcctgctcaactaccctttctcaacatcagtgaagttatccacgggctgcaccggcaccctggtggcagagaagcatgtcctcacagctgcccactgcatacacgatggaaaaacctatgtgaaaggaacccagaagcttcgagtgggcttcctaaagcccaagtttaaagatggtggtcgaggggccaacgactccacttcagccatgcccgagcagatgaaatttcagtggatccgggtgaaacgcacccatgtgcccaagggttggatcaagggcaatgccaatgacatcggcatggattatgattatgccctcctggaactcaaaaagccccacaagagaaaatttatgaagattggggtgagccctcctgctaagcagctgccagggggcagaattcacttctctggttatgacaatgaccgaccaggcaatttggtgtatcgcttctgtgacgtcaaagacgagacctatgacttgctctaccagcaatgcgatgcccagccaggggccagcgggtctggggtctatgtgaggatgtggaagagacagcagcagaagtgggagcgaaaaattattggcattttttcaggcaccagtgggtggacatgaatggttccccacaggatttcaacgtggctgtcagaatcactcctctcaaatatgcccagatttgctattggattaaaggaaactacctggattgtagggaggggtgacacagtgttccctcctggcagcaattaagggtcttcatgttcttattttaggagaggccaaattgttttttgtcattggcgtgcacacgtgtgtgtgtgtgtgtgtgtgtgtgtaaggtgtcttataatcttatacctatttcttacaagtgcaagatgactggctttactatttgaaaagtggtgtgtgtatcatatcatatatcatttaagcagtttgaaggcatacttttgcatagaaataaaaaaaatactgatttggggcaatgaggaatatttgacaattaagttaatcttcacgtttttgcaaactttgatttttatttcatctgaacttgtttcaaagatttatattaaatatttggcatacaagagatatgaattcttatatgtgtgcatgtgtgttttcttctgagattcatcttggtggtgggtttttttgtttttttaattcagtgcctgatctttaatgcttccataaggcagtgttcccatttaggaactttgacagcatttgttaggcagaatattttggatttggaggcatttgcatggtagtctttgaacagtaaaatgatgtgttgactatactgatacacatattaaactataccttatagtaaaccagtatcccaagctgcttttagttccaaaaatagtttcttttccaaaggttgttgctctactttgtaggaagtctttgcatatggccctcccaactttaaagtcataccagagtggccaagagtgtttatcccaacccttccatttaacaggatttcactcacatttctggaactagctatttttcagaagacaataatcagggcttaattagaacaggctgtatttcctcccagcaaacagttgtggccacactaaaaacaatcatagcattttacccctggattatagcacatctcatgttttatcatttggatggagtaatttaaaatgaattaaattccagagaacaatggaagcattgcctggcagatgtcacaacagaataaccacttgtttggagcctggcacagtcctccagcctgatcaaaaattattctgcatagttttcagtgtgctttctgggagctatgtacttcttcaatttggaaacttttctctctcatttatagtgaaaatacttggaagttactttaagaaaaccagtgtggcctttttccctctagctttaaaagggccgcttttgctggaatgctctaggttatagataaacaattaggtataatagcaaaaatgaaaattggaagaatgcaaaatggatcagaatcatgccttccaataaaggcctttacacatgttttatcaatatgattatcaaatcacagcatatacagaaaagacttggacttattgtatgtttttattttatggctctcggcctaagcacttctttctaaatgtatcggagaaaaaatcaaatggactacaagcacgtgtttgctgtgcttgcaccccaggtaaacctgcattgtagcaatttgtaaggatattcagatggagcactgtcacttagacattctctgggggattttctgcttgtctttcttgagctttttggaaggataattctgataaggcactcaagaaacgtacaaccacagtgctttcttcaaatcatatgagaaatactatgcatagcaaggagatgcagagccgccaggaaaattctgagttccagcacaattttctttggaatctaacaggaatctagcctgaggaagaagggaggtctccatttctatgtctggtatttgggggttttgtttgtttttgctttagcttggtgaaaaaaagttcactgaacaccaagaccagaatggatttttttaaaaaaatagatgttccttttgtgaagcaccttgattccttgattttgattttttgcaaagttagacaatggcacaaagtcaaaatgaaatcaatgtttagttcacaagtagatgtaatttactaaagaatgatacacccatatgctatatacagcttaactcacagaactgtaaaagaaaattataaaataattcaacatgtccatctttttagtgataataaaagaaagcatggtattaaactatcatagaagtagacagaaaaagaaaaaaggactcatggcattattaatataattagtgctttacatgtgttagttatacatattagaagcatatttgcctagtaaggctagtagaaccacatttcccaaagtgtgctccttaaacactcatgccttatgattttctaccaaaagtaaaaagggttgtattaagtcagaggaagatgcctctccattttccctctctttatcagaggttcacatgcctgtctgcacattaaaagctctgggaagacctgttgtaaagggacaagttgaggttgtaaaatctgcatttaaataaacatctttgatcacaaaa

SEQ ID NO: 799 - DNA, 1238 bp, Homo sapiens
ttaagtggtctgcccttccactgaaagtgtagctttttgacagtctcagccatataaacaggatctcagtttcatccttccatccatccattagaggcacaaggtctcatctcttttccttttgggcattaaaaccaaagttcatacattattgagacaggccgactctgctaaggcagcctgtttggcctttaagttttattgcttattttttgagtatgtatttatttttttgattattattattttttttttgagctttaagccttcaagtttcctttttattcttgacccctagacatttcctttgcttgtggactcgggtatttgtttttaggtaatattttttttccctatgacacagccctcaggagatcctgagaacatgtgccctcatttttaggtaattttaattaggaagggttttaggttgtctgatctgccttgttgctagaaacagaaattctcctattgattgatttttcaaaccacttcttagtggcctctacaactactccagtcaggtcaagaatggctctcacattgccaagtcagtgggtatttttagtcttcatcttagatgacctttatgcacatttgtctttgtctaggaacttctgttggaaacatcttctattttaatgttattttaaatttttttgcttttgtaacattatgcttagcatgtgtgtccaactctttgacaatttctttttagttttctggtggcttccctttatccaaatttagtattgaaattcctcgagccgctgcttttctcactccataattctggccagaatttggtacttaaaatattttgtctaaaatattacaatagctacttaagtcatctccctgactccactctgttgtctttcagggcgtcgtccacactgtagccaaagtgatcttataaaaacataattctaatcatggcactcttctgcttaaaaatgttttaatggctttccgttaggttaaaatttaaaagtcctttgtagcctgtgagactctacatgagttgactccctagcttcatctttgagcatcttatttctttacttattataccatcagttagagttgattgttatataatccacagaagtgaattctgtctgatttaagcaaaaaaaaaaaaaaaaaaaaaaagagggagaatttattaggtgtgtatagttacagttaatttagggaattaaaagacagaaataggccgggcatggtggctcatg

SEQ ID NO: 800 - DNA, 1112 bp, Homo sapiens
ttaagtggtctgcccttccactgaaagtgtagctttttgacagtctcagccatataaacaggatctcagtttcatccttccatccatccattagaggcacaaggtctcatctcttttccttttgggcattaaaaccaaagttcatacattattgagacaggccgactctgctaaggcagcctgtttggcctttaagttttattgcttattttttgagtatgtatttatttttttgattattattattttttttttgagctttaagccttcaagtttcctttttattcttgacccctagacatttcctttgcttgtggactcgggtatttgtttttaggtaatattttttttccctatgacacagccctcaggagatcctgagaacatgtgccctcatttttaggtaattttaattaggaagggttttaggttgtctgatctgccttgttgctagaaacagaaattctcctattgattgatttttcaaaccacttcttagtggcctctacaactactccagtcaggtcaagaatggctctcacattgccaagtcagtgggtatttttagtcttcatcttagatgacctttatgcacatttgtctttgtctaggaacttctgttggaaacatcttctattttaatgttattttaaatttttttgcttttgtaacattatgcttagcatgtgtgtccaactctttgacaatttctttttagttttctggtggcttccctttatccaaatttagtattgaaattcctcgagccgctgcttttctcactccataattctggccagaatttggtacttaaaatattttgtctaaaatattacaatagctacttaagtcatctccctgactccactctgttgtctttcagggcgtcgtccacactgtagccaaagtgatcttataaaaacataattctaatcatggcactcttctgcttaaaaatgttttaatggctttccgttaggttaaaatttaaaagtcctttgtagcctgtgagactctacatgagttgactccctagcttcatctttgagcatcttatttctttacttattataccatcagttagagttgattgttatataatccacagaagt

SEQ ID NO: 801 - DNA, 294 bp, Homo sapiens
atcagcactgaatacttatgtatttcttacaaacaaggacattctcctacaatatcacagtatagctattaagaacagaaaattaacactgctatattactaccatctagttttcaaatgccattcaagttttggcagttgtcaatgtttttggagatcacagcgtagttgttttggattttatttttcattactaaattcagattatgttttggggggcaggaattttatagaaattatctttgcagtgcatattatcaataacacataatcaggctttcccaatgtaaaggt

SEQ ID NO: 802 - DNA, 140 bp, Homo sapiens
gtctctactaaaaatacaaaaattagccaggcatggtggaaggcgcctgtaatcccaactactcaggaggccgaggcaggagaatcgcttgaacctgggaggtggtggttgcagtgagctgagattgtgccattgcactc

SEQ ID NO: 803 - DNA, 294 bp, Homo sapiens; identical to SEQ ID NO: 801

SEQ ID NO: 804 - DNA, 4710 bp, Homo sapiens
taaagaaggtctggatgttatggagagagctgatcctttattccttttaattggacttcctactattcctgtcatgctgatattaggcaagatgattcgctgggaggactatgtgcttagactgtggcgcaaatactcgaataaactacaaattttaaatagtatatttccaggtaaggcactgaactgtggttgtaaagtgcataccaaattgatcttgaagaacaataacatgcttttttagccatgtttgaaggtagtctaactcttctgatttattagcactaacgcactgcatttttttcctctagggataggttgtcctgttcctcgaattccagctgaggccaatcctttagcagatcatgtctctgctactcgaatcttgtgtggagcccttgtctttcctactattgctacaatagttggtaaattgatgttcagtagtgttaactctaatttacaaaggacaatcttggtaagacggctttaacattacttatattaccttgcaaaagagaatgaagtgtatttgtttttaaaaggtggggaactgtataaatattcggtctgtggctcctatgcattaagcctctatttgagcctcactatcattcaatagcttgagtggaaataaaaagaggagaaaccactgcagcagttctggccttttggaactatgttgtaggtgctttctctcctggcatatgcatgaatcatcacacctgtccctcttgccagtgggattacagtactttacgatcagaccacctggttcaaatcccatcacagaaattgtcttgctgtgaaatctaaatcaaatgtctggactttttgttcctgtagtatggtgatggtaataatcaggattattgtgaggattgtataagtactagcacatagtaagcactcatgttgtttgctattattgttactcccacttctcccctctggtggcatgtaacctgcacggaccttggaggactgaacaaagggggcaaacgtgggaataaaagacaaagacaagagagtatatttggaagaaggggtcagggggcaccttgcctctagtggacaagggccctgagctttacacagccctctgtatttattaggcaaaagagatagtgagaagcaggggtgattgtcgggtaattgtcagtccatttggcagtttggttcacagcaggcttgcgagactgcatcatttgaacagtaggcgctagatttcccagtagataagttcaaggagccctgcaccagggagtgatggcccccagcaaaccctttggtggcaggctcagtgtgagtttactcacatcctgcattcatgataaacagtttgctgtttggtcatatagcctccagtggaatgctgagttggtcacgatccctttggcctttcttgctcccaacagtggcagtctgcacatagtgccctagcattcttctttgtatatcagagtatatgtagaactacatggaagaaagactagtcagaaaggataatggagaaggcatctgtgtcccctgttacctgtagtaacagcgtatagtctgtctctctccctatctcatctcctagtagaaaaagaaaactgtttcatttgcagtcatctgaattagtttagcatcaaagcctacgtcttttgtgatctaaataaaattatttttattactctgtttctctaaatctgcattataaaaagctaattttcctttttattttagggtggaattgcgtttgttgccataaaaggagcatttaaagtttacttcaaacagcagcaatatttacgacaggcacaccgcaaaattctgaattatccagaacaagaagaagcataaaactgacttctggttgttctgcagttctctcatccttatgaatctgttgtgttgttttgattccatcattaatgcacttgtggagacttgtgataagctgctgctcctatattttttaagaaatataataaagcacttagggcaggggaaatcatctcggtaatcatggaacctaaggatgtgatttgttttcattgtttgtatgtactacttttatggcagtcatatgaaccattatcttagcatggtaaacctgggttttgttcatattttctccagacagaaatgcaaagatcaaactgtgcaaatattaaaaaaatgcacatgctgttttattcaaatgcctcttttgtacatgttcatgtttagtgttttctcagaatcagcaactcaaggtactatgaggatttttctcactgacataatttgattacatactaaataagaggatatgttaatatgaggaaatgtaaattaaattagttataaataaataaccaaaaatgtatgtaaacattcaaatgattatctgaacaaatgagattttgtggtgttttctttaacccatgtgatgtcctccaaaatgtgtagggtaaaaattcacagggcttccagatcactttttcaatattaaattttatttacataatgttgacatctcatacttcatgaagtaattttgactcatgcagtcgtgtgtgtgtgtgtgtgtgtgtgtgtgtgtgtgtgtgtatttgtgtgtttcagtgtttcatcaggtccttccatctctgggagttttttcaacccatatttctagaaattacagctgccagtttatagtagtttgagcagaggatgatttgcaaaaataaaaataaagttattttactctcctcttgcattgattcagttattgagatattcgttgatcacctcctatttcccaggcactgtgcagagtgctgtaggacatagtggtgaacaagacagacttggtccaagctcttacagagttgacagtctagtttcagcacatagaaaaccagcagtgaataaaccaaggtgaggccttgagctctttgtttttatattaatgaggagaaaagtatgaaaacaagaagtcttaagtaaatattgaggtcattgtttttggcttaagtttattatagaaaatcaacactaatgtttttagattttaattgtcctattgatgaggctagcaccttaatcactgtttagttttgtattcatttttaaaagcaattattgaagccattttcaatagattggccattttaatgttcagcaacctgaatggttatttttgttaattaaaattaaatttttaagagatattttcaaaaccctatttattttcttgttcacagtaatgcatgtcaataataaatgtttccccttactgataagcggccactttaggagtgtagcaaatatagattgagctatgttagtttgcaataatatatgttaactttagtaattaaagactggtttctatagtatgaatgtcttaattttgagttatatgatgtttatttgaatgactgttgaacattcaaatttgtattatttggagatgaagatttgactaacagtgagccttattaagaacactactacagttctgaaggggaaatataacatctatggttatatattttaaaaacttagattataggctgtaattataaaatatattggcttttgttttcaatgtgaaagatacattaaatggacacatatcttgcaaaattttgttgtatagaacagtttttaggcagcctttactaaagttatgcaaacacacagttccccatttactacattaatgcccttgacagggagtagctgcttggttttataggtattagggctcatgaaggccggggaacaactctaatccttttggggcaggagggagggtttttttagggttgcggggagggaactgcaagtgcctgaggaccagagtggcctctagccccgaattgaacacttttaaacctaaagagccttattattattagctcgagaaataccacatgccagtcttcccaggaaggtgacctgcctgaccatgaagcaacaaaagagcataggcagacttaaagttggatagacctgggttcaaatcatagttcagctttcaataactgtatgtatgattttggctaaaggatttgactttctctcaactgcagttttcttaatctttgaaatgcaaataatgtttatctcagaagactatttctaggattaactgagagattaaaggaacagcagcacttaggctcaaaatcgcccctacaaagcagtagttgtttcttaattgctaagtaatctgtttgcactctaggaaaagtaaatggagaggtaaaagaaaggcattggggacaaatgaaagagatgatgtagatttttcggatgggtgggtatattttattttccagtttattttcatatttctttactgtgttatttctggaaactttaatgttttaaacctcttttataaaattcaatgacgactactagaattcttttcaaaagttaacttatctccaaagtggctgaaaatattgtttaccattacatgattatgaaatgactgtgaagaatataaaattaaacttagtgacttaattagtcactgccttgctaactttgctgtaatttttttaaacgtcttgtttttaatatagcaaactatctcaatactggctggattaggttaaataaagaatttttatgttctctaggtgtactttgttaaatctcaaaacattctgtacatacataattttttttaatcacagttatcgagatactagtttttgtaagtaaaagtaatctgaattt

SEQ ID NO: 805 - DNA, 8321 bp, Homo sapiens
gtggactacgtggaaccttctccccaaggtaggcagcaccctatgggagccgggtgtcctggggaaggaggtgggaggtgggcccagttcctgtacagagggcagctgacaccaaagtccttcagccctgctgtccatggtttctggacagtgtcctgtttcactcatcattactttaaagttcttgaccattatcgaaaacaactctggccaggtgcagttgctcacgcctgtactcacagcactttgggaagccaaggcaggccttgatcacttgagcccaggagttcgaggctatagtgagctatgattgcactactgcactccagcctgggtaacaagagcaaaactccatctcaaataaataaattaataaatattaaaaagtaaaaacaactgtttttattttcgagtacagttatagagagcagattcgtgtggcatgtcagctggtctgtgttagagttacaaagcaactttaaggaattccaaacactctagaagaacagggaagcctccagcagtcacctgaacataaattcaaatgtgctcttcccacgtcccaggcacccggtggggcctcggcggcacctgcgtcaacgtgggctgcatccccaagaagctgatgcaccaggcggcactgctgggaggcctgatccaagatgcccccaactatggctgggaggtggcccagcccgtgccgcatgactggtaaggatctggcgccgtggcattccagtgcttttcttctactcttgggtggaagaggaagaggaggcttatcctcgatgagccctcatggggagtgggccgtaggatgggtttctcagccaggggcgactctgcgctgtctgcctcagacatttgggaatgtctggagacagttttggttgtcactggggaagggtttgctcccctttgcggggagcccagggatgctacagccatgcacagcacagccccaccaagaacagtgcatctccaaggccaggagtgcgggtgggaggccgcttcagctgagctcttctgggaaggggaccacgtggcccagccacacccacattggctcagataggcctctgcctgcagtgggtagcctttggggcacagagcagctgcatctggagagccgtgggtcagagcccctgttttctgtgagtccaaaggtctgcagccctgagcctgggacaggcggttgcacgtagggatggatgtcacgttttgccacctttaaaagcactcttgttttttgatatttctatgaatgtaccatttgaatctaatagtccatcgtgaggccctgcagctaacacctgtgttgtggattttacattttgtttcgtatcttcacaggaggaagatggcagaagctgttcaaaatcacgtgaaatccttgaactggggccaccgtgtccagcttcaggacaggtactgaagctctctccgggaatgggccgccctctgggccttctcttgggcgttctgtgcctggacacacacttacttactgtgcagagcatgctctggcaggctctgggggttcatgtcctgctcatgggtggggatgaggacaaggagcagatgggagtgactgtaggggaaggggagactgccctttgctgctgagcagagcctggaggtgctgccaaggaatgagtgaggccacattggcagaatggccagagcccagggctgcacagggaggaggcgcttggggctggaaggcctcaggccagagagcgtggacatagctaggcctggggctaatatgtggtgagggtcatcccagtggcaagcccccaccccgtgaacccccttcttactgcacacctccagctccttgggtgtgggtgcaggagcttggtgctttccgctggagcaaatgtccctacttggtcaccgttcctgtcagcccctggggatctccagcacagaggcctatgctcccctggcctacaaccttctcctggggctcagctgccagcacagcagatgcctgaaactggtaccgcctctggcccagcctttctcccggggctgtggaggggacagtggtcccgcagaggtctggtggctctcctcatgcaccatttgcttggccccagggcgggtcttcctggggcttcacagcaggcagcagttttgtgctcactaaatccaggaaagtggagccaggaagccaactgcttgccctccacctggacctcacaagctctcccctatccagggagctaagccacattgtgctgtggcatttctgtgtttctctgtggggctctgtatcccctggtacagtttcctggggacagcaggctctgccctccctcctccctgccctgggcagctcctggacgggcaccaaacaggcccagcccactgcctgctccggagccacctgcagaaggaggctggggcgcacctgggctgtttctgctttttcactcttctgaaaagtgctgccatgagcattgcccggctgtgtcccgtggcagcttcctggctgtcgaggtgattgaagggctcttgctgtaggaacttcacgcagctcagacagcccatagaggcacaggcttgccagtggggagaaggcaggctcaagcaggaggcagagccttcccagaacccttgctgcagcacggtccttttgtcattagaaagtgttggtcgggtgcagtggctcatgcctgtaatcctagcactttgggaggctgaggtgggaggatcacttgagcccaggagttggagaccagcctgagcaacatagttttattgctacatccctacaaaaaataaaatgaactagccaggtatggttgcccatgcctatagttccagttacttgaaacaaggcttccgtgagctatgatcatgccactgcactccagcctgggtgacagagtgagaagatgtctttaaaaaaaaaaaaaagggtggggcgcggtggctcatgcctgtaatcctagcactttgggaggctgaggtgggtggatcacttgaggtcaggagttcaagaccagcctggccaacatggcgaaaccccgtctctactaaaaatacaaaaattagccaggcgtggtggcgcaagcctgtaatcccagcttctcaggaggctgaggcaagagctgaggcaagagaatggcttgaacctgggaggtggagattgcagtgagccaagatcgtgccactgaactccagcctgggcgacagagtgagactttgactcagaaaaaaaaaaaagaaaagaaagcgtgggtcatttgtttctgtgcactatgctcccagccactgttttgccagccttgtcatgcccgttctcttggtgttaccacacccctgaaatcagaaggtgacaccatctggtgggcaccacagctccctgctggaacatgtccgggtgatgaggactgtccccaagagaggtccagccacctcttgctgcacaccagggctgtacgtggcctcttaggaccgtgctgagctggcttccgtccctgctttgacacctgtggttaacatgtccctgggatccctgggggacaggcgaggtgcccccacatcccctccatgcttctcagcatggttgccgcttacctcttggtccatctgagccacagcaccaggccctgctgggggctggagctcccttttaccagtgttccctattgatccagttggtgaggtttaatttgcagaggaagtgtttgaaaatcttatctttatctttcagaaaagtcaagtactttaacatcaaagccagctttgttgacgagcacacggtttgcggcgttgccaaaggtgggaaagaggtgagcatctgacttactcgcgtggctccttgtggacccttctgcagaccttgggcaccaactgcagctgtgtttggcctgggtgctgttcttagtaacacgtgctgctggaatcaaaaaggtggcttcttttgaggctgggcacttgtctttaacgtgatcaaataatttgctgccctgctgctcggagtggcatggcaacagggttggtgaccacaccctttttgcaggattttttggggatttgagggtgccttgaagtgcttggagttagaacatctccctgtgctttctgcctgtccccctcctgccaggctgatggttgatgggattccagctccatagggcctctgaactgctggccaagggtccacgctacagggcaggggccgtgggaactgctggccaaggtctgtggtgctcaggccctccggtggggtgatcaccatgcacctgtctgacccacggctttctctttttctcctcagattctgctgtcagccgatcacatcatcattgctactggagggcggccgagataccccacgcacgtgagtgtccccagagcatagcgtccctgctgccgtggcccattcccggcctctttgagggatacgtttttacacacgtgcttcccacagcagcagcttgcacaccctttccccctatactcactatcatcactttctgctttccaattctcttgaatccacactgctgaaatgtggggtccccagtggcctccacgctgccagatcctcaggacagctctcgttctgctctccccctgccccgctggatctgtccccttccacaccaggatcctgcttcctaagtctccattgctgattcccccttttcccttcagcctcagaatgttggaacattcaggatataagcctcattcttcatcttcctccttcacgtcccccagtttaaaaaaagtttgaaataaaattcacacgctataaaatttagccttttttagggtacaattcagtggtttttagtacattcacagagctgtgcggccatcagtcaccaccatccattgccagaactccttccatcatccctgaactgaaactattcccattaaaccctactccccagcgcctcctcccccagcccctagaaaccaccacctactttctgtctctatgaatgtgacaacactaggcacctcgtgtaagtgaaatcgtacatgtaagtccttctcatgtaactggtacgtgtgtgtcccttagtgactcgtatgtgtgtgtcccttagtgactggcttacttcactgagcataacatcctccaggttcacctacattgtagtgtgtgtcagtatcattcctttttatggctagatactattccattgtatggatagaccacactttgtttatctacttgcttggataaacacatgtgttatttccactttttagctattatgaatagtgccgctgtgaacatctgcaaagaagttttttggtggacttcagttttcacttctcttgggttacacttaggagcagaactgctgggtcatgtggtaactttatgttgaatctttcaaggaacgtttcaaggaacctcagactgttttccacaatgactgtgttttacattccttccagtggggtgtaagggtcatggtttcttgtttcttcacgtatcttgtaatttttttattgaaagctgaacatttcaaataatttaatgcgataactttggaaaccagattctccctctgccccaggattctgttgttacagctgcttatttggtgacttttcggaactgactttgtagactcttattctttgatgtatgtggccactgaagtctttacttggttagcttagtggtcagctaagaactgcatggagatttccctaaactaagaactctcccggtctttgctgagggctctgtgtgcgtttggaggggatgccttccacactcaacaggcagcagacagctctgccctagccttcacttcctgcttctgcagagatcaaggtcagctggaggtgagggttcagggcctcgttggtccttcctgatgtgtgcacagtgctgtgcatgcgcctggcctaggttcccaggaatatgctggaacctttcaaagctccagcagacatctcatactttggcttttcctttgaagctttttgggcagtctgttgttggctctaactgttacctatcccctcaggcagctgtgagaagaaaacctcagacaaatgcccccagagaaaggcttttagccctggctgagctccggtgaagttggatgaagatgaccctatagttgctgactctgactcttctttgtgggggggctttgaaagaccccagctgagttctgctctctctgacacatcactgttcagggctgccgctgaggtgggagtgggaccagagtgagttaaaacaccctggagttcccattctcactcagcttcagctgtttttcctgactttaaatgttccctgtgttgctgcaagcctgtggttaatttccataattctgaatctcccagttcttgccagttttatcgctgtttttaacagagaggtgaataactcctggcccagtcttgtgggttgtgggggcagagttgaggaaggggccccggggtgaggggttggggggcagctgcagcagggaaagcaaatgggctgggggtgagcagagaggtttggctgagaccagtccccacgggtctcccagggaaccgtgtgccgcctgctccaagcctctaagtaggctgcagccaagctcttgaagaccacggctctctcggcctggaggccacaccacctctgacttagacccaggggcagtccggtggaggcagagcaaggggaggttctgccacttcttggatgtgaccccagcctccacttcgtcctgtgcttactgtggaaacagggaaaggagcggccccgaggagcacaagcacccccagtccttagaggccgtgggacttgtctggccgccaggcagccacagcagcctctagagggggcaggttgcttatgcacagaggtggggctcagggctgcgtgactttgtaggatgacactgtgcagttgttcaaggcagctgctgcagacagggtcccagtgatcccctctcctggcagctgggctcatggtggttctgcttaaagaaggccacagccagcttccagcagcccagcggtcattgggtttctctgaggccccaggcagagctgcacgtgcatccgcaccagggagcactgcacaggggccctggcctggcccggccctgctctgcacctcacgggcagctgctgacggctctttgggctcacaggggatccagcaggcgctcctggtccttaggaggcaggcagctcagggctgcttcgctctccctgccacgccctcccagggtgtctgccaaggcttgcttgcgttttagtccctttgattgccagacctttcggttttccttgagtaaacctgagaaattcctgactttatttttttttgccagttggaagcataaactgtttgagatccgcttcctccaccagcacatcttgttctcatggccgctaaggggacgttcaccctgggcctcccacctgcttggccgcccctcttcaggtgacctgtatgatttctgggctcagagcccacccgggccagccctcgagagtgtgaagtccgtcctggcttcagccaggtgccctcagagctgcccctcagtccctgcccacctcagcctgtggcacttaccccctgtgcctcctctcctctggctggccttgtaggccacccctgccgcgcagacacacctgagctctgctggccctgatttgctgacctgttctctccccacttcctctctctgagtttggatcccccagaacccaggtgttgctccctggggctgcatgcccctgtctgtttgatgtgtctgtccagaacccgggcagacttgaggggtcccagctgtctgcctgtatggcccctgcagttgctgtacccacctcaggccctgtatcctgctctgaaccagggtcaaggggagggtcctggggaacagaggggaaaggtaccctgcgagggcaccgggacctggagtgcagcagcttagatgcagacaggccacctgcagccccaaagaggccacagcctgcagacaaggactggcagcagggaagccctgtgcatgtgtgccctgggaaagctctgcttgattctgcaaagctggcatcctctttaaggaagccctaggacaggccaaatggagctcttgtccaaggggtcatttctgtcttgacagatcgaaggtgccttggaatatggaatcacaagtgatgacatcttctggctgaaggaatcccctggaaaaacgtaaggcctgcgcgtgcttggtggggtcctctttttgttcaccagagtgagcactggacccttagagcctgtgctggtgctgggctcctggggctttctttccggtttacccaaaagaaggaaaaaa

SEQ ID NO: 806 - DNA, 1160 bp, Homo sapiens
attttttcctttatttttgtcaaatgagtttatttgaagaaccagcctttgagctctgagattatgtcctcagtttggtctgttctgctgttaatgctaccaactgaattatgaagttcttatagtgaactttccaattccagaagttcagtttgattttttcttaaaatggctatttcttatgtcagctcttggatcattttactggattacttgggttccaaggattgggtttcaactttttcctgaatcttgatgaacttctttgtcattcagactctgaattccatttctgtcgttttaatcatttcagtctagttaagaattattgctggggagctactgggctcatttggaggtaagggggtactctggcttttagaattgccagaattcttgagctgattctttctcatctgtgtggattgatattccattaacttttgaaattgatattcttcagatggagcttttagctgttatgtttttttaatgctgttaagagtttgactgtggtataccttgggcttagttgattgtctttgtttctgacactgatgctttcagaggaacaaagctcagttcagcctccctaggcagaattctttaactctggggtactgggactgggaacacagctttattctctgtccccttaagatcaagcatttgctgcactgggggtgtgggaggatatggtgctcccagcctgctggcaacagtgctctgttggaggtttccagcagaagcactgttggggctgttgagtggccttgaacaaaacctctctgatgggtgtctgccagcaaaagcactccagtgggatggcaggggtggccaatgagagagctatggtggtggctctggtaaaagcactacagcaggttgggtttgggttgctgcaagcaagtgtgcttcagtcaggcagcgggcagccacaggcaaaagtgctctggcatggtggctgaggattcatggacgaaaggactccagcaggttggcagggtggccatgggtgaaagatctccattgcagcagcagggacactgcagatactctggtgtgagtaagcactctggcagggcagtggataggttccaggcaaaagcactctgatatgggtcccctatttctttgcagtaaacatttaaaaaaaaact

SEQ ID NO: 807 - DNA, 38771 bp, Homo sapiens
  misc_feature (7892)..(9416): n equals a,t,g, or c
gtgacttgtagctttaacaaaaattaggttccctagttgcagctgccagggaaagctagtctaatatcaaagcaaaccatccttcttctcaagcacagagtttttaagataggagtgtgtgtgtattgacattttcctagcagtggctgaagtcaaggaccaggagatttagggcccacttggagttcttatggtgaaacagtagtagcttcctagagacctttaaagcttatctgtaatttgtatagttcagaagatactgtatacatcattatttctccctgctttcaaaacaggaagggggtgtggagagtaacacactaaaaaaaggataagtaattaatttctgggtaagaatttccttttggcttaaaatggactgatggtgtaagttcctccctttgcaagcagaagctttgaagatagtgagctagatgaagctctggacatcttgaatgaagtattctgtataagaaccaagtgtataataactgttagtaatagaggctgctcatagaaatgtcattgcattataattgtagggacagtttgtcagagagtaggtagaagattatcagacccaggttttgttcttggctcacatgaagtcatcaagtaggctatttaaatgcttcactttaaccataggctaagattaaattaaaaataaaaagcttttgtcatggccgggcacagtggctcatgcctgtaatcccagcactttgggaggctgaggtgggtggatcacctgaggtcaggaatttgagactggtctgaccaacatggtgaaaccctgtctctactaaaaatacaaaaattagccgggcacggtggtgcacgcctgtaatcccagctactcgggaggctgaggcaggagaatcgcttgaacctgggagggggaggttgcagtgagccgagatcgtaccattgcactccagcctgggggacagagtgagactccgtctcaaaaaaaaaaaaaaaaaaagcttttgtcaattaaagatgcttgtcagtactgagtattcatgttgctatggcacttttataagaaaactgtacacggtcatatctgcttccgaaaataatacatagtgagatagtaattttacaggcaattaagaatttgctggccaggcgcggtggcttacacctgtaatcccagcactttggaaagccaaggtgggtggatcacctgaggtcaggagtttgagaccagcctggccaacatggcgaaaccctgtctctactaaaaaaaaaaatccaaaaaattagccgggcatggtggcaggcgcttgtaatcccagcaacttgggaggctgaggcaggagaatcacttgaacccgggaggcagaggttgcagtgagccgagatcgcgccattgcactccacctgggcaacaagagcaaaaactccgtctcaaaaaaaaaagaatttgctataatagaagatccatgtgtacattctgtatgcaaatcttaggaagatattagatcccagaaggttaaagttccgatctctatatatttgtatatgctttaaggagaagtggcatccatgtagatgtggtaaatggcttataactctcgaggtttccaatttctgctgtggtagcaattctaaactcagatggacttggacactactctggattactgtccctaaatatcaactactgtttataagccagcagaggccaactgaaatagtacacataaagttcctacagcatatccctcagtcagaagtggaaaagattgattaaagttggagtataaacatatggggccctgaccaaaaatattgaaccgtactactagaaatccccattctttagctaaaggataatctgacttcacttttaattcttcattgactattggtgctctgaaagaataggaaataatagcaaaacatgggaactcctagatagcatacatttatttttaaaatgtataccatcggccaggcaccatggctcacgcctgtaatcccagcactttgggaggccaaggtgggcggatcatttgaggtcaggagttggagaccaccctgggcaacatggtgaaaccccatctctactaaaaatacaaaaactaactgggtgtggtagcacacacctgtaatcccagctactcaggaggctgaggcagtagaactgcttgaacctggaagacagaggttgcagggagccaagatcacgccactgtactatagcctgggagaaaacaaacaaaaaacatatggtcaacttcccaagtaaactgaccaatgtcagtttaggttcagtcttactgtaggagtgcctgccgtaggccagcgcctctcaacctttccactaagtacattaagatcctaacagtaatcattgggaccccaggtcatcgtctcaacagaagctccagatttcttcaagtcttggccctcttgttttatatcaaaattttatgtatattatttttatattttcaaaaattctccccagatcatcaagtaatattgagatgctgacatagaaaaaagtagatttccagctggtatgatcagtgataaattggacttcatcaaaattaaaagcttttgtgcaccaaaggatactatcaagaaagtaaaaagctatcccacagaataggagaaaatatttgtaaatcataagtctagtattcagatgtctaaagaactcttagaattcaacaataaaaagataacccagtttacaaaatggatatgaatagacagttctctaaaagagacatatacatggccaataagctcgtgaaaagctgtttaatatctttagtcattagggaaatgcaaatcaaaaccacaatgatatatcatttcacacctactaggatggcaataatcaaaaacacacaaacagatgttggtgaagatacggagaaattggaaccctcaagcattgctggtgggaatgtaaaatggtgcagccacttgtggaaaatagtttgtcagttcctcaaaaagttcacagttaccatatgacccagcaattccattcctagggttacacccaagggaactgaaagcatagattcacacaaaaacttgtacacaaatgttcatagctttattataatagccaaaagtggaaacaacccagttgtccaccaattgggacaaattgaatgaatacacaaaatgttatatccacacaatggaatgttattcagccataagaaaacaatgaaatcctgatcacatgctgcgacacagatgaaccttgaaaaattgtgacatgaaacaagccagacacaaatggccacatattgtatgattccatttatatgaaatacccagaataagctaattcgtaaagacagaaaatagattggtggttgctaggggataagaggaagggtgaattgggaatggccactatgcggtacagggtttctaatgttctggcattagatagcagagatgaaaatgttctggcattagatagtggagatggttgcataacactgaatatactaaaatccactgaattgtacacttaaaaaaatgaagaaagaaggactatgcatgatcaaagaaaaaaatgctttgtgctcaagtagggatagaataaacagtaagactggaaagactgtgaagggccttgaatggcaagctaaggaagttagctttcatcttatagatcgtaggaagccaccagagtattttgagcaggggtggcatgtttaaggtagtgttataggaagtttaatttgtgaaatgagaaagagatactatcagccaggagaggtagaaggttctataaagtcaaattgaacacccgaagtttcagatttcatgaatgaccctgggtatgtgtgtatacacatatgtatgggatttgtagtcatctggggaaggctgaggtgctaatatgaatactgaaaactagagagggtaatatagcagagtagttaaaaatgaaaacactctgaacccacatgctgtctgggttcaaattccagctgggctaccttccagcactgtgaccttaggtaagtcactaaccctgtctgtgcttcagcttcctcttccgtaagataaggatacctactcatcaaggttgttttgaggattaagtgggttaatacatacaaagtgtttacaatgtcaagcttaaagaaaggtccccaaaaatgtcagctgctagtctgaaactccagagcaggtttgagagtaacccgctgttgttctctgccccggataaactatgaagtaacagtcctaaagtgttaaaagacaaaacaaatttttctttgtgaaaaatgaccctttaaaaaaactccatctactaataatgaagcttagtagtagtaaaatgatgatttttagccataaaacgggttttctatatcttcacaaatatagtgtagagtttcacaatattctttgatatgaaccagtctctcatactttctgtatagcactgattcgctaagtaagatgccaaggcatgacctcccttcaggaattgggaatctgcatttttaataagcatcctaggtaattcttttttttttttttttttttttgagacggagtctcgctctgtcgcccaggccggactgcggactgcagtggtgcaatctcggctcactgcaagctccgcttcccgggttcacgccattctcctgcctcagcctcccaagtagctgggactacaggcgcccgccaccgcgcccggctaattttttgtatttttaatagagacggggtttcaccttgttagccaggatggtctcgatctcctgacctcatgatccacccgcctcggcctcccaaagtgctgggattacaggcgtgagccaccgcgcccggccgcatcctaggtaattcttatgcatgatacaggttgagaccagtgccatgtacagaagtgggaaaaatggcttatgaaactcagttgtatttagcacactgtgttagacataaaatttgaaaacccaacctggacaacacagtgagacccagtctctactaaaataaaataaataagtgaacattgaaaaccaatggatagtagaatgtattcagttcagtgagacatgaaacaatatttttgcttaattgaatcaaacatatgttaaaaaaaaaaaaaaaactcaccctactcccaaagcactcaataaattcttcagagaaaaggaagagctttttgtactacattgcctctaaaatcttctgtaggataagacattttaagatcacttaaaatcttgttttaagtttttaagtctcattttaataaccaaataaaatggtttttatttgagccagtttcaagttcttaaagtgacacataggacttaacaaaatccattagttgtcatttgtgctttgcccatttttactgatttcttcatactctgaaggaaaaaaaatgctacaaatgtatgttggtatataagagagtgcattccataaatattagaaattttttttttctttttttgagatggagtttcactctttcgcccaggctggagtgcagtggtgccatctcagctcactgcaacctctgccttccagtttcaagtgattctcctgcctcagcctcctgagcagctgggattacaggcgcccgccaccacgcccagctaacttttgtatttttagtagagatggggtttcaccatgttggccaggctggtcttgaactcctgaccttgtgatccacccacctcagcctcccaaagtgctgggattacaggcgttagccactgcgcccggccagaaaaatattttatagaattcaaacttgtattttcttttgaagggatataaaaagggtgagagaacccaacaaccacacttattcaaatttataaggataattaggagtattctcatggttatctttagaatcttagcagggtaaaaaagagtttattgtttcatttgctgaaactcctgagaagaagtctcaccacatttgtatttacagagattagatttggcaactctaaagacaagagaaattactcatgataagtgtttggaggggttggagagaaaacagctaattaggcacttggcagtgtggcagggcaacctttgggcaacccagtccagattaggttagaagaggagcacggaccttttgtccactgcaaaccagtgccacaaatgaagtgggaagagacaggttaccacatactggttggacttgagagagaaccagaaagtgtacaatcccataagcataaaaaatggggataaaacttcaagtgtatataagggtaagaacaggaggaagcagtaacagagagggcaggagagaaagatcagaaggaatcggacgcctgagaagaggaactgggggctgagtcctgtcctggcctggccgctccccattcctccctctgcctctgagggcttcagttttcccaagtgagaaacagctgtgctagattgcttctacagtcctttccactcctggaccgaaacagttgcccctgcatctaaaatacgtagctctagcatataaaatgcaggttacctcaactcccccccgactcccacatctcactcccttcctttccctgcctgccctaattctggctgcgttctgttcttgcctcatatggactctttttctcctccccttcttttccaatgtcatgcagtctcttaacactgggtttcaaccactatacagaaaaatgttagtgaaaaaggaagaggggttccatgctgcttgattctccctaaccaggcacactaaactaggggtgacagtgtatcacaaagtccagactcacagtcttgctgccccttctcctcttcaaagtttgtttccgaagtaccaccccttgcacctcacatcccagccaactctgcctacctgtcagccccagccctcctcaggcctgcctcagcctcacagccaggatcctaccaacaccaacaccgcgccaaataacccctcccaaaagcctcaccggaactaatctggggactctgcctattattaggaacaccttggatgaagcccctacccgcagaattctggcagtagcagcagaattttcaggcatgtgcctaattttgttggggtggtggttgattattttttttaaatctaggatttctgggatctgaagcttatacaatcttggatatcttctttaagaaaaagaatacaaaaatatcttctataagttttacaaaaatatatgaccatgtgagcacgttgctagctcccgcccccaccccaccccccagagccttggaaggggagtgaaactgaagcttttttagcttcatggcaaatatgcttcttcctgagagtactgggtacattcacagacctttattttttactttctatagatttaatttagttaagtcagttcgaagcgggcaaaggccaaaatttctcacccctaggtggctcaaatttctgagcctgagattttatatcttaaaatccattaaaagaatactcaattttcggccgggcgcagtggctcacacctataatcccagcactttgggaggctgaggcgggcagatcacgaggtcaggagatcgagactatcctggctaacacggtgaaaccccgtctccactaaaaatacaaaaaattagccaggcgtggtggcgggcacctgtagtcccagctacccaggaggctgaggcaggagaatggcgtgaacccgggaggcggagcttgcagtgagccgagatcgcgccactgcactctagcctgggcgacagccgtctcaaaaaaagaatactcaatttttaagaagttaggtgtaggtatgcttatataaaatatttagacatgcataagtattttaagtggcctgaaggaagtacatgtatgctacttttgcaaatattttcgctttttttttttttttttttgnnnnnnnnnnnnnnnnnnnnnnnnnnnnnnnnnnnnnnnnnnnnnnnnnnnnnnnnnnnnnnnnnnnnnnnnnnnnnnnnnnnnnnnnnnnnnnnnnnnnnnnnnnnnnnnnnnnnnnnnnnnnnnnnnnnnnnnnnnnnnnnnnnnnnnnnnnnnnnnnnnnnnnnnnnnnnnnnnnnnnnnnnnnnnnnnnnnnnnnnnnnnnnnnnnnnnnnnnnnnnnnnnnnnnnnnnnnnnnnnnnnnnnnnnnnnnnnnnnnnnnnnnnnnnnnnnnnnnnnnnnnnnnnnnnnnnnnnnnnnnnnnnnnnnnnnnnnnnnnnnnnnnnnnnnnnnnnnnnnnnnnnnnnnnnnnnnnnnnnnnnnnnnnnnnnnnnnnnnnnnnnnnnnnnnnnnnnnnnnnnnnnnnnnnnnnnnnnnnnnnnnnnnnnnnnnnnnnnnnnnnnnnnnnnnnnnnnnnnnnnnnnnnnnnnnnnnnnnnnnnnnnnnnnnnnnnnnnnnnnnnnnnnnnnnnnnnnnnnnnnnnnnnnnnnnnnnnnnnnnnnnnnnnnnnnnnnnnnnnnnnnnnnnnnnnnnnnnnnnnnnnnnnnnnnnnnnnnnnnnnnnnnnnnnnnnnnnnnnnnnnnnnnnnnnnnnnnnnnnnnnnnnnnnnnnnnnnnnnnnnnnnnnnnnnnnnnnnnnnnnnnnnnnnnnnnnnnnnnnnnnnnnnnnnnnnnnnnnnnnnnnnnnnnnnnnnnnnnnnnnnnnnnnnnnnnnnnnnnnnnnnnnnnnnnnnnnnnnnnnnnnnnnnnnnnnnnnnnnnnnnnnnnnnnnnnnnnnnnnnnnnnnnnnnnnnnnnnnnnnnnnnnnnnnnnnnnnnnnnnnnnnnnnnnnnnnnnnnnnnnnnnnnnnnnnnnnnnnnnnnnnnnnnnnnnnnnnnnnnnnnnnnnnnnnnnnnnnnnnnnnnnnnnnnnnnnnnnnnnnnnnnnnnnnnnnnnnnnnnnnnnnnnnnnnnnnnnnnnnnnnnnnnnnnnnnnnnnnnnnnnnnnnnnnnnnnnnnnnnnnnnnnnnnnnnnnnnnnnnnnnnnnnnnnnnnnnnnnnnnnnnnnnnnnnnnnnnnnnnnnnnnnnnnnnnnnnnnnnnnnnnnnnnnnnnnnnnnnnnnnnnnnnnnnnnnnnnnnnnnnnnnnnnnnnnnnnnnnnnnnnnnnnnnnnnnnnnnnnnnnnnnnnnnnnnnnnnnnnnnnnnnnnnnnnnnnnnnnnnnnnnnnnnnnnnnnnnnnnnnnnnnnnnnnnnnnnnnnnnnnnnnnnnnnnnnnnnnnnnnnnnnnnnnnnnnnnnnnnnnnnnnnnnnnnnnnnnnnnnnnnnnnnnnnnnnnnnnnnnnnnnnnnnnnnnnnnnnnnnnnnnnnnnnnnnnnnnnnnnnnnnnnnnnnnnnnnnnnnnnnnnnnnnnnnnnnnnnnnnnnnnnnnnnnnnnnnnnnnnnnnnnnnnnnnnnnnnnnnnnnnnnnnnnnnnnnnnnnnnnnnnnnnnnnnnnnnnnnnnnnnnnntcacgcctataatcccagcactttgggagtctgaggcgggcggatcaccagaggtcaggagttcaagaccagcctgaccaacatggtgaaaccccatctctactaaaaatacaaaaattagccaggcatggtggcacacgcctgtagtcccagctacttgggaggctgaggcaggagaattgcttgaacctgagaggcagaggtttcagtgagccaagactgcactactgcactccagcctgaggaacagagcgagactctgtctcaaaaaaaaaaaaaaaaaaaaagaatgtaagtaatttgcccaagctgcagagctaaattttaaactagataattctgattccaaagcccagataatctggctagaagttgcaccaggggattcactgatttacaaagaattagaatgtgataaaattccctgagtacaggcaagtgtgatttttatctttgctagtaaagccatttagatgtcttaaagtgcctcaatctgttgcacctgttctactaaaacaaagaaatgagtcaacggcctcttttagctttaacattctctctgtctatacatttttatagaataatttttagttattgcagcaggtttcaccagtcagccaacgggtgtgtataacattaatcactagcactacacctcagaagtcttgcttattaagagcactcagcttaagtgaagaaattaaagaattttggtaggcctttgggacagttcaagtttaggttgtttggctgggttgagagagtaaaaaactaacatttcttaacctaaccctttttctttctttctcacaggtaacaactatccaatagcttacctttaaaatgtcccctctattgttcctccctcagacatttttgatcacttgtcccagtttccatgagtcctgtatcacagctgtcacaatgcttgagctatttaggtggaggtaactttcagaaatgaactgctgaagggtgcagagtgctcaagaattagattaacaaagaaagtacacctaaatttagcattaaaatgaacttttaaaatatttttcaataggaggataagcaaacataaaaatgggtgtgcttatgtctataaacaggtgctggagcatagattgttatctggacatcaaagaataatagagctgtagctttaaaagagcacacagctggttattagtgattcactcccaggtcactgccaagtgccaaggcatgtggcaagaatagtagaatggaaatcaggtgatgtggattctaatttgagctctgctctgttaaccttgggcatgccagttatcccctttggaccttagtctcttatctacctaatgaagggtttggagcaggtaattcttcagttctaagtaagaatctgtattcatgaataactgttcagcatatgactcagcccaaggtgtacaggattgctggagtgtggaaggtatgttggctcctgcctgtactagcaacaaggcttaatctagtgaacagaaaggatcaaaggtggctatatccccacctaaatgtccatgatctacaagtgctcttctagctggcagagtgggtcagtaatgagattttgtatctcattatatgaagttctaagcactgaacctaatcagttacccatcacttaagtagacagtgtcaggcagagcttaactctccttcctattttcctttgtcttccttttctctgtaagttctctaacataaggaacttccattttggtgaaagaatagaaaagttgagggacaggccaggtgtgttgtaagtaagactgatccagctgattggtttgccatttagattgcatggcagacatctgccataagcacttaaaacacaccttcaataggcattagaaagcacacacacggccaaacatagtagctcacacctgtaatgccaatactttgtgaggctgaggcaggaggattgcttgagcccagcagttcaagaccagcctgggcaatatagcaagatgccatctctacaaaaaattttaaaattatctgaatgtggtagtacattcctgtggtctcagctactcaggggtctgaggtcggaagatcacttgagcccaggagatcaaggctgcagtgagccatgactgtgccattgcactccagcctttgcgacagagcaagaccctgcctcaaaacacacacactgactagggatggtggcttatgcccagcactttaggaggctgaggcaggcagatcacttgaggtcaggagtttaagaccagcctggccaacatggtgaaaccctactctactaaaaatacaaaaatcagccatgcggccaggtgcagtggctctcgcctgtaatcccagcactttgggaagctaaggcaggaggatcacctgaggtcaggagttcgagaccagcctgaccaacatggtgaaatcctgtctctactaaaaatacaaaattagccccgtgtggtggcgcctgcctgtaatcccagctacttgggaggctgaggcaggagaatcacttgaacccaggaggcagaggttacggtgagccgagatcacgccattgcactccagcctgggcaacaagagcgaaactccatctcaaaaaaaaaaaaagaaaagaaaatcagccatgcatggtgacacacagttgtaatcccatctacctgggaggctgaggcaggagaatcgcttgaacctgggaggcagaggttgcagtaagccaagattgcaccactgcactccagcctgggcaacagagtgagactgtgtcttgaaacacacacacacacacacacacacacacacacacacacacacacacacataatttgctgttgttttgggggcatggcggcacatacctatagtcctagctacttgggaggctcaggcaggaggatcacttgaacccaggaagttgaaactgcagtgagctgtgattgtgccgctgcactccagcctgggcaacagagtgaagtactgtctcaagaaaataaaaaaataaagaaataaaaacataaggtttagatggcaactttaaaatgtgaaaggaggatatacagtttttcaaaattcttctaggagctatgccagcaaaaaggtttgaagacctgaagaccattatatcagtggcataaacatctttaatttgtccttttccttctcctacacctagtcaattgattttttttttcccatttatcaatttcagactctgcctggtttttcactttcccatccattttgttacaatatttttcctcccttgaaattagcccagtctcttggagtgaatgccccatgctccttcctaccgctgtgtctttactacattatcctcccttggaatgccgtcatctcttctctgttcaagaactacttctcccgaccactgtggtcgagattgatttctctttaacctctacaacattggctattccatacagttagcccttagcatagaacatcattgtttgattttgctccttaagaatagaaagcacctcttaaaattctaccatattcccccaatgcctaatgcaatgctaaccacatagtgagtgcttaataaatattgtattgactgcctagagtacagagcacttgttcactcattgttcggccattcagctaatactttttgagaaattttgtgtaccaggaactgtactatgcactggggtacggtagggactaaagtagatgataatccctgctttgaaagactgaaaagtaagatatatggtatgtcaaaaggtaataagtactgagaagaaaaatagaaaaagcaggaaagaagaacaagaagtgtgtgatgggggagggttacagggtggggaggggtagtgttgtatacacttctagataagatagggaagtcctcactgatacttatggtgacattttacaaaggacctgaggtgtaggaaggatttgagcttatctgtgcaaagagccttccaggcaaggaacttaccatgtgaaggcaccaaggctggacctgcttaacattccaggaagggaaagctttggggctggagcagaagggtagaggccagattgagagatgagtcagaggacagtggggcccgggcagagggacagaacctgcgggtgctggcaatcagccttttgatctgagtgagaatagaggccttgagagggctttgagcagaggagtgacctgctgacttaagttgaatagaaccctctagatgcttcattaaggctagactgaagggaggcaaaggcagggtgagatcagtcaggaggcaagtatataatgataatacattgaatataataatgatatattaataataataatccagagatagtggcaactcagaccaggggaagcagtagaggcggagagaagtggtcagattttggatttattttgaaggtagaacagacaggattgctgactctgttgagtagtcagctgggagctattgatggtttctgagcaggagctgaaggaagattaccccggtataggactgctgggaagacgtggtgcaggcagagatcaggtaggaggccattgcaaggatttaagggtgagatccataagggttttaactgcaaatcagcagaggaaaaagggagtggtgatggtcatggtgacagtgatggtgagagagactggaaaggaggaatcaacaggatttcatgactagataacagagaaccaatatgaagaaggaaaacactttttttttttttttgagacggagtctggctctgttgcccaggctggagtacagtgagacgatctcagctcactgcaacctccgcctcctgggttcaagcgattctcctgcctcagcctcctgagtagctgggattacaggcatgcaccaccacgcccggctaatttttgtatttttagtagagatggggtttcaccatgttggtcaggctggtcttgaactcttgacctggtgatccgcctgccttggcctcccaaagtgctgggattacagacgtggagccaccatgccctggcaggaaaacacacttttgaatgttgtgtgacctggagaatggtaacactgttaatttaaaaaaaaaaaaaaagcccagagaaggctgatttagggagaaatttatgccttagttatacagagtttgagatggtaatgaaatatcaaattaaaactgtccagcaaggaagtaggaaatgtggaactgaaaaagaagttagaactaaagatgtggatctgtctttggcataaagattatattaagttacttgagagtagatgagtttccaaagaagcagtgtagcaagaatagtggagggccaagactggatcctgggggtcagcaacatctaggagccagaaaaaatgccttcggtgaaagaaacggaaagatgggtctattcaaattgtagtcagccaacccatgccagaagtaagcacagaaagtaagagtgaacattggccaagcacagtggctgatgcctgtaatcccaacactttgggaggccaaggcgggcagattgcttgagctcaggagttcgagaccagcctgagcaacatggtgaaactccaactctacaagaaattagccggtcctgtgcacacctgtagtcccagctgctagggaggctcaggtgggaggatcacttgaacctagaaagttgaggctgcagtgagctgtgagcatgccactgcactccagcgtgggcaacagcccggtggctcacgcctgtaatcccagcactttgggacgccaaggcaggtcgatcacttgaggtcaggagttcgagactagcctggccaacatggagaaaccccatctctactgaaaatacaaaaattagctgggcatggtggtgcacacctgtaatcccagctactcgggaggctgagacaggagaatcacttgaacctgggaagcggaggttgccgtgagccaagatcatgccactgcacttcagcctggacaacacagagagactctgtcccaaagggaaaaaaaagaaaaagatccaggagatccattcctaggtatatacccaagagaattgaaaacataaaaacatatgttcacacaaaaacttgtacatgggctcatacctgtaattgcagcactctgggaggccaaagcaggaggatcatttgaggccaggagttcaagaccggcctaggcaacatagtgagaccctgtctctacaaaatgcatgaatgtttgtagcagcattcttcataatgttcctaaagtggaaacaacccagttgtttgtcagctgatgaatgggtagattatatgcagagtatccaggctgggcgtagtggctcatgcctgcaatcctagcactttgggaagctgaggtggacagatcatttgagctcaggaattcaagaccagcctgagcaacatagtgagaccttgtctataaaaaatttttaaatgttaaaaaaaagaatgcagagtatccatacaacgggatattattcagccataaacaggaatgaagtactgatacatgctacaacatggatgaaccttgaaaacatgctaagtgaaataagccagacacaaaggtctacacattgcctgacgccatttatatgaaacacctagaataggccaatctatagagacataaagtagatgaatggttgccaggctctgggagttaagagagaatgggaaatgactgccaacatgtatggggtttctacttgaggtgatgaagatattctgaaattagatagatagtggggatggctgcacaaccttttttttttttctttttgagatggagtctcgctctgttgccaggctggagtgcagtggcgcaatctcagctcactgcaatctctgcctcctgggttcaagcaattctcctccctcagcctcctgagtagctgggactacaggcaggcaccaccacgcccagctaattttttgttagtagagacagggtttcaccatgttggccaggatggtcttgatctcctgacctcgtgatctgccctcctccggctcccaaagtgctgggattacaggcataagccaccatgcccggcgacaaccttttgaatatactaaaaaacattacattttacactttgaagggtgaattttatggtaaattatatctcagtagaaaaaaatccaggaaactgtgtatagtcagccctccatatttgtgggttccacattcatggattctaagctaaataataatacaataataaaaatataaataaaaaacaatatgctatatagcagctatttgcattgcatttacattatattaggtattatgagtaatccagagatgatttaaagtgtatgtgaagatgtgcataggttacatgcaatactacaccatattatataagggacttgagcatctgtggtgtctgctgcgagtactagaaccaatccttcatggacaccaagagataactgtattcaaaaccaatgaaaccagtgaaagagaagtttcaaaaagattgaaaacacagcagggcagtcaaggaaaccagggagaaaggaaagactagtggatttgggtattagaagatgaaagattaaaacaaatcattccatatcagcatgcagtccatagactactcctaaaagttcctgagacttctttaaggaatctctttggggtaaaaattattttcatgatactactaagatgtatttgtcttttccctatgttgacacttgcactgatgttgcaaaatggtggtaaaactgctggcgccttagcacaaatcaggacggtgacaccaaactgtaccagtggtcactgcattctttactgccatgcactcacaatcaaaacagagccagtttcacttaagaatcgttgatgaagtggtaaattttttttgttttttttttttgaggcagggtcttacccaggctagagtgcggtgggggcatcacagctcactgccgcctcaacttcctgggctcaggtgatgctacctcagcctcctgagtagctgaggctacaggtgtgcaccaccacacctggctaatttttgtttttgttttgttttgttttgtttttagagatggggtttcactctgtcgcccaggctaaatattgttaattgtatcaaatgtcagtccttgaataaatcttttttttttaactggtatgcaccaccacacccagctaatttttgtatttttagtagagacggggtttcgccatgttggccaggctggtctggaactcctgacctaaagtgatctacccgtcttggcctcccagagtgctgggaggtgtgggccaccatgcctgatcctgagtacatctttttaaacttgtttgaagaaatgggaaatatgcataaaccgcctctgctgcacactggtagagtacggtggttgtcacaaggaaaagcatttgggcgattattcaagttgcatattgatttagcagcttcttttttcaccgaccaccatttttacttgaaagaatgatagacaaactatggttttagacttaggcatctggcagacagtctcttgaaactgtatgaagtgagcctgtcacttcaaggtaaacaaatgacaatatttgtagccagtgataaaatttacactttcaagtaaaaattagaattttggaaaacttgtatccactcccatgagcttgaccacttttcaatatatacagacttttctgctgaaatcaatggtgaaatttaaggaatatgattttttgatatgtattctaatgaaatatgtcagtatttagaagatctgcctaacaacagggaaccagtattttgcagtgatctatgtgtgatgttacaaagtcatgcatggtaaaatatccattcaaagtgcaagagaagccaatgggttttattataacaaaagttcctaactgttaagaaactactacttgtcaagttttgatgtagcgctaaagaatatccaaaattatctgaaaatgcagatactttctctgtctgtgtaaagccagattttctttgtatattttaaccaaactaacatattacaacagattaaatgcagaagcagatttgagaatccagtcatcttctattaagtcagacagaggccataaatttatgaaaatgtaaaacagtggcattcttctcattagatggctttatttctttgattgttttgggaaatatagtggtttacatttaaagtatgttatttatattaatataatgtgtagtagttttactgttaatatttttactgaattaatcatatcttttactttttttttagttttattttcttccttttttttttttttttgatttggagtctcgctctgttgcctagtctggagcacagtggcgtgatctcagctcactacaacccccacctcctgggttcaagcgattctcctgcctcagcctcccaagtagctgggatcacaggcgcctgccaccatgtctggctggtttttgtatttttagtagggtttcaccatgttggccaggatggtctcaaactcctgacctcaagtgatccacccacctcggcctcccaaagcattgggattacaggagtgagccaccacacccagtttttagtcttattttctaacacagtagacattgatatatagttcccacattaacaaaagttgtttggggtgctcaatttatttatttatttatttatttatttatttatttattttattttaattttctttttgaggcggagtctcactgtgtcgcccaggctggagtgcagtggcacaatctcggctcactgcaagctctgcctcccaggttcacaccattctcctgcctcagcctcccgagtagctggggctacaggtgcccgccaccacacccggctaattttttgtatttttagtagagacagggtttcaccatgttaaccaggatggtctcgatctcctgacctcgtgatccgcccgcctcagcctcccgaagtgctgggattacaggcatgagccaccgtgccccgcttatattttttttatttttatttatttatttatttatttttgagacagggtctcaaaaaaaacaactttgttgcccaggctggagtgcagtggcatcatcgtagctcattgtagcttctgtctccccagactcaggtgatcctcctgcctcagcctctcaagtagctgggactacaggcacgcaccacccaccccacccaactattttttttattttttgtagagacagagtcttgctatgttgcccaggctggtctcaaactcctgggttccagtgattctcccgtctcagcctcccaaagcactgggattacaggtgtgagccaccactcccagccaaatttaccagacttaatggaaacagtccatttctgtttcttcagatgaaacctcacaactttaggattaataagtaatctcacaactattgtacaggaaataagaaaacgttcccgctaacaatgcacgttgtgatagatctggtccctgacacaaacagcacttggaactgagtgaagtccagagactgaataatacagttctatccactccctgtgcttgactacaacccctgaagagggcttgtacaaattaaatgtatcccagcagctgcttgaaagaccacagcattggccgggcacggtgactcacgcttgtaatcccagcactttgggaggccgaggcgggcggatcacgaggtcaggagatcgagaccacggtgaaaccctgtctctactaaaaatacaaaaaattagctgggcgtgatggcgggcgcctgtagtcccagctactcggagaggctgaggcaggagaatggcgtgaacccgggaggcggagcttgcagtgagccgagattgcaccactgcactccagcctgggcgacagagactctgtctcaaaaaaaaaaaaaaaaaacacgcattttgaatgtccctagcattagggattataaaggtcccattctagtagaagatcctcaggtttggagtgtactaaaggtcatcatccttcgcctgctaataaatttctgaagtccctgctttaaacaaacaatcaaaaagaaggaacagttacagtgctgccaaacaagttctttttttttttttgagatggagtttcgctcttgttgccaggctggagtgcaatggcgtgatctcggctcaccacaacctccacctcccaggttcaagcaattctgcctcagcctcccgagtagctgggattacaggcatgcactaccacgcccagctaattttgtattttttttagtagagacagggtttctccatgttgaggctagtctcaaactcctgacctcaggtgatccgcctgcctcggcctcccaaagtgctgggattacaggcgtgagccacggcgcccggccaacaagttcttacaaacctctgggttgttacaaacccatctggtgctaataaaggtaaggcatcaaccccaatctccaagctgagaattttatcctcaggactgagcactgcggcctgcattcggatgttagtggggctgtcagaaccgtgtctcatgctgttaaaagtggaagtccttcccactcagacccacggaagccaactctgatgagtgggagggtgagcagaaggggcttcggtcattttttatagattcttcaggtaactctagccaccatattaagcattggctcccacaaaaaagcattaaggctcagaaacatcttgtagggtcacaccctccctaaaaacagcacatccctgaagtggtggctgggcagccaggctccaaagcccgctgagctgagcggcagccaagaacaaggtttggtgtttacatactcaaaatcagcctgggttgtcacagcaactcacctcagcacagttcttccttctccacggcggcttgcttccaggctttgctgttctccgtcaccgtcttaacgttcctgctaacctggcctgctgcattctttttatttttctcccaattcctccgccttcttctcatgtgtttgctagtgtgcaatacctcacctgtttggaactcaacaacgtcccctcctgcaaaacgcacctgaaaacaagaaatagcacacaaggcctctaagtggccagaacagatgttaccaggcctaagtccataaggaaagcacccaagccccttgcttttgtcttaaatctttttttttttacacctttaaaataaggttatggtttctaaggcctgccgtaaattaggagtagggagaggaactattgccaagcaccccaaaagttcaagaggtgactgttgatcccagagtagcaaggaaagggacagacaggctataagaagtggacacaagaactcagaactcaggacagtgtaggccttgttagagtcaggcagacaatttcacatacctcagaacgtcataaagccatcatgactttactctggaatagatacgatccagacacctagaaaatgttaaattagattcaacttaaagaggcagagtaatatgtgtggtgttttttaatttcgagcattccaaatggttaagggttttcatgcttaaagagagaaacttagctacctagaacttatttatgagtgctctagataattatctactgttttatatttttttatttataccccgttactaaaacaaaagtaaaaataaagcaaaagattgaaggcattgacatttagtctatatactttctagttcctggctctagttcttagcaatatttgctgctaacctggtgttctgtctctgccaaatttctgcccatgtgaaatatatgagacttgatcctatttccttgctcattgatctacctgaaagggtcatagatgtctccacctccctagagctagtgatcctatatcccatcatctcagccagctagaaaacgaaccatcacatgccacctcctacccaattacgtgcttcataaacagaatacctggcatatagcaggcatttactaaacacttggtgaatgaatacatgagccagtaatccataagatatctgtagaattaattacagttgagccttgaacagcgcaggtcctatgggatcccaccccttgtacagtcaaaaatcctcataaaacttttttttcttttttttttgagacagaatcttgctcgttgcccaagctggagtgcaatggcgtgatctcagctcactgccacctccgcctcctgggttcaagcaattctcctgcctcagcttcccaagtaggtgggattacaggtgcctgcaccacgcctaactaatttttgtatttttagtagagatggggtttcaccatgttggccaggctcgtctcaaactcctgatctcaggcgacccacccgcctaagcctcccaaagtaggggattacaggtgtgagctgccgcacccggccgacaggtgtaactttttttttttttttttttttttttgagacagagtctcactctgtcaccaggctggagtgcagtggctctctctgctcactgcaatctctgctcactgcaacctctgcctcccaggttcaagcgattcccctgcctcagcctcctgagtagctgggactacaggtgtgtgccaccatgcccagctaattttttgtattttagtagagacggaatttcaccatgttagccaggatggtctcgatttcctgacctcgtgatccacctgcttcagcctcccaaagtgctgagattacaggcatgagccaccacacccggccacatataacttttgactctccaaaaacttaactactaatagaagacttaccaatagcataaacaagttgattaacatatattttgtatgtcatttgtgttatatatgtatttcttaccataaagtaaactatagaaaagaaaatgttattaagagaatcataagcaagaaaaaatatgtttactcttcattcagtggaagtggatcagcataaaggtcttcctcctcatgatcttcaggttgagcaggcaaggaggaggagaaagagaaagggttgccatctcagcagtggcagaggcagagggaagtctaaggggacccttgctgttcaaaattgtgttgatcaagggtcaactatacttgcatgaagctataaatttaagagcctagcctattatgggaacagcaattaaaaaaaaaaacaccagttggccgggcgtggtggctcacgcctgtaatcctagcactttgggaggccaaggcaggtggatcacctgaggtcaggagttcgagaccagcctggccaacatggtgaaataccgtctctactaaaaatacaaaaattcactgggcatggtggcgggcacctgtaatcccagctacttgggaggctgaagcaggagaatcgcttgaacctaggggccggaggttgcagtgagctgccaagatcgtgccattgcactctccagcctgggtaaaaacagctaaactccatctcaaaaaaaaaaaaaaacaccagttgatcctggcaccaggaagatcaaatggcatttgtttgtttgtttgttttgagacagagtctcgctctgttgcccaagctggagtgcaatggcacgatctcagctcactgcaaactctgcctcccaggttcaagtgattctcctgcctcagcctcccgagtagctgggattacaggcacccgccaccacacccagctaattttttatatttttggtagagatggggtttcaccatgttggccagtatggtctcaaactccggatctcaagtgatccacccacctcagcctcccaaagtgccttggtttacaggcgtgagccactgcaccagccagtacagttttttgttttgttttattttggttttttgagacggaatctcgctctgtcgcccaggctggagtgcagtggtgccatctcagctcactgcaagctccgcctcccgtgttcatgccattctcctgcctcagcctccctagtagctgggactataggcgcccgccaccacacccggctaatttttttttttgtatttttagtagagacggggtttcaccgtgttagccaggatagtctcgatctcctgtcctcatgatccgcccgtctcagcctcccatagtgctgggattacaggcatgagccaccgcgcccagccttttttttttttttttttttaatgtatgggggaaaaatgactagaaggacagaaaccaacatataacatgattgtgtgcatttacttatttaacaaataattgagcaatttatttctgtatgatactattctaagcgttttagagttaagcaaactcacagtaaactgtattgcccatgataaaaactgcagttacataatttaaaagcaagaatcgcagcaattcatcaggcacagtgactcacgcctgtaatcccaacactttgggaggccaaggcaggaagattccttgagcccaggaggtcaaggccagcctgggcaacatagtgagaactcatgtccacaaaaattacaaaatagccaggcatggtggcaagcacctgtggtcccagctactcaagaggctgaagttggaggatcacttgagcccaggaggtcaaggctgcagtgagcgatgatcgtgccactgcactccagcctgggtgacagagcaagagaccctgtctcaaaataaataaaaataaaagcaagaattgcagaaagtataaaccatgaccaactcaagagaataatcaatgaaagaataggcagaatgtctttccaaaaagcagttgagagatccccatcctccacatatgcactagtgcagtggggatgttgccaggcatggccgccagacctctagatagaacactgaaggtgagtctgcagtaaagccatggaatgtgctaattttagtttaggaataccaaattttattgaccgtttttaattcaataagcaacccttggccatgtataatcagttcatgacccatcagaagatcctctgtggttcactcatggcctttggactatactctgaatcatggctttagaagacatttttttagtatacttaaatggattttataacttggttgatgcccagattacagactgtgaggagtatctccacataacttgtaactgctatatatgcagtcagcaattccagtatttagcctgatattaatttatatttttcctcataatctgataatacagtgctagcaagatagatcacaaagtgtaaatgagtgtttctggagcatagatgggtacgctcaaatctttgtatcttgttttttaatagagacggggtttcgctatgttgctcaggctggtgtcgaactcctcggctcaagcaatccccttgcctcagcctcccagagtgctgggattatacatgggagccaccatgcctagcttccttgtatcattttttaaaattcaagtaagagaaaatgtctggcaatagttcataagctataaatgaaacctagtcttaggacccagctttatattgcctcaatcaaatattaatatctttagttcaaaatttgtatttacaaaaaacttttggttcttggggataccgttattgccttctctgttgccatccatataatgtatgttgttttttttttctctctccctctgggctgcgtttcatgccagataaacttccaaaccaaactgggatggcaccaggcacaaataacactcttcttatcttttcccccatctaggttacccctttgctttgttttatcggcattaccttttctacaaggagacctacctcatccacctcttccatacctttacaggcctctcaattgcttattttaactttggtgagtaaactaaattagcagtgacaccgcaattagtgggaacctggaaggaacagacttgaacaaaatttccttgagagaatctaataggtagggaagttataatgctcccacttgcaaagagggttgtatgaagaggaacacagcttaacttttcctttttttcttttatgtacattcttctgtcagataaaaacattttgagggtggttacccttgccatacctcatcaacaaagaatcctcagtttctctgtgctgtggatgtaactgaatgaccgagccaagcagtccccacttagattcattcttcacttcagacattcaaaaatacagtaacaagctgggtgtggtagcccggaattcaaggctgcagtgagctatgattgagctactgcactcaagtctggacaacagagcaagtcgcatctctaaaaaaacaaacaaaaaaagaaaagaaataaaataacaccctaataatcttttttattttaataaataatttccatcctctcctccaaaacatgaggttattctgaaaaaaaagatcctgatgccaacattttttctttatatattacgttgtgattggaagtctcaggacggtgggagtgtaaaaaccaggctaaattctctcttcttgcatccaggaaaccagctctaccactccctgctgtgtattgtgcttcagttcctcatccttcgactaatgggccgcaccatcactgccgtcctcactaccttttgcttccagatggtaaacgtctttcccttagcagctcaggctacagctgacagcggttcaggggacaggggtaggcaggggactgtggtatagaaattagcagacctaatttctaacccctctcccagcacttagcagtatgacttcaggtaggtggcttatcacaggcccaagtgttccatccacagattgtaatggtaactctttgcctgcctcaaggaagggccaccagctaaccctttgcatactgtgccattaggctctttggtttaacccactatccaggagcagagtcacttcaaggcaagacagaaaagcaacttagaatgagttaaagaacctaagcctaggccaggcaaagtggctcacacctgtaatcccagcaccttgggaggccaaggcagtcagattgcttgagcccaggagtttgagactaacccgggcaacatggtgaaaccccatctctacaaaaaaaatacaaaaattagccctccagcctgggcaacatggtgaaacaaaaaaaattaaaaattagccgggtggggtggcatgcacctgtggtcccagcatctaaattctcatctcagtttagccctcattttgccaagaagccttgagcaacgctcttcccattacaggttttcagcacctccatttgtaggaatttattaaggcttttaatgatgggatgaggagaaaggaaaaaggaaagagaacattgaatttcagagcaaggagaagaaatagtagtgatgctagaataaatacttctgcctctcctaggcctaccttctggctggatactattacactgccaccggcaactacgatatcaagtggacaatgccacattgtgttctgactttgaagctgattggtgagtgatggtcactgcctgccttccttacatgtaggtccctcccccatctcactaaaaacttcctcggcaccccccctccgccccccgccatacacttctggctgcactcagtctacaggccacatcctcagtgtcctctcccaccaccctacccatccgttctctctctgctcaggtttggctgttgactactttgacggagggaaagatcaggtaagtacccattcatcggcagagaggttcaagacttaatgaaagggaagaaaaaagttgttaacaaaagactgaacccaaattccagagcggagcctctccctcattccccagcctgtgcaatctccctttcagatagcactgagcaaggatcaacaaatctaatttgcccaggatccagctcttgcacaaagtccagagatcaatgccagcaaggcatttgctaaagcagcaacagccagctatgcacacacatacgcatttccacaagaagcaactatttgtcatcccccaaagagaaggctatttgaagaaccccagtcagtggggcacacaggtggggaacactcaaagtggctcttgtggggagattcaaggctatcctgaaccatgcattctcttcttggcatagaattccttgtcctctgagcaacagaaatatgccatacgtggtgttccttccctgctggaagttgctggtttctcctacttctatggggccttcttggtagggccccagttctcaatgaatcactacatgaagctggtgcagggagagctgattgacataccaggaaagataccaaacaggtaattgcccctcttggtccagatgtttgtgtaggtatttcactcactctgaagtgactcttctgaaagctgcattctccagcatgaccctggcatagagacctgagtcatgcaggccctggactgttgtaacaggcactctgtgccaggagtgggccctttttagtttagggttcttccagttatccattctaacactagtacaaacataaaaatccacatttatgccacaggattttgcctgaaccagtcacatttctgcctttaaagcctattttcatgtatatatgaaatatatttatgattgataggtaggtaggcaggttgataggtaggtaggtagatagaggctgggcacagtggtttcacctctataatcccagcactttgggaggccgaggtgggaggatcacttgagcccgtgagttctagaccagcctggcaacatagagagactctgtctctacaaaaaaatacaaaaattatcagacatagtggcatgcatctgtagtccaagctacataggaggctgaagtgggagaattgcttgagtccaggggaggtgggtcaaggctgcagtgagctttgatcacaccactgcactccattctgggcaacatagcaaaatcctgtctcaaaaatatttatcagtaggaaatgcaggagggcacagtggctcatgcctgtaatgccaacgctctgggaggccaaggcaggaggatcactggaggccaggagttcaagaccagcctgggcaacatagtgagaccccatctctacaaaaaaaaattatccaggcaaggtggtacatgcctatagtcccagctactcaggtggccaaggcaaggggatcgcttgagcccaggagttcaaggccacagcgagcaatgactatgcctctgtactctagccggagtggcagagcaaggccctgactctagaaaataaaaattaaaatggtaaaaaaaaaaaaaaaaaaaaagtttaattgccagaagaattccttcactgagaacttgtccatcctgtgtttcagcatcaattcaaccaagaaatgaaggagcagattcaaagtggttatttttattatcttacctccactgggttttcagtcccaatggagattgtgagacctggcaagaccttgagatcagtagcatccctgaggggtaaacacaagactggtccactgtctgctgccctgactttcctacaactcttaagaggtttgcagtccccattcctcatagccagccatagaaatctttccctgaaacaggaaacactttgggcagcagagcttctcatcccattccaggtagacaaccacacccctaaacactcctctccataactgaaggtcagagggtgaagggaatagtctctgctctctgtgaccaggaacttcactcgttcctttccagcatcattcctgctctcaagcgcctgagtctgggccttttctacctagtgggctacacactgctcagcccccacatcacagaagactatctcctcactgaagactatgacgtgagtgtctactaaagcagcagcagcatgactgcaccagagctagaaaatggacaggcaaggatccctacagatagcagagaagtaggaaatatcatctacaagtgcatgttggttttgctctagatctgtgagttgtcaatgccagccgtgctgggacatgttcatcagccagcactgaacaaccttcgcgggcacagggctgtgccaggtgcacatttagcacccgttgccttctctaggagccgctcctagcttgccttatcacatccacgtgacccctcagagcacagcagcttctgattctccatcctattttcttctcttgactgatacatttgggcacttctagggaattcagaaaccaagggaaggggggaagtgctggcttttgctcctgcccagctgaaaggcttgaaaacagttcagtaattctgggcaggtttctctccttaaattaaaatccaatatgggcccctctgtacttaacattccaaatgctcattccaaacactttgccaacgaaggcaaacagtagagaagttaaatacagtgctgcccttgaggctctccaagggaaaggcgaatgaatattctccaggccctctgcttattcctctctgcctattgtgaaggcaatcaggccagactattgagggcatctggcagcaggactcaggcaggtatgaagtagccagccacaagtgtgaaaaggaagagtgctgagagaaactgcctagtcatgtgatatccctaatgcactgtgctttcttccctcaagaaccaccccttctggttccgctgcatgtacatgctgatctggggcaagtttgtgctgtacaaatatgtcacctgttggctggtcacagtaagtagaaaagttgaaacaaggtcctatttagacaagccatgggggccagtatggggagtggcaagagccctaactgagctattccctctcaggaaggagtatgcattttgacgggcctgggcttcaatggctttgaagaaaagggcaaggcaaagtgggatgcctgtgccaacatgaaggtgtggctctttgaaacaaacccccgcttcactggcaccattgcctcattcaacatcaacaccaacgcctgggtggcccggtgagctgctggtggggagcctggaccctggttccttccttccactgtcttcccagattggagggcaggggtgtaccatgtcacccctatgcgtctttcccatctgggcagaaccccctgtcgctcacactgactttgacccccacctatacccccctcccaaaaaaaccattactgtcatatttgaaaaaaaggcaagatataaaagtgcgttaagacctgggtgttactccagctctgccaatggacttatgtcctccactgccctgtttatcaacagctttacttgtttgtccccaccactagagtgtgggcagcttgagtagagtgtctggttcaccactgatctcagcatcagcctcagtcactgctgctgaaccaagtggctcgtgcgcacacggtctccagctccgccttgggtctgctttccatctctaaaagtaatcagtcagcactgcctcctgtaccctctgggggctacacgtgggaacccaccagcactccaatccaatcctcagggtgaggacccagaggcaggtggcgggatgcaaggaccagtcagtttgagggtcgccccacccacccttttctccagctacatcttcaaacgactcaagttccttggaaataaagaactctctcagggtctctcgttgctattcctggccctctggcacggcctgcactcaggatacctggtctgcttccagatggaattcctcattgttattgtggaaagacaggtaggcctccagggtgggggtgaaggggaatataagggacaagatgctgatgagctcctcctccctccccaggctgccaggctcattcaagagagccccaccctgagcaagctggccgccattactgtcctccagcccttctactatttggtgcaacagaccatccactggctcttcatgggttactccatgactgccttctgcctcttcacgtgggacaaatggcttaaggcaagtgaaggcctgcttgtgagactgggagggactcactgcaacctcaaaggttgcaaaggacactccaggcctgtctaccttagtggcctctctctccacaggtgtataaatccatctatttccttggccacatcttcttcctgagcctactattcatattgccttatattcacaaagcaatggtgccaaggaaagagaagttaaagaagatggaataatccatttccctggtaagttaatacagctaaactaaaactaccaccaggttacagaatagagcaacagactggaaaaaaacaatagtattagaaatctggggtgaattccaaggattagcctggctactaaggaacacagtatgggcaatgactactgtgacttattgaggcatgctaggaaacatctggaagggctatagaccaggaattacaggagtaactaaccagccttccaaactcctcttgtcttgcaggtggcctgtgcgggactggtgcagaaactactcgtctcccttttcacagcactcctttgccccagagcagagaatggaaaagccagggaggtggaagatcgatgcttccagctgtgcctctgctgccagccaagtcttcatttggggccaaaggggaaacttttttttggagaaggcgtcttgctttgtcacccacgctggaatgcagtggcgggatctcagctcaccgcaacctccacctcctgggttcaagtgattttcctgcctcagcctcccaagtagctgggaatacaggcacgccaccatgcccagctaatttttgtattttcagtagaaacgggatttcaccacgttggccaggctggtctcgaactcctgaccgcaagtgatccacccgcctccgcctcccaaagtgctgggattacaggcgtgagccaccgtgcccggcccaaaggggaaactcttgtgggaggagcagaggggctcacatctcccctctgattcccccatgcacattgccttatctctccccatctagccaggaatctattgtgtttttcttctgccaatttactatgattgtgtatgtgccgctaccaccaccccccccatgggggggtggagaggggtgcaaggccctgcctgctccactttttctaccttggaactgtattagataaaatcacttctgtttgttcagtttttcaccactagcattcctgactgctctctttcacagttcttctccatcatcagggttctctcctttagcacatgggaatctgggagctaaagcctgccttcaaagcatggaaccaaactgcaaactctgtaacctcctatctgtccctgaagtcccggggaacaaacagttttacaccactggatactttaggaaccccaaaacaaccaggtttgcaagaacagtattcataggataaacaaatagcaaatgtacagccttggcttccccaaactccacagtctcagtgcagaaagatcatcttccagcagtcagctcagaccagggtcaaaggatgtgacatcaacagtttctggtttcagaacaggttctactactgtcaaatgaccccccatacttcctcaaaggctgtggtaagttttgcacaggtgagggcagcagaaagggggtagttactgatggacaccatcttctctgtatactccacactgacctaagaaaagaacagttttgtcagccaactctgtcactcagtagctgtttcagcccttctttagggcaggaaaactatggctgagctagtatttcagctgtgctgttgaatatcaaatccctacaaaggatgaagaaggtcctaactgtgacttccaattatggcagcagccctcaaaggatgtgccctggggcagggtgtggaactgtcatgtgtcttctagctcattgtaagcattgttaaaatgcctactgctctgggaattctatactaagttcagctctaccaagaatttcagggttgagcccagaccttaccttgccatgggcaaaggcccctaccacaaaaacaataggatcactgctgggcaccagctcacgcacatcactgacaaccgggatggaaaaagaagtgccaactttcatacatccaactggaaagtgatctgatactggattcttaattacctaaagtaaaaaagagagaaaagtcagccccagaaacattcccagaaccagccttcaactaacaggtttcaatacctcaccttcaaaagcttctgggggccatcagctgctcgaacactgagcttgtgtaaaagttgaactagaagggggaaaaaagagttcagagctagatggagaccacagtccttctgtccagtcatcgaacaaggaaaaccccatggataagatgagttccctgtgtgctttatatctagactggactcctgaaatgttaggaacaaacagttgccaagcatatggctagctgtacagtgatgggttcagactccctctttcactcagccaggaagctactgcaagaacaggagtggagtttccacaaacatagaaaaataataacagtccttgtcctggtattaatcatgttgttctcccattttctcgcttaaaaatccacatttagttctcccttttcctcttcctcccttcttccctactgacaagttcattctaactttgttctaaggcttcttacccatgaggccacaaaagcggtcaaaggttctgggaattcgggtctggggattcacttcaatcagaacattcttctgtgtatggatataaacctgtagcaagccagctcggttcaggggactatccatcagcatcagcaaactctgagcaaagcagaaaccgagacatggttaaggctgaagagaggcagcactcagctgccaacccttccatacagaggctcaaagggttgtgagcactgtccctggagttacctggtgggtgatatctggccgcgcttccccagggtcccgtccattcttcaacaatatagacttgtgcttgtcacagttgagtagctcatatgtcttccctacctgaagaacagggaacatgacgagagaacagcataagcttctgttacctagccccgtggttcttcaagtgtggtccccaaactaccagcagcagctgcacctggaaacttgttaggcaaattctcaggcccaccctagacctactaaaccaggaacactgggggtggagcccagcaagcccttcgggggattactgtgcagccttatttgcactccccagtgaatggtctgagagggaaacaggaggaagggcacaacctgtgacttcacattatctactaatacactggatttaattaaaaaacctgtggctgttaggcaaggccaatgagacatcctggaactaggcaggagttagtagttagcaaggctgaatgctgtgtttattacaggagcagtaagtaggtactgtgcaaaatatcgagtcaccaccctcagtttgcgtacaccaaacatgcactaagtgaagagctgcaaatctgaacaagaaatgtgaaggccgggcgtggtggctcacgcctgtaatcccagcactttgggaggccgaggcgggcagatcacaaggtcaggagattgagaccatcgtggctaacacggtgaaaccccatctctactaaaaatataaaaaattagccgggcatggtggcaggcgcctgtagtcccagctacttgggaggcagaggcaggagaatggcatgaacccaggaggcggagcttgcagcgccactgcactccagcccgggcaacagagcgagactccatctcaaaaaaaagaaatgtgaaaactaatgatgcaggaggcagtttaatcaaagaaaactctcagaagtaaaaggaagaggggttattcccagttttaagacgggcatgggggcagatgcagtggctcacggctgtaatcccagcactctgggaggccaaggcaggcaaatcacttaaggtcaggagttcaagaccagcctgggcaacatggcgaaaccccatctctactaaaaatacaaaaattagctgggcatggtggcacatgcctgtagtcctagctacttgggaggctaaggtgggaggatggcttgagcccaggagacagagattgcagtgagccaagactgtaccactgcactccagcaagaccctgtctcaaaaaaaagaaaaaagaaagactggcatgagcaaaggtacagatggaatcaagacaaagtagccaggtgtggtggcttatgcctgtgatcccaacactttaggaggccgaggtggaaggatcacttgagcccaggaatttgagaccggcctgggcaacacggtgggaccctgtctcacaaaaaaaaaaaaaaaaattagccaggcgcagtgccatttgctggcagtcccagttactcaggaggatgaggtgggaggactgcttgagccagggaagtagaggctgcagtgaaccatcacaccactgcactctgttgcccaggcaacagagcaagaccctatctcaaaaaagaaacaaaaaagaaaaagtggaaacgaagaaaggaaattttgaggaaaattgggagctgagacactaaagggcagtgattatatatgaagctgctttgtaaaccacagaatcctaatgtatcaagcacaaagccaaaaataattctggagtaagcagggcaggatgggaatgactgacagacactatcctaacaactctctgtacactggaaaagacatcagaagtttgatgttaaagaagtggactacatctgtagcagctaaaagaaataattccaagttgcaatttggagtcccaaggagcattagggtggtcagtaaaaagtctaaaaacaaactgttatatacaaatacaagttttggaaggttaagtttttatgtatcactggaatgtatatgtctagcaacattcttgagatatatggctccaaaaagtctgcgaaaaaagggatgtagattttgaaattgaatagttgaagtaatgtcacagagagcacaaagaacaaatgaccaagaactaagtccatgagacacccttagttatagaagaaaaaaaccttcttgaatgaataatacagtttcaacccattagtaggatataatcatgttttctattcttttaatagattacaggcgcaggcctgtaatcccagctactctggaggctgaggcaggagaatcgattgaacccgggaggcggaggctgcagtgagccaagatcgtgccactgcactccagcctggtagagactgagactccatctcaaaaaaaaaaaaaaaaaaaagtgtatttagaacgaagattaaaatcctggcctgacttctaaaccaatgcgatttcttctgggcctattcaattagttctaacgggtaagagaaaggaggaggaagaacactgcccaaggctttaagatagagaactgctggttctattacatgtggggaaagagatgaatgatagataaaaatgcagatgtaaaagttttaaataataaccaggtctggacagtgtatcataggtggatattagagagaggtgactatggatactaatgaattgaaacacgaagcccttacaaaaagtgtgggcagactaggctacataactacgtttctcatctgcccagtaacttgtcttgggatgtggaatgacgcaaggaacgaaactttcctctgcttagactactataccacagaatcctggtaaaccaattggaagcaaggaggtgagggctagaatatcattcaaaaagagcaaaagaaaatgagtactaccggccgggcacagtggctcacgcctctaatcccaacactttgggaggccgaggcgggcggatcacttgaggtcaggagttcgagaccagcgtggccaacatggtgaaaccccatctgaactaaaaatacaaaaaaattagccgggcgtggtggcacctgcctgtagtcccagctactccagaggctgagtcaggagaactgtttgaaggcgggaggcagaagttgcagtgagccgaggtcgcgcaactgcactccagcctgggcgacagagcgagactccgtctcaaaaaaaaaaaaaaaaagaaagaaaaatgagtactaccatcccaggatgtcaaatcaacgcaaagccaaccaagccaccttccttcaaaagcatctttcacccctctctgctttctacatccactctgggccccttaccctcattccacggagtcccaacctatcgatttactacttctccacttcctgtcccaaactaccttgactgtctccagactggccccttccagcaccacaataagcctacggcctccgatcttgtttcctgcccctagtcggggccgcttgggtggcagagcatcccagtcctgtgcctgctccccaccgcttcgttcacgaggcttgaatccatcactgggcgcggccatcttgcaacaataccggaagttgcgctaacgctcttaaataagaacagcgcggcttctaatcacaaatttccttc

SEQ ID NO: 808 - DNA, 945 bp, Homo sapiens
cagatttcctgagaagcctcttatcacagccagcacagacatctgtgcctttcctcgcctgagatgtcaccagctcagggccactccctgccccagccagatcaatgggcctttcacggcttctgagggtggatcctaggagtgcccctgtgacgaatgctcagatgactgcctctctaggatttctgtttgtttctgcttcgcagtcttccctccacccagaagctcccgaatgtccaggaagaattgactaattctctccatgagtttcttgcccacaggacgaatggagccattgctgtaacaaccttattttccactaagtcagaataagagacctggacagaaagagagtaatggctgaggcacaaggagcgagtattttaaatcaggcttatgaatgtgctctgtggatacggtttgcccatagggaggtggttttgggggttgcgaatcatactcaagctgtccctgaccgactcaccagtattctacaaacttactacaaacctctcaaaggaccatcttggaagacactagcaagggcgtgaacaatcccctctgacgttgctggctggtggtggaggccacggagcctccctgtgtgagactgtactatgtggtcactagaacgttttgaaagacagttctctgcaggcccggcaccgtggctcacgtctgtaatcccagcattttgggaggctgaggcgggtggatcacgaggtcaagagatcgagatcaccctggccaacatggtgaaaccctgtctctactaaaaatacaaaaattagccgggcgtggtggcgggcacctgtagtcctagctactcaggaggctgaggcaggagaatggcgtgaacccgggaggcggagcttgcagtgagctgagattgcgcaactacacttcagcctggcgatagagcgagactccatctcaaaaaaaaaa

SEQ ID NO: 809 - DNA, 5775 bp, Homo sapiens
cgggtccgtagtgggctaagggggagggtttcaaagggagcgcacttccgctgccctttctttcgccagccttacgggcccgaaccctcgtgtgaagggtgcagtacctaagccggagcggggtagaggcgggccggcacccccttctgacctccagtgccgccggcctcaagatcagacatggcccagaacttgaaggacttggcgggacggctgcccgccgggccccggggcatgggcacggccctgaagctgttgctgggggccggcgccgtggcctacggtgtgcgcgaatctgtgttcaccggtgagcaacctccgcctgctcgccggacgcttccagtccctcccccaaaccccttgccctgtccccgcgcccctccacgggcctagcatttcctctgagcagcggcctggcctgatcaccacccatctccccacagtggaaggcgggcacagagccatcttcttcaatcggatcggtggagtgcagcaggacactatcctggccgagggccttcacttcaggtaatggcgggcagagcctgctgaccctgacctttcacccttgacgccgacccagcagtggctatagtcggacgtgcaacaggattcaacgctgctcttttcccaccctcctcatccctgcccctaggatagtgggtgctgcgagaacctccagcagcatacaaactgttgttttccagagggacaagagaatctctccttgtctgtggtcgtggagaggagcaggccaaaaaacgcgtggtgaggggaaaccgggcaaggctagtgaaactgcggccttttctttttttttttttggagagggagtcttgctctgtcgcccaggctggagtgcagtggcgcgatctcggctcactgcaacctccgcctcctgatttcaagcgattctcctgcctcagcctcacgagtagctgggattacaggcgcccgccaccacgcccggctaatttttgtattttagtagagacggggtttcactatgtagatcaagctggtctcgaactcctgacctcaaatgatccgcccgcctcggcctcccaaagtgctgggattacaggcgtgagccaccgcgcccggccgaaactgtggcctcttaatacctatccctgtcctctccaggatcccttggttccagtaccccattatctatgacattcgggccagacctcgaaaaatctcctcccctacaggctccaaaggtaggtctgagcacttggtaatcacatggcaggtgggatgatcaaggtagctggcaagaaaccccaggggaatatggtagtgtcaggcctttaggcctctttccacatctgcaagagctgtaacaaaaatacctgcctcctggggtcaaagcagcaaattctgaacacactgtgtttgcgtgctttttactgtctcctccctgacgtgtattcaataagagtattgtttgtccctcgtcttgttcactgcctagatcaaagctttgttttaaagccttttttttctaactgcttgacttactatatctacagttacatccactagtacactctgttctggagaagtttgtccctaagcttgactagttcacctgttctctccttctagaccatacataaaagccgtgcctttgagttccccagacctcttcctcctccccacccacgcacacatatacaccctgggtcaggtagctcacctgtaacctgtaatgtacttctttgtgctatacctagtgcaggtcgcttattcatttactagactgggccctgggaataaaagattcattaaacacaattcttgtcccccaagtccttacaggagacatgattacggtacagcacgaaagcgcccacgttagaggttgcacagagtacagagggggaaagagtagtcagctctgctggtgacggggtttgcagttcaaggcttcacagtgggtgagggtgcatttcagctgtgctgcgtcttgtcttccttgtcagcctgattaactctcctccccccagggtagtgccaggctgtacaccattgcacagggcatacagggaggaacatgaaggagaaaatgcttgggaaagggtgtttggccttgaccagccactgctgacctcaatctcagacctacagatggtgaatatctccctgcgagtgttgtctcgacccaatgctcaggagcttcctagcatgtaccagcgcctagggctggactacgaggaacgagtgttgccgtccattgtcaacgaggtgctcaagagtgtggtggccaagttcaatgcctcacagctgatcacccagcgggcccaggtctgactcccaccaccatctgcgtggtgtcagcctttccttcctaggcccagagtattgggaattaggaaaggcagcttattagaaaagcattgtcaccctagtgccatttccacctaaaagctgtgctaattgccactgtgaaataaggagagccagcattagaactcgatagcactcggtgttaggaagcacagaggaaaatggccaagtcttggcttttcctgcacctcttcgagcagagaggcttatgttacaggtttgcctgacaggaagctaaggcagtgcatgttgtattgagagtgaagggttaggggtcgcaaccttcctttcagctccccagtcccctcaaaccacccctcccttcccctcttcacccctgccctcaggtatccctgttgatccgccgggagctgacagagagggccaaggacttcagcctcatcctggatgatgtggccatcacagagctgagctttagccgagagtacacagctgctgtagaagccaaacaagtgggtgagtcgcaagagccgtggggtgagggcttctgagatgcaggaggaggaaagactccatgggtggggctcctgacccaggacagggtctccctgactctctcccaccacagcccagcaggaggcccagcgggcccaattcttggtagaaaaagcaaagcaggaacagcggcagaaaattgtgcaggccgagggtgaggccgaggctgccaagatgatatccttctgctggagagatctcagcccagcccctagggcacctgagttccccattctccttcatgggcaggctgatgagactaaggcgaatgcgactccgtgctctctggcccttggctccttgttgggggtggggactacagatgagatctgaaatcttagtggtagtacctgagccatgactccccactgtaaggccagatcaatagcattggtggccttgccttcatttctggtgctgcccctagttcctggcagcagcctgcagggaggcccacaggtggggtccacggtagggctgggcacaagccacctgagcgcaaccttggatctgacagcccagaggaggactggagcaagggagtgtggtaaggacagggccagggattgagacctgcccttgcgtgtaccttaaccctcctcaccttggagaagcactgagcaagaaccctggctacatcaaacttcgcaagattcgagcagcccagaatatctccaagacggtgagtgtgtcagcccagcgtctctgatggggctgccttgagaaagtgctttcagttaaggcacattgaggtgagggaattcgaaccttgcttgttccggtttctactcagattggcttctctggccggcgcggtggctcacgcatgtaatccccgcactttgggaggccaaggtgggtggatcacctgaggtcaggagttcgagaccagcctggccaacatggtgaaaccccatctctactaaaaatacaaaagataatgagcccgctgtggtggcgtttagctatattcccagctacgcaggaggctgaggcaggagaatcacttgaacccaggaggcggaagttgcagtgagctgagatcatgccactgcactccagcctgagcaacagagcaagactccgtctcaaaaataaataaataaaaaattggcttctccgatactcctcctgtcaagaatgattcctctgggttccctgaccttttgttctaatcatagctgctgctcagcgctctggatccctaagtgcgagcagaaaccatgtgttactcattgctgcacccctgccctaatctgcatgtgttccatgttaagtagctgctgaattgcaggggtcggaattgaggtctttgcttaatgcaagcatctgtcttatttcctgccctgtagatcgccacatcacagaatcgtatctatctcacagctgacaaccttgtgctgaacctacaggatgaaagtttcaccaggtgagagatgtggccacactgtggggtatcaccaagaacgtgggacctgagtctggttgtttgggctctggagcctgctacagctattcatatggctcagagacattgaaccaaaattagaaaagggggtggttgacagtttctatcttgcatctcataggattgattttatgagatcaaataggattattcacataaaaagcactttaattataaagttttcatctaaccaaaaagtgatgaaagatgatactcagttttcttactcaagagccctcaaactcctctggtgaatggagggatgttaggaaaggagatgagaaatagcagtggccatgagaacatgcctcctcctttcatgagcctgagattcctggctgtcaaccctgtttatcttttctcttgggagcaaaggagggttcaaagctgagtggggcctgaagctgtcaattaacatgtgcatttctcttctctgtttcttgttcatctggcgatctggcaccacaggggaaggtaagctgttgttgcttctgtggggtcctgcaggccaccttctccagtacccgcctcctaccctaccccctttcccacctccccgaagacaaaccctcaatcagggtaggagggtcgtagagggaatggcctagagtgtcctgcctctcacatttatgtcccctaataatgtcattatctatcttttttttcctacagtgacagcctcatcaagggtaagaaatgagcctagtcaccaagaactccacccccagaggaagtggatctgcttctccagtttttgaggagccagccaggggtccagcacagccctaccccgccccagtatcatgcgatggtcccccacaccggttccctgaacccctcttggattaaggaagactgaagactagccccttttctggggaattactttcctcctccctgtgttaactggggctgttggggacagtgcgtgatttctcagtgatttcctacagtgttgttccctccctcaaggctgggaggagataaacaccaacccaggaattctcaataaatttttattacttaacctgaagtcaaggcttcacgtgttcatgaactgggtaactggcagcaagcatgcgcacgttcacatgtgcgctcctgggtctgtctttgtgtgtgccagcagggggcgcaaaagaatctggctggggcggctaaggggaagcaaggcctgggctccgaaacaggacccaagctgggaaggctggccctgagttctcgaggcccagctgtgctcttcacacaccctccatttctcccacatcacccatttttttaaggctggacagccatggctttgctgagccagattaaaaatctgatgaccccaacaggagctgcttccttggcagcagggttccttgtggctgtggggagcctgcctgtgcctgttgaggcacttctgtgcccagaagcccagtggatcgcgtggc

SEQ ID NO: 810 - DNA, 738 bp, Homo sapiens
ctggagcccggggtcctccgctcaactcaggacgttgaggctgcattgagccaagatcatacctctacactccagcatgggcaaaagagcaagattctgtctcaaaaataaataaataaattttgtttttaattagccaggcatgatggcatgcacctgtagtcccagctattcaggagaccaaggtgggaggatcatttgagcccaggaatttgagactgcagtgaactatgatgatgccactgcattccaacctagatgacagaaggagacctcatctctaaaaataaatatatatattttttccaaccactttttatctataccccaatgtcttacattccataaaacatcatgttttgaattccagtataactttatcgttaaacatgtttctttgcagaagcatgtataagttagggtccacaagattatttgcataagctaatttacaaaaaaaattatataatcactgacatgaaagcatgtctgggcagccatgggagctcatatgaggcgtccagttcagtcgccttttaaaaatgatatttgcattagctgggcatggtagcatgtgtctgtagtcccagctactcaggggactgaagtgagaggatgcaccagagccccagaagtcaaggctgcagtgagccatgatcacatcactgcaccagcctgggcaacaggagtgaggccttgtctcagtcagtcaatcaatcaatcaataatggtatttgg

SEQ ID NO: 811 - DNA, 352 bp, Homo sapiens
ctagaaaggggcctcaaccatgattatgagttgtctgtaaacctggaccagagttcaggtctccggatcctccatcaggaaatcacagggtggggtgagtaacatgaagccggcttccactctgggatgtcagattcctggcatggggtgatgcagggggcttggaacattccagaggaaacaaaagcgagatgagcagagacaaagagctgtgaacaccaggttcaaaatgcatgagtgagggtgttggaaaacttcccaggggtggtggctgcccaagtcaaaggacaccaacaggaaatgcaaagtcccagggtcccagggctagcaggaagctttgcctccaggctgt

SEQ ID NO: 812 - DNA, 177 bp, Homo sapiens
aaaatacaaaaaaattagctgggcatggtggcgggcgcctgtagtcccagctacacgggaggctgaggcaggagaatggcgtgaacccaggaggcggagcttgcagtgagccaagattgtgccactgcactccagcctggatgacagagtgagactccgtctcaaaaaaaaataaaa

SEQ ID NO: 813 - DNA, 3334 bp, Homo sapiens
agaagatgagacttttgaatgaatgaaaaagggtatcttgatacccagaattccccccaaagtacgggtaattcaacctgcacagttttctttcactcaaagtgttcagcacttgtgagtgaaaaatcatgtaattatctgtaaatatgtagctaacaaattgacctagtttctgtatttttttgtttttgtactaaagtttataggtctgtgccagctagagagaagttgctgtcattaccagttgtggtcctagcatctaaccctgaaaccatcctaggtgacatttttagaattaatacttaaatgttaaacagggggaaatgaagcttaatcatggtcaggtttgagatcttttgcagtgaaataattttatttaatataaatgatcacatgtcctcaatcatgaatgaggtagggagcctctctcccccagtggccatgtttacaaaagtgtgttttgtctataaagtgcaagtgttttaatgtttatgtaaattatgcaggtgataacatggtttggaactgtttattgggctctttaactgaattttcaaatgaaatgaactatgcttattgctggcacattgatcccatttctggaacatttttcctatttccagagttacatatgttcttttgtcattacccaatttaacctccctttctctgatatgccttgtagccaaagtattaaaggctgatgaacatagacaagggaaatgcatttcttagaaatccgtgaaccctcagttgtatgctttcagtactcgtgttaatatgtttctatggcaactctgaggtcagtggtttagaaatgagataccagtgttaatgaaaagtgtgtgctctttgcttttgcatggcttggcttagtatccaaggtatattagggccacttgaaagcatgaagaccagttatatagggaacaggtttctctcagtggcacattttgctttttctgagccccaaatacattgcctgggcatgaacattgttaccgtaaattgcacatggtcatggactgaattatgtgactttaaaggatgtaactgcccaacatttgcagattctgggtggtctatgtgaccatttgtctcgtatccaaaaaccccggggctattggaacccttccaacactttttcctttgtcatagacaagtttatatataacttaccaagatgttggctgtcctggtgtattgccagacagctctcttttggttcccattccaaatgtgctgctgtccttctttgcatttcacaatatcaaagaaaccaccacccttcttcctaacagcattttatgccttttattccacattaaatgggaattgtgcctacttaggagtgcccctccaattaattacatgtgtccaagaataatccaagctagagacacaaggtgggaaaacatttcaaaaaaaaaaagtcctcttaaggccagtaatttatctgaaaaggtattttatcacaccttgacaccttatatatgagcctattaggagctgcaggtggtttcatagggtaaaatccaagaaaagagaaggatgtgtggggtttctattagaagataattttgttctcattttaccttttcttttatgatccttctctgctagaacaggttaattctccaaatttgttttgttttgttttgttattttttagggaactcttttgcaaaagcaatggtcggatgtaaataacatttaaagtatagtgcacataacttccccggactgttccaatctgataatttgtaaatgctttagagtttttttaattaacacttgtgttgctaaattctatttatgtaagtctgctaaagttttttagcccacttaaaacttaagacaaccatttaaaataatggatgggttactatgagcaatttcgctttcagaacccccttgttttagtatatgaaaaagcctaatgcgcattaatgaggttgaagagactatgagaaatatgtatagtgtatattttaaaacagctttgcttgtattgtgaagatttaaaaacaaacttgagatttttaacgtaactattaacacagttttaacataagttatcccactgggtttaagagcatcttgaatgtataatcctttttgtaacccaggttggtttctacttttaccagtcacccaaacatatttatgtttttagttttatgtactcatttccctttgttttcctcaaacagcatgatttttttgcacatgtagaaattttttaaaagaaagaaattagtacatcattttctctggattttcttcacttccctcttcctttctactaactccttccttaaaggccatatcactccatttgcattatttgtgcaaatgccagggttggtttttatttttatttttgctatttacctaaaaaaagaaaatgcttcagtcaattgcttttttatttaaaaaaaaaaagaaaaaaagctgtaaccttatcatttctgagtagaccattgagcgatgaatgcacacctgtagtagcccaggaccagctgtggtggctaaagggaatatgttaattaagcaagaggttcttttctaaaagtggtatctgttatccacaatgtattttagttattcccacaagtcaggggtccagataaaatgagggttatcagctaactgatatgctatcattgaggttcatcaatgaatttgtacatttctagttccctttggtgaagggaaaaatgatgattttgcaagacctagattttggcttggtttcttgcctccttttttggcagccttcatcttctcatctcccaaaccccctgagcccgtagggttttcatagtggacaaagaacttgtggtcttttaaaactgggactgatacttttttgagagagtatcgtgtcgaaagtgtgatgttctaccactttaccaataactaattttaaatacacattgtcctctcgatttttggaccaaacagacgctcacagtggaggcttatcaagggttgcattggggaagaagcctctccctctctgtcagcaccagctggtaaaggtgactgtacagatgtgcattttccttttggtataaatggtccacagcactaactggtaaggcttattgtacagtatattgtcagtattcttctggttcagcataccttatagttcatatataacctgtattaattgtatagattgtgcattaaaagctgttaccaagttgtcagaacataagagcgaaaacaaggtcatatgtaatattttgtttgtaagtatcctttgtatcatagcaaaggaaatgtttaaaaaaatcaactgtaataaagtaattttagtacacag

SEQ ID NO: 814 - DNA, 6081 bp, Homo sapiens
agtgttggtgttcactcactatatgtctttaagaaaattaaaactatggaaaatttgtctagcatatcagaagttgtaaatgctatatctggtatccagaggctggctgtaaaaagttccttggggtcactctatctcacattttttttggttagcattttaaaaatgcaaagccacatactttgaaatatattattccaaattgagctcccttccctttgcacatattttttcctccccttattgaagtcagctctaaccccaaattctagtatccaaaagtatttttatttgtataatgctatctgaaaaatgtgtttatattatattttcagagctgcaattcttattcgccatttcaatacctagagatagagagtcttgtatttgaagccacacacactggtgtaatatgcttagtactctaggtcaaggatttgttggtaaatggaacattttagcatagtcatgatttttggttgcctagacatcaggtaaacattcagtacactaaagaaactatcctggacactccctcctgcttccaccaatttttttctcacccccttttcaaaaattgaaaactctatgagtgtctttttgagaccataaagcagactttagtaactttctatttctgtaagtactaaatgtctggcattttaaacttttgtagaatacattatgttggacactggaataatactatttattttcacctgtgaaaaatgacttcattgtacttgaaacacctcctttgcatttctccatttgtgccattcactagtggaaataaattgtattataccatgatctactggctttttaaaactgtattaaatatgcacatttttggtatagctattatcatttgtatgtatatattgtatatacatatgagtgtctgtatgtgtgtatagatggatggatgtaactcatactgtacatttccatcagggcacttaaaagttctgttatttttgtttggttttgttatttcagtcctcagttaaggcaagaatgcatgtgtttcttaagaatgagtactctgcgttgatgtttatgagaaggtggtcattagatgcagtcttttcctttttaatcccctcttagcacttctgtgagtggagaggacattaagtaaaatttggaatcataagttgcaatgcagtaaaatggtgctggggaaggagccagttagtgtttctgtgagtttgtgttgtgatgcaataagagataagtaatgcagagagaaatgaaccatggaaagtaagaacactgatggtgattcctctgcaaagatgataagaaaaagaaccaataaatcacacaatctttatgtgctttctatatgtatttcttagtagtgataccattgatcctcttactttttttactccattaatactaataattatatactttgctgaggatcaaaacagccaagaaaggaattactgctaaagcatctaagattctcctgaactgtaaaatcaacaggaaatggccactgggagagaaggatttggtattgggtgaggggctttctccctttacctgcctcttcttgcttgctaatagtaagttctttgtgcaccttccaccacttctgagccactactattcaagtagagatttgccccaacacattaactttttccttggagatttatatggtcctgcattttgtcctgtgctcacaatgtgaagtgtcttctgtattcaaatcaaaaaataatatatttaaggtatataagtgtgaatctcctataatgatggaagaagaggttctcttgtcttagatagaaaagagccttctccaagagcaatgtcaaaacttgggctgtcatctttgagctgtttaccaaaatacagaccattattgaagaaaaacaaattatctattttgttttcccccatctaacatgatagtgcccccaaccaggttgtagcattgccttttaaaagagactcactcactcttagtttttaagaactggaaatttcccatcctcagatcccttaaaggatgaagagttggctgtacacttagcggacttgcctcttgtatgcaaggactactgattgaagtctgttttgctgtgtctggttatgttgtctgcacttttatgaaatcactacaataggtctgcattggaaatgactattaatttgtaaagaagtaagttttattaaacactgtctagaaaaagaaagtgaagctgagaactcttcctttattgtgcatttatattttctgctgaattccggtagttccctttaaagtcatgttgactaatgttttcctccttgtttgtattcagatttccaaaatttcactcatacaagggaagagactccatttagcttaacggtagtctttagatcataagaaatatataaattagtatgcaccttatctgcctgttgtgggtttcttaaacttgcacttcctacccacccaaagatagatatcctttaaagaaaataaaggcagagaattaaaactggggagccatttactatgtcaccatcactgttaactgtttcccagcaatctaaactttttgaagtttcagaggtgtattttttttttgtatatatgtctgtgtgattgtattgttttgtttctaaatatacaaggaattctttaaatagagaaaaaggttaatcctcactgaaacaccaggatgcccactggatatactaatctgaacatctgtaggtagtttgtcatgaaaaagtggagagaagatgagacttttgaatgaatgaaaaagggtatcttgatacccagaattccccccaaagtacgggtaattcaacctgcacagttttctttcactcaaagtgttcagcacttgtgagtgaaaaatcatgtaattatctgtaaatatgtagctaacaaattgacctagtttctgtatttttttgtttttgtactaaagtttataggtctgtgccagctagagagaagttgctgtcattaccagttgtggtcctagcatctaaccctgaaaccatcctaggtgacatttttagaattaatacttaaatgttaaacagggggaaatgaagcttaatcatggtcaggtttgagatcttttgcagtgaaataattttatttaatataaatgatcacatgtcctcaatcatgaatgaggtagggagcctctctcccccagtggccatgtttacaaaagtgtgttttgtctataaagtgcaagtgttttaatgtttatgtaaattatgcaggtgataacatggtttggaactgtttattgggctctttaactgaattttcaaatgaaatgaactatgcttattgctggcacattgatcccatttctggaacattttcctatttccagagttacatatggtcttttggcattacccaagtgagcctccctttctctgatatgccttgtagccaaagtattaaaggctgatgaacatagacaagggaaatgcatttcttagaaatccgtgaacctcagttgtatgctttcagtactcgtgttaatatgtttctatggcaactctgaggtcagtggtttagaaatgagataccagtgttaatgaaaagtgtgtgctctttgcttttgcatggcttggcttagtatccaaggtatattagggccacttgaaagcatgaagaccagttatatagggaacaggtttctctcagtggcacattttgctttttctgagccccaaatacattgcctgggcatgaacattgttaccgtaaattgcacatggtcatggactgaattatgtgactttaaaggatgtaactgcccaacatttgcagattctgggtggtctatgtgaccatttgtctcgtatccaaaaaccccggggctattggaacccttccaacactttttcctttgtcatagacaagtttatatataacttaccaagatgttggctgtcctggtgtattgccagacagctctcttttggttcccattccaaatgtgctgctgtccttctttgcatttcacaatatcaaagaaaccaccacccttcttcctaacagcattttatgccttttattccacattaaatgggaattgtgcctacttaggagtgcccctccaattaattacatgtgtccaagaataatccaagctagagacacaaggtgggaaaacatttcaaaaaaaaaaagtcctcttaaggccagtaatttatctgaaaaggtattttatcacaccttgacaccttatatatgagcctattaggagctgcaggtggtttcatagggtaaaatccaagaaaagagaaggatgtgtggggtttctattagaagataattttgttctcattttaccttttcttttatgatccttctctgctagaacaggttaattctccaaatttgttttgttttgttttgttattttttagggaactcttttgcaaaagcaatggtcggatgtaaataacatttaaagtatagtgcacataacttccccggactgttccaatctgataatttgtaaatgctttagagtttttttaattaacacttgtgttgctaaattctatttatgtaagtctgctaaagttttttagcccacttaaaacttaagacaaccatttaaaataatggatgggttactatgagcaatttcgctttcagaacccccttgttttagtatatgaaaaagcctaatgcgcattaatgaggttgaagagactatgagaaatatgtatagtgtatattttaaaacagctttgcttgtattgtgaagatttaaaaacaaacttgagatttttaacgtaactattaacacagttttaacataagttatcccactgggtttaagagcatcttgaatgtataatcctttttgtaacccaggttggtttctacttttaccagtcacccaaacatatttatgtttttagttttatgtactcatttccctttgttttcctcaaacagcatgatttttttgcacatgtagaaattttttaaaagaaagaaattagtacatcattttctctggattttcttcacttccctcttcctttctactaactccttccttaaaggccatatcactccatttgcattatttgtgcaaatgccagggttggtttttatttttatttttgctatttacctaaaaaaagaaaatgcttcagtcaattgcttttttatttaaaaaaaaaaagaaaaaaagctgtaaccttatcatttctgagtagaccattgagcgatgaatgcacacctgtagtagcccaggaccagctgtggtggctaaagggaatatgttaattaagcaagaggttcttttctaaaagtggtatctgttatccacaatgtattttagttattcccacaagtcaggggtccagataaaatgagggttatcagctaactgatatgctatcattgaggttcatcaatgaatttgtacatttctagttccctttggtgaagggaaaaatgatgattttgcaagacctagattttggcttggtttcttgcctccttttttggcagccttcatcttctcatctcccaaaccccctgagcccgtagggttttcatagtggacaaagaacttgtggtcttttaaaactgggactgatacttttttgagagagtatcgtgtcgaaagtgtgatgttctaccactttaccaataactaattttaaatacacattgtcctctcgatttttggaccaaacagacgctcacagtggaggcttatcaagggttgcattggggaagaagcctctccctctctgtcagcaccagctggtaaaggtgactgtacagatgtgcattttccttttggtataaatggtccacagcactaactggtaaggcttattgtacagtatattgtcagtattcttctggttcagcataccttatagttcatatataacctgtattaattgtatagattgtgcattaaaagctgttaccaagttgtcagaacataagagcgaaaacaaggtcatatgtaatattttgtttgtaagtatcctttgtatcatagcaaaggaaatgtttaaaaaaatcaactgtaataaagtaattttagtacacag

SEQ ID NO: 815 - DNA, 305 bp, Homo sapiens
ccagtttttttaagcaattttattcccatgaagataaactctattgagtgactattggataattactgaaccttaggcagtgtgctgaatgttggggttacaaaaatgggattaccactcagatggtaagagtgtaccatctgataaaagacataaaccctcgtccgggtgcggtggctcgcacctgtaatcccagcactttgggaggccaagtttggtggatcacctgaggtcaggagttcgagaccaacatggcgaaaccctgtctctactaaaaatgcaaaaattagctgggtgtggtggcg

SEQ ID NO: 816 - DNA, 740 bp, Homo sapiens
tataaattgtgttggaggtgggtaggaagctgtgagtatgacttgaagaaaaatatccttttcagtgacaaatcagagtttcttacaagttattgtcctgctcccttccaagttgtcttgaagaatccttgctgctaactctggatcctgcttttcctatagtcagagggctccaaggtagaactctctaagtccctctcaatggcactctttgcctagaccaaactaatgaccaaacagtaatcaatctatcactgttgaagtcctggttttctcaaccaaattttaagtctttcccaggtatgtcagtcgagttgccatgaatcctcacctgtaggagtttctgggattcattttaaggaaactggaagaaaattaatgttttaatgtaaatgtttttaaaaccaagatcaccatagagttcacacaaaattttaggcagtgtttcaagaagcactcttatgtgttgttctttcagcccatgctccaggtcaccggtttttaggtaaacatgacatgacatgtacttgtaatatcagtgaaaggggcttttagtcgtctcagtatcttttttgcattcaggtattatagcgtttccaacaaattgagaaattacttatttggtgtaaaatgacgagagagctttagaatttaataaaatgtcaaaaatacaatttgatacccttaaaaattattcatagatctggctgctctgtactactggatgggtggaataggga

SEQ ID NO: 817 - DNA, 305 bp, Homo sapiens; identical to SEQ ID NO: 815

SEQ ID NO: 818 - DNA, 7873 bp, Homo sapiens
tcccggtcgagatgttggtgattggggacgacagcgccttcactgtcctgaagaagccacgccggcgggtgctgtgcggcaccgtgcttatacacaaggtgggcttccaccggggaccgtggagactggccagccctttccagccttcccttgcctggcagcacccagtaactggacctttccagcccttccccaagaagctagttctttttctccagtgttccctgatctcagaaggccccgccatcccctcagctacctaagcccagatacaggcattttcccagactcgtccccttttcttctccacacccaatcagttgcccggtcctggtgcttctcctcccaaatgtacaacacacatccttctcagaccccgccctcctgctttgccttggttcaggggtcatctactcatgcctgatggctgcagccacctcctcactgggctcccctgcctgcttcctgccttctggccttgctcatccattctccacactactgccagaggtgtctttttaaaatgtgtatctgactaggttattcatccactgaaagccttcttgggtgcctacaatcaatacaagccctcaccatagctccctgactccccaccttcatctcccatcatccctgccttcctcttttttttattttcttttatttattttttatttatttctttattttttgaggcagagtctcactctgttgcccaggctggaatgcagtggcgcgatcttggctcactgcagtctccgctgcccaggtttaagtgattctccttcctcagcctcccgagtagctgggattacaaggcgcctgccaccacgcccggctaatttttgtatttttagtagagatgtggtttcaccatgttggccaggctggcctcgaactcctgacctcaagtgatctgcccgcctcggcctcccaaagtgctgggatgacgagcgtgagccaccgcgcccagccatccctgccttcctcttatggtctattcacgccagctcctgtacctgccaggctatggatcatctctggctttgcttatgcagtatctgtggcctggaaaattctttccttgtccagcctccttttggcctggctaactcctaccattctacagaggcccagctctgatgtctccccacctggaaggctctccctgatctccatctccccactaccctgagctggttggcagccagtcctagtgtggactccatcactgtaattaccacctcacataaattttcaatttatgggtatctgcttccctagcctctccccaggctgtgagttcttgaaggtggagactgtgacttagtcgccttttttccttttcagcatatactagatgcttggtaaaaattgggtggatggatggatggatagatgggtaaagtgacccaaaatagcaaggctatgggagagagaactctggaactctagagttgggaaactggccacccactggctgtgtgacattggacaagtcaccgcccctctctgggtccatttccccatttgtaaagtctcttctgactccaacagactggaattcttgaagattcctggcaggtacactgtgaatgaggggagtttgctcttctgccctaaatgtgatgggccaggttgagtgtgaaaatcctgaggttcccccttcccaacaagaaattcatcccctgcctgtcttctaccccacatggtacagtgataccctcccccctggggcttttacctctttgtggctgcaggtggcaggtgctctggctgaggctggtgtggggctggaggagatcgcaaagcaggtgaacgtggtcaccaaggccatgggtgagtgctggcctgggagctggggaagagagtggggaaggttggacagccctggggcgaggagcaggttcctgttggctgcctagcggtgctccccaggttattccccaggggtctagggagtgtatccctgggggagctcctggggactggtggccttgggtaccatggctgaggtggagagtctggcagcctttctcagagaagagggtacctgtgggcagggcctctgagatgctgctgccacccttcctgatgcccagtgctaagagtggaacagtcatcccttcatgccttgtttctcataggtaccctgggggtgagcttatcctcctgcagcgtccctggttccaaacccaccttcgagctctcagccgacgaggtggagctgggcctgggtaagcttgtggccatccatcccagccctgcctgctccttggccctggactttgcccaccttgcatacccttagagccatcaacctggtcctctccccaggtggtcttagtatttttacctggtcatttgaggcccagcctgggccaacctgcctgatttctacctgctttgctgtctatacccacagctttggccatgtggagctctgtgcactgcccacctcctagcctttgcctgccattcccaggtcctcctgtccctgccagaatacacccttctttcaacggctattcaaagatcacctggctgcaaagctttctttcctcgcctgtgcttcctccttaactatctctagttaaagctatctccaccaccaggccacaagctcccagagaacagagatcgtgtttttcattattctgtccatttccatcccccactcccgcccacttactgtgtgagtccagcactgtgtgagtccttgataaaaacgatgagcaaatccccaggccttgagtgggtcagcagtgaccacatctatccgcagggatccacggggaagctggtgtgcgccggataaaggtaggtggtccctctggcacaggccgccctaaggccaaggccccccagatgcagctcattcctggctccctctgacagatggcaaccgccgatgagattgtgaaactcatgctcgaccacatgacaaacaccaccaacgcgtcccatgtgcctgtgcagcccggtgggtagcctctcgcccgcgtctcccaacccctcctacacctctggggaggagacgcccagagggtctcacctggggtgtcatgtctacccgcaggctcctcagttgtgatgatggtcaacaacctgggtggcctgtcattcctggaactgggcatcatagccgacgctaccgtccgctccctgggtgagccatgcactgggaaggggatcctacagccctttggaaagggctgagggagggtcttgtgatggcagagaacacggactgtgcgtcagataagcctgagttaaatcgtctctctgccacctaattgccggataccttgagcctctgtttgttttcttgtctgcaaattgggggtaataataatggtacctgctttataccgttgttttgaggattaagtgagattaaacatatgtaagacactcaacacagcgcccagcacctggcacgaactgagtaaatgagacctgtaattactcatcttccccgacgtaggggacacctccagggaacgtggtcatttgtggggttattgagggatgcctgccaggaggaaatcaggacatctccctcccgacctcagagccccagcttccaaggtccttgcttttctgttgttttctttccctgatgcccatttttcccttttggactgccacactctggtattgcagagggccgcggggtgaagattgcccgtgccctggtgggcaccttcatgtcagcactggagatgcctggcatttctctcaccctcctgctggtggatgagcctctcctgaaactgataggtgagacttggaacctggggtcacccaagccagggctccttgtaactggaaggagccagggagacttggagaccccgtcagggctgaccgtgacaatcagggctctggagcctgtgaagaaggctcttcctgggcttctccagccttctccagctctcactggactagaaggagttggtattaggatcctcctcagagaggcctgaccctttcccagggaccctctctccatacccctgtatacagtaggcactcagtccatgcttgtcgaggtggactcccttcctccagggctgctgagaaagccaggccaccagggtcaggatgggagggtccaagccctgctgaatccctggctggacagccgtgtctaagagagttatcttgctgcccttagatgctgaaaccactgcagcagcctggcctaacgtggctgcagtctccattactgggcggaagcggagccgggtagcccctgccgagccccaggaggcccctgattccactgctgcaggaggtaccaacccctgcctttggggaagggacaggcttcccaaaggatgcaggagtatacggtggggcgggtaggggccctggcacccacacctcccaccatagtcaagtgtggttgtgagaagggcctggtgggcctgttcttcagcatcctccctttctaggctcagcctcgaagcggatggcgctggtgctggaacgggtgtgcagcactctcctgggcctggaggaacacctgaatgccctggaccgggctgctggtgacggcgactgtggcaccacccacagccgtgcggccagaggttggtgccagggactttgccaagtgaggtcattcacaaaaccttagccccccttccacttgtttccctgaaggcagggaccttcctttttttttttttttttttaagaaggaatctcactctgtcgctaggctggagtatgcaatggtgtgatctcggctcactgcagtctccgccccccgggttcaagtgattttcctgcctcagcctcctgactagctgagataacaggcatgcgccaccacgcctggctaattgttgtgtttttagtggagacggggtctcgccatgttggccaggctggtctctaactccccacctcaagccatccgctcgccttggcctcccaaagtgctgagattacaggcatgagccaccacacccggccgacagggaccttcttaacaccacaaatgtatgaggttgttatcttagaattaaatgaaatccttcacagtgaataacttacaactcaaggcgaacttattctgttgtccttatttttctcagtttacccagaccagtgaaaagctcttaactgtccagcatcattcattcgagaaaaaggtatttggtgcctgccgtggggcaggcactgctctcagctgtggatacagtagtgaacagagcagacagaaatcactgccctcatggcttatgttctaggtggaagacagtcaaccagataaatcagtaaaacacagaggatgttagcacaaagggctaaggagaaaaaaaccaagccagggagcagagtacagagcgtcaagtggagggcttcggggcaggcctcacctccccaggcccctttcggttacgcagcccagcccctctccagactgcacactggatgtggaaagggatcttgggaagccttcattccacttccctgtcggccttttccagccttcattggtgctggctggaagtctggcagatggagggaggatctctgaattcctccccatctctctctgcctgcagcaatccaggagtggctgaaggagggcccaccccctgccagccctgcccagctgctctccaagttgtctgttctgctcctggagaagatgggaggctcatctggggcggtgggtgcctgggggctgaagggctgacagggaggtggctgggctggctggggtccaggccagcaccacatgctcagcgttgtcatcttccccagctctatggcctgttcctgactgcggctgcacagcccctgaaggccaagaccagcctcccagcctggtctgctgccatggatgccggcctggaagccatgcagaagtgagccagagccctgtgcatcagaccaggggtgggctgggggaggtgtttggtgacatctgcgccctgccaggccctagcccaaccctcagagtgattcccttggttccctatagtgagcctctttcactctctttccctgccaggtatggcaaggctgctccaggggacaggactatggtttgtactcaggctgtggcctcagacctttctccttttggccctgtaagtctaaagagcaccctcggttgcagggcccgtgctcagccccctttccttcaccttgtccagctggattctctgtgggcagcggggcaggagctccaagcctggaagagcccaggagctgatctgttacaagtcctgaccaaagcagtcaaggtgagtgaggctgggcccagccacctggggagacaggcttctagccagcagactcctgtctccatgtgaccctgagcaagttaataaccttcctggaccgcagtttccttctctgtacaatggagatgagcacctatctcagaaggtggttatgtggctaaggaaatatatagagccccgcacactgcctgggatgtgacagggcctcagtgaatggtgacccttttccctgctggaagtagatgagaagtgactttccatttggtgacagagcagagggtgctggcagagccagggcaagggcgtgcagggccaggctgcacggcagagacgttctgcccatggcaggaaggaggcggcctggtgatctgcccttgaacctgctcccacaccccatcccccagagtgccgaagctgcagccgaggccaccaagaatatggaagctggagccggaagagccagttatatcagctcagcacggctggagcagccagaccccggggcggtggcagctgctgccatcctccgggccatcttggaggtcttgcagagctagggtgtgtgactgcctcccttggcctcagctcctctcactgctgtgctgaggtggcctttgtcacttccttctgccttccaaccctcaccttcccccggcctggccccattggcccaccctctaagttgagcaggaaatcctccaccaagcttccagaactacagacagcacccagagtgagctggagtgggtccccatgcctctccagcatgccctttccctttgcaggagggtggagtccctgggtcatgccctcccctgccagctctgggcttcagagataaggcattttccttgtgcagcctttacctggcaatcctaatttggttttaagactccctgtgaaatgctttccgcaccttaaccccagtgagcgtgaaaaagaaagttaataaactataatacatggaagcaagaaagacactgcctcctctgagggaccttttcccaagcatgtaaacaagggggcccacagccctggctgcaggcatcatgacccatcttctaccaggcagatctttattacctgaacccctaaggcagtgtctcctcacctgggctgcttccacctcagcccccgacccatcccctttccagtacacacacctgatgcatgtgagaatggtagaggggcttttctcagcattgaattaataattcagtggctcctcgggagtcgaatgggcatttgggacaccagaaggaaaagaaatcatcatagtctaaggttcagttgtagatcaaaaaatgcagccaggccgggcacggtggctcacacctgcaatcccagcactttgggaggccaaggcaggcggatcccttacactcaggagttcaagaccagtctgggcaacatggtaaaaccctgtctctaccaaaaaatacaaaattagccaggcatagtagtgtgtgcctatagtcctaacttgggaggctgagttgggaggatggcttgggcccaggaggtcgaggctgcggtgagccataagcatgccactatactccagcctgggcaacaaagcgagaccctgtctcaaaaaaaaaaaa

SEQ ID NO: 819 - DNA, 8091 bp, Homo sapiens
ggcctggcccgggagcaggcccgggctgaaggcatcccggtggagatggtggtgattggggacgacagcgccttcactgtcctgaagaaggcaggccggcgggggctgtgcggcacggtgcttatacacaaggtgggcttccaccggggacgtggagactggccagccctttccagccttcccttgcctggcagcacccagtaactggacctttccagcccttccccaagaagctagttctttttctccagtgttccctgatctcagaaggccccgccatcccctcagctacctaagcccagatacaggcattttcccagactcgtccccttttcttctccacacccaatcagttgcccggtcctggtgcttctcctcccaaatgtacaacacacatccttctcagaccccgccctcctgctttgccttggttcaggggtcatctactcatgcctgatggctgcagccacctcctcactgggctcccctgcctgcttcctgccttctggccttgctcatccattctccacactactgccagaggtgtctttttaaaatgtgtatctgactaggttattcatccactgaaagccttcttgggtgcctacaatcaatacaagccctcaccatagctccctgactccccaccttcatctcccatcatccctgccttcctcttttttttattttcttttatttattttttatttatttatttattttttgaggcagagtctcactctgttgcccaggctggaatgcagtggcgcgatcttggctcactgcagtctccgctgcccaggtttaagtgattctccttcctcagcctcccgagtagctgggattacaaggcgcctgccaccacgcccggctaatttttgtatttttagtagagatgtggtttcaccatgttggccaggctggcctcgaactcctgacctcaagtgatctgcccgcctcggcctcccaaagtgctgggatgacgagcgtgagcccccgcgcccagccatccctgccttcctctttttttttttttttttttttttttttttttttttttttgagacggagtctcgctctgtcgcccaggccggactgcggactgcagtggcgcaatctcggctcactgcaagctccgcttcccgggttcacgccattctcctgcctcagcctcccgagtagctgggactacaggcgcccgccaccgcgcccggctaattttttgtatttttagtagagacggggtttcaccttgttagccaggatggtctcgatctcctgacctcatgatccacccgcctcggcctcccaaagtgctgggattacaggcgtgagccaccgcgcccggcccctgccttcctcttatggtctcttcacgccagctcctgtacctgccaggctatggatcatctctggctttgcttatgcagtatctgtggcctggaaaattctttccttgtccagcctccttttggcctggctaactcctaccattctacagaggcccagctctgatgtctccccacctggaaggctctccctgatctccatctccccactaccctgagctggttggcagccagtcctagtgtggactccatcactgtaattaccacctcacataaattttcaatttatgggtatctgcttccctagcctctccccaggctgtgagttcttgaaggtggagactgtgacttagtcgccttttttccttttcagcatatactagatgcttggtaaaaattgggtggatggatggatggatagatgggtaaagtgacccaaaatagcaaggctatgggagagagaactctggaactctagagttgggaaactggccacccactggctgtgtgacattggacaagtcaccgcccctctctgggtccatttccccatttgtaaagtctcttctgactccaacagactggaattcttgaagattcctggcaggtacactgtgaatgaggggagtttgctcttctgccctaaatgtgatgggccaggttgagtgtgaaaatcctgaggttcccccttcccaacaagaaattcatcccctgcctgtcttctaccccacatggtacagtgataccctcccccctggggcttttacctctttgtggctgcaggtggcaggtgctctggctgaggctggtgtggggctggaggagatcgcaaagcaggtgaacgtggtcgccaaggccatgggtgagtgctggcctgggagctggggaagagagtggggaaggttggacagccctggggcgaggagcaggttcctgttggctgcctagcggtgctccccaggttattccccaggggtctagggagtgtatccctgggggagctcctggggactggtggccttgggtaccatggctgaggtggagagtctggcagcctttctcagagaagagggtacctgtgggcagggcctctgagatgctgctgccacccttcctgatgcccagtgctaagagtggaacagtcatcccttcatgccttgtttctcataggtaccctgggggtgagcttatcctcctgcagcgtccctggttccaaacccaccttcgagctctcagccgacgaggtggagctgggcctgggtaagcttgtggccatccatcccagccctgcctgctccttggccctggactttgcccaccttgcatacccttagagccatcaacctggtcctctccccaggtggtcttagtatttttacctggtcatttgaggcccagcctggccaacctgcctgatttctacctgctttgctgtctatacccacagctttggccatgtggagctctgtgcactgcccacctcctagcctttgcctgccattcccaggtcctcctgtccctgccagaatacacccttctttcaacggctgttcaaagatcacctggctgcaaagctttctttcctcgcctgtgcttcctccttaactatctctagttaaagctatctccaccaccaggccacaagctcccagagaacagagatcgtgtttttcattattctgtccatttccatcccccactcccgcccacttactgtgtgagtccagcactgtgtgagtccttgataaaaacgatgagcaaatccccaggccttgagtgggtcagcagtgaccacatctatccgcagggatccacggggaagctggtgtgcgccggataaaggtaggtggtccctctggcacaggccgccctaaggccaaggccccccagatgcagctcattcctggctccctctgacagatggcaaccgccgatgagattgtgaaactcatgctcgaccacatgacaaacaccaccaacgcgtcccatgtgcctgtgcagcccggtgggtagcctctcgcccgcgtctcccaacccctcctaaacctctggggaggagacgcccagagggtctcacctggggtgtcatgtctacccgcaggctcctcagttgtgatgatggtcaacaacctgggtggcctgtcattcctggaactgggcatcatagccgacgctaccgtccgctccctgggtgagccatgcactgggaaggggatcctacagccctttggaaagggctgagggagggtcttgtgatggcagagaacacggactgtgcgtcagataagcctgagttaaatcgtctctctgccacctaattgccggataccttgagcctctgtttgttttcttgtctgcaaattgggggtaataataatggtacctgctttataccgttgttttgaggattaagtgagattaaacatatgtaagacactcaacacagcgcccagcacctggcacgaactgagtaaatgagacctgtaattactcatcttccccgacgtaggggacacctccagggaacgtggtcatttgtggggttattgagggatgcctgccaggaggaaatcaggacatctccctcccgacctcagagccccagcttccaaggtccttgcttttctgttgttttctttccctgatgcccatttttcccttttggactgccacactctggtattgcagagggccgcggggtgaagattgctcgtgccctggtgggcaccttcatgtcagcactggagatgcctggcatttctctcaccctcctgctggtggatgagcctctcctgaaactgataggtgagacttggaacctggggtcacccaagccagggctccttgtaactggaaggagccagggagacttggagaccccgtcagggctgaccgtgacaatcagggctctggagcctgtgaagaaggctcttcctgggcttctccagccttctccagctctcactggactagaaggagttggtattaggatcctcctcagagaggcctgaccctttcccagggaccctctctccatacccctgtatacagtaggcactcagtccatgcttgtcgaggtggactcccttcctccagggctgctgagaaagccaggccaccagggtcaggatgggagggtccaagccctgctgaatccctggctggacagccgtgtctaagagagttatcttgctgcccttagatgctgaaaccactgcagcagcctggcctaacgtggctgcagtctccattactgggcggaagcggagccgggtagcccctgccgagccccaggaggcccctgattccactgctgcaggaggtaccaacccctgcctttggggaagggacaggcttcccaaaggatgcaggagtatacggtggggcgggtaggggccctggcacccacacctcccaccatagtcaagtgtggttgtgagaagggcctggtgggcctgttcttcagcatcctccctttctaggctcagcctcgaagcggatggcgctggtgctggaacgggtgtgcagcactctcctgggcctggaggaacacctgaatgccctggaccgggctgctggtgacggcgactgtggcaccacccacagccgtgcggccagaggttggtgccagggactttgccaagtgaggtcattcacaaaaccttagccccccttccacttgtttccctgaaggcagggaccttcctttttttttttttttttttttaagaaggaatctcactctgtcgctaggctggagtatgcaatggtgtgatctcggctcactgcagtctccgccccccgggttcaagtgattttcctgcctcagcctcctgactagctgagataacaggcatgcgccaccacgcctggctaattgttgtgtttttagtggagacggggtctcgccatgttggccaggctggtctctaactccccacctcaagccatccgctcgccctggcctcccaaagtgctgagattacaggcatgagccaccacacccggccgacagggaccttcttaacaccacaaatgtatgaggttgttatcttagaattaaatgaaatccttcacagtgaataacttacaactcaaggcgaacttattctgttgtccttatttttctcagtttacccagaccagtgaaaagctcttaactgtccagcatcattcattcgagaaaaaggtatttgtgtggccgtggggcaggcactgctctcagctgtggatacagtagtgaacagagcagacagaaatcactgccctcatggcttatgttctaggtggaagacagtcaaccagataaatcagtaaaacacagaggatgttagcacaaagggctaaggagaaaaaaaccaagccagggagcagagtacagagcgtcaagtggagggcttcggggcaggcctcacctccccaggcccctttcggttacgcagcccagcccctctccagactgcacactggatgtggaaagggatcttgggaagccttcattccacttccctgtcggccttttccagccttcattggtgctggctggaagtctggcagatggagggaggatctctgaattcctccccatctctctctgcctgcagcaatccaggagtggctgaaggagggcccaccccctgccagccctgcccagctgctctccaagttgtctgtcctgctcctggagaagatgggaggctcatctggggcggtgggtgcctgggggctgaagggctgacagggaggtggctgggctggctggggtccaggccagcaccacatgctcagcgttgtcatcttccccagctctatggcctgttcctgactgcggctgcacagcccctgaaggccaagaccagcctcccagcctggtctgctgccatggatgccggcctggaagccatgcagaagtgagccagagccctgtgcatcagaccaggggtgggctgggggaggtgtttggtgacatctgcgccctgccaggccctagcccaaccctcagagtgattcccttggttccctatagtgagcctctttcactctctttccctgccaggtatggcaaggctgctccaggggacaggactatggtatgtactcaggctgtggctcagacctttctccttttggccctgtaagtctaaagagcaccctcggttgcagggcccgtgctcagccccctttccttcaccttgtccagctggattctctgtgggcagcggggcaggagctccaagcctggaagagcccaggagctgatctgttacaagtcctgaccaaagcagtcaaggtgagtgaggctgggccagcaccctggggagacaggcttctagcagtcagactcctgtctccatgtgaccctgagcaagttaataaccttcctggaccgcagtttccttctctgtacaatggagatgagcacctatctcagaaggtggttatgtggctaaggaaatatgtagagccccgcacactgcctgggatgtgacagggcctcagtgaatggtgacccttttccctgctggaagtagatgagaagtgactttccatttggtgacagagcagagggtgctggcagagccagggcaagggcgtgcagggccaggctgcacggcagagacgttctgcccatggcaggaaggaggcggcctggtgatctgcccttgaacctgctcccacaccccatcccccagagtgccgaagctgcagccgaggccaccaagaatatggaagctggagccggaagagccagttatatcagctcagcacggctggagcagccagaccccggggcggtggcagctgctgccatcctccgggccatcttggaggtcttgcagagctagggtgtgtgactgcctcccttggcctcagctcctctcactgctgtgctgaggtggcctttgtcacttccttctgccttccaaccctcaccttcccccggcctgccccattggcccaccctctaagttgagcaggaaatcctccaccaagcttccagaactacagacagcacccagagtgagctggagtgggtcccatgcctctccagcatgccctttccctttgcaggagggtggagtccctgggtcatgccctcccctgccagctctgggcttcagagataaggcattttccttgtgcagcctttacctggcaatcctaatttggttttaagactccctgtgaaatgctttccgcaccttaaccccagtgagcgtgaaaaagaaagttaataaactataatacatggaagcaagaaagacactgcctcctctgagggaccttttcccaagcatgtaaacaagggggcccacagccctggctgcaggcatcatgacccatcttctaccaggcagatctttattacctgagcccctaaggcagtgtctcctcagctgggctgcttccactgagacccccgacccatcccctttccagtacacacacctgatgcatgtaagaatggtagaggggcttttcttagcattgaattaataattcagtggctcctcgggagtcgaatgggcatttgggacaccagaaggaaaagaaatcatcatagtctaaggttcagttgtagatcaaaaaatgcactcaggccgggcacggtggctcacacctgcaatcccagcactttgggaggccaggcaggcggatccttacactcaggagttcaagaccagtctgggcaacatgtgacaaccctgtctctaccacaaaatactcaattacgcaggca

SEQ ID NO: 820 - DNA, 3254 bp, Homo sapiens
ggcttctctacccagggtcctgtctgtcggctgcaccatacgtccctgaccacaaggcatccacgtgcacaggagtatgcgcccagcagctgggaaggaggctgacctcagacggtggcctgtggatcccagctctgtcatttcctggctgggtgacctcaacctagtcaccctttttgagtcttgttttctcagattatgaaataggaaaaatttccttcctcgtgagataagcacgtgccattagctattaaggacacgcacataaatgagctgcatgtgaatccacacatgccattccatgaagacatcaaagagggatcatgtggatctttggtgccttccggttggcccctccctaggtctgtgagggtcagacctgtcctgaggcttttacaaattggcccagaactcatttaaccacagcatcatttcattagagggctgttattagagactgaatgtttgtgtcccccccaaattcctgtgttgaaaggctcacccccactatggtagtgtcaggacgtggggcctttgggaggtgatggggttatgagggtggagccccagagagtcctcacgccctttccaccatgcgaggttatggtgagaagatggtccctgaggaagctggcccttgccacaccccacctctgccagcgccttcatcttggatgtctacagcctccagaactgtgagaaataaacacttgttgttttagccacccaggctattatatttttgttatagcagcctgaacaaagacagctttgattcttaacatatttaatgaaactcgagcttcataaaccagtgaaatgcctacccctatggagacggggagctggtcatgggacccaggtgcctggaggacatcccagtggctttgaaggctccagccagtcaagacggtcaatattagcccttctgccaacatctggcaatgtgaggctggggtggacgttggcctgatgttgccaggagtaggatgctgatgctgccagagagtaggtgggctccaaaccccaggcttctcacttgcttactaagcacagcagtctgaagcttgggacctggcagtgcgtctttggagaaggcaaaaaagccacagcagcaacacttaggagcaagacccttcccgctctccaccctatttcctcccctgaagaagagcaacagctcaagctctagcatggcacagaacgctaggttgggccaggcaagcagccatggtggggccaggtgaagcaatgtgggtctcagcaaggaacccctctgaaggtggcagtggctcccagggctgctgcacactggacaccacaactttggcatcagctgcatggtgagctgcagagtggtcagaggggctggggccctgccaagagagcaaggccagacctgcccagcgggaggcaggaaggccctgatccagcaaggagaagtagaggaagtccacagccacctctgttactcatcgctactgggacatctggggacaggctctgttcttgggagagcaggtcaccaggatttgtagggctgcctgccggtgacagacacgtaagtcacagggaaaggccgggatcccaggcctcagctgtagcagcagctggaagaggtggagccgcacggtcacaatacatgcagacacagagcagcaatacgaaacagaacagctcagagcggtcagctcctcagcagaagctgcgtgggccgccactccccctttctgcaatcaccccatgatgtctccaccccacctcacatccagatggggctggatggcagagcagatgaagcctgctctgtggcggggcagcctaactgaaatgcacacctttatgggggaagtggacggacacctcacctccctcatgtttcacaccgtggactgcacttgagtcccagctcttcaccacatccctaggagtcttaagaggaaatcagtctgatttcttcagacaggagcagcaagagcggccagagcgaggaggacctcgtgtgaatggaggacctgagaggctgacgccaaggagtgcagaagccaaagccaccaaggaaagcagacaggcagcaagcagccagagaaggcaggcccagcacccaggcaaagccaccaaggaaagcagacaggcagcaagcggccggagagggcaggcccagcacccaggcaaagccaccaaggaaagcagacaggcagcaagcggccggagagggcaggccagcacccaggcaagaagtctgggcccagcattggaagaaagtcgcctgctgaaaccagccgggagccctgggaagagcagagcttcttgaggggagcacaggatgcaccaccacggagctcttgggagcccttgctgctgctcactacccatcatgcagcaggggctggaaaaacgagcagatgcccaggagttaatgacatgatccagaattacaccaggggcgaagctgttcagacagacccccagcctgcagggtggtccccatccaagccaccaaaatccctcagggaagccccaaagtccctgagcctggtacacaccccgtctccctacatcccatcaagacctgctctgagcactcagctggtcaccaggcacccatcccactagactagcccccaggctggtaaaggagaaatcacacacccttgtcacagtcaagcccttccttggggaagaagataaggccacacttcaccccacagaaccacagtgatttgggggggaaattctgtctcccaatggacagactggggagtcccagcatttcactgggatgcgctggtttgggaccagtgctccccatcagccaccctaactccaccctcaagttacttggtttcctgctgtgccacagggtaagtcttcttgtcaaggccccagcctttcgtgggagatccttctctagacctggccctgtcccaccctggaatgtgggactggaacccatacctgtctgtcggtcaggatccccggctctgggcgcttccaagatgaagccagaaggatgtagagcaccagcagcccaaaggccaccaccagcatcccggtgctgttggcaaagaccgcctcactgggcaggctgtggtatggcctggtggtgtttttcctgaagatgacaaaacaatgtgagccctcgagagatttttccacctatttttgtctagtgggagactcgatgtcactaacagagggtgagaaaaccttcccgggtccatatgtgatctagaattaaaacaccctttctt

SEQ ID NO: 821 - DNA, 1244 bp, Homo sapiens
ctctgatcacagtggctttatctccatgaaggaggtgaagcaggctctggtcaactgcaactggtccttgttcaatgatgagacctgcctcatgatgataaacatgtttgacaagacctaatcaggccacataaatgtctacggcttctcagccctgtggaaattcatccagcagtggaagcagctcttccagcagttatgactgggacaactcaggctccattagctacacagagctgcagcaagctctgtcccaaatgggctacaacctgagcccccagttcacccagctactggtctccagctactgcccacgctctgtcaatcctgccagacagcttgattgcttcatccaggtgtgcacccagctgcagatgccgacagaggccttccgggagaaggacacagctgtacaaggcaacattcggctcagcttcaaggacgtcgtcaccatgacagctcggatgctatgacccaacccatctgtggagagtggagtgcaccagggacctttcctggcttcctagagtgacagaagtacgtggacctctctcttcttttcctgtccctctagaagaacattctcccttgcttgatgcaacactgttccaaaagagggttgagagtcctgcatcacagccaccaaatagtgaggaccagggctgaggccacacaggtaggggcctgatgaaggagaggatgaaagctgaatgtcccgacggccatgagcagttgagtggcacagcctggcaccagacgcaggagattctggtccttgtaatggagttagtgtccagtcagctgagctccaccctgatgccagtggcgagtgttcactggcctgttaccattagcacctgtgttccctcaccaggccatcctgtcacatgagcccattttctccaaagtggaatctgaccaagcatgagagagatttgcccctgggaccagtggcttggattccatcacacccataaatccttgggtattaacttctagctgcctggggctggccctgctcagacaaatctgttccctgggcatctttggccaggctactgcctccgcagctgggatccctcacttgcctgccacgctctgctcggcttccatctccaggggacagtggtcacctctccttgccaatactttttttaatttgcatttttttcatttggggccaaaagttcagtgaaattgtaagcttcaataaaaggataaaactaaaaaaaaaaaaaaaaaat

SEQ ID NO: 822 - DNA, 916 bp, Homo sapiens
ccccgctctgccaatcctgccatgcagcttgaccgcttcatccaggtgtgcacccagctgcaggtgctgacagaggccttccgggagaaggacacagctgtacaaggcaacattcggctcagcttcgaggacttcgtcaccatgacagcttctcggatgctatgacccaaccatctgtggagagtggagtgcaccagggacctttcctggcttcttagagtgagagaagtatgtggacatctcttcttttcctgtccctctagaagaacattctcccttgcttgatgcaacactgttccaaaagagggtggagagtcctgcatcatagccaccaaatagtgaggaccggggctgaggccacacagataggggcctgatggaggagaggatagaagttgaatgtcctgatggccatgagcagttgagtggcacagcctggcaccaggagcaggtccttgtaatggagttagtgtccagtcagctgagctccaccctgatgccagtggtgagtgttcatcggcctgttaccgttagtacctgtgttccctcaccaggccatcctgtcaaacgagcccattttctccaaagtggaatctgaccaagcatgagagagatctgtctatgggaccagtggcttggattctgccacacccataaatccttgtgtgttaacttctagctgcctggggctggccctgctcagacaaatctgctccctgggcatctttggccaggcttctgccctctgcagctgggacccctcacttgcctgccatgctctgctcggcttcagtctccaggagacagtggtcacctctccctgccaatactttttttaatttgcattttttttcatttggggccaaaagtccagtgaaattgtaagcttcaataaaaggatgaaactctggagttc

SEQ ID NO: 823 - DNA, 3396 bp, Homo sapiens
ctcagatcacattggtatatctccatgaaggagctaaagcaggcctggtcaactgcaattggtcttcattcaatgatgagacctgcctcatgatgataagtgagtctccgccttgcccttgggcctgagctggggcagagccacctgatagtggacagtaggtgggtaggtgggtgggtggacattctgaagagaaattcattgaccagggaggactgtggggaggaagctaggttcagggtgagatcccctagactgagagctcttttcctgagatctttcttaagttctagaccctgcctagttacaggttaacttagtttcctcttctgtagaatggtactccctcccctgtaggaaacagcagggaggggtcaggtgccaagcctgcagagaaaatgcagttctggatggggtggggctaaaggtgtccagagtaggaggacggtgcaacgcttgatgtgggtgtctcaggtgcaggcatctgggcctcagggcttggttctgtgaagtcgcctactccagcctggagagaagggctgcctcaatgggtcctgagggggacccttggccttcagtcttgaagccttcctcccctcctttccctcctcaccttcagacatgtttgacaagaccaagtcaggccgcatcgatgtctacggcttctcagccctgtggaaattcatccagcagtggaagaacctcttccagcagtatgaccgggaccgctcgggctccattagctacacagagctgcagcaaggtgcgggtcatggccggggcacgatgggcaggacagagctagactcttctctttacaccctaagatacaacaaaggggtttcctcttgttaccgaatgtccacctgcactacaaaatgctgttctcagtgcaggcctgcatccctcaccccttctttgacccagctggggcactgagccaagagccagggcaaggaaacacctgggtccagaatcagggctggaccctggagtgctgggtgagacggccccagccacagggagccttaaggatggaaacttggcaccttaaggactatgagaccagtgtgtgtggcttgggtgactcctttctctccagtttctagcatgtagaatggaaagagccctgaacagggctcagaaagatgggtctgttgccacctctgctagtggacagtttctttcccaacttttgggaccctgagcactctaaaagttgcagttggggaagatgacctgaggccacagccccaggtctggttccaaactgactgtgtaaggcagaaggccacagtttgggctcaggcaggttagtaagaggttgggggaggacccaagagggagctttgccacccaggagggagaaagggctccccagagagtctagtcctttgcccaggctgtggatttcattcagactaaggaggtctgtgggcaggagtgagtgcaccacatctgcccccagtaaaagggaggggagatgacctatagtaatcacctactcttgccagcttttgtcgtggatattagtaagggtgatattaaccacaacaaaacgtatttactgaatgcttgctatttttaataggcttatgtaattcattcttcccatgtgctaggtactatttataattccacacccttcaatgaagaatcccttataatctcccttttaccggtgagaaaactgaggtttagtgtaggtaacctgcccaagggcccgcataacaaatggagagctgaggttttagcctggcctggtaagttctgaacagaggaaggaaggaagcatcccagtgaagagacaggatgctccaagagaccttggagtgacagtgactttattaaaatagcatttaccaagtgctttttctgtgccagtcactgtgctaagtgctttacatgatcacccgttttaatccttactagaacctacaagttaagtattatccccattttagagatgataagatagggatagtgaggctaagcaacttgcccagtggctgactccagagcaggtcctcatacctctgctgtactgcctctgatgtctgccccaggcaaggtggtcctgggagctcaggcttccttttggaatgcaaacgaatcagagatgattgcggatagtccgttgtcgtctctgcaatcccctgagcctcagttgaagagacaataatggagatttggagaaagagggatgagggccttccacctaaggggagcatccagacacggtccctgttgtgtttctgacatcttagacagacccttgggatttctctaccctctttgtgcttctgtgcccatcctctcgaagttccttgaactgttgtgatccagtattcctgattgatggaggtgctcatggcaggtttttgtgtgtctggtctgtgtgcccctcttctccagctctgtcccaaatgggctacaacctgagcccccagttcacccagcttctggtctcccgctactgcccacgctctgccaatcctgccatgcagcttgaccgcttcatccaggtgtgcacccagctgcaggtgctgacagaggccttccgggagaaggacacagctgtacaaggcaacattcggctcagcttcgaggacttcgtcaccatgacagcttctcggatgctatgacccaaccatctgtggagagtggagtgcaccagggacctttcctggcttcttagagtgagagaagtatgtggacatctcttcttttcctgtccctctagaagaacattctcccttgcttgatgcaacactgttccaaaagagggtggagagtcctgcatcatagccaccaaatagtgaggaccggggctgaggccacacagataggggcctgatggaggagaggatagaagttgaatgtcctgatggccatgagcagttgagtggcacagcctggcaccaggagcaggtccttgtaatggagttagtgtccagtcagctgagctccaccctgatgccagtggtgagtgttcatcggcctgttaccgttagtacctgtgttccctcaccaggccatcctgtcaaacgagcccattttctccaaagtggaatctgaccaagcatgagagagatctgtctatgggaccagtggcttggattctgccacacccataaatccttgtgtgttaacttctagctgcctggggctggccctgctcagacaaatctgctccctgggcatctttggccaggcttctgccctctgcagctgggacccctcacttgcctgccatgctctgctcggcttcagtctccaggagacagtggtcacctctccctgccaatactttttttaatttgcattttttttcatttggggccaaaagtccagtgaaattgtaagcttcaataaaaggatgaaactctggagttc

SEQ ID NO: 824 - DNA, 187 bp, Homo sapiens
cgggtagctactaccttggaccccccccagtagtggagggcagtatggcagcgtgctaccccctggtggtggctatgggggtcctgcccctggagggccttatggaccaccagctggtagagggccctatggacacctcaatcctgggatgttcccctctggaactccaggaggaccaaatgatggt

SEQ ID NO: 825 - DNA, 975 bp, Homo sapiens
gatctgcccacctcagcctcgcaaagtgctgggattacaggcgtgagccaccatatctgacacatttataataaaaactactgcatttaattcctgcctcaaaatacagcctgtaaatcagacagtgtcttttttttctgagacagggtctctcattctatcaaccaagctggagtgcacctcattgcaaccttcaccttctgggttcaagcgatcctcccacttcagcctcccatgtagctgctgggactaaacgagcagaccaccatgcccgcccaatttttgtatttttttttttttttttagagacagggtttcatcatgttgcccaggctggtctcaaaatcctgggttcatgcaatccctccacctcagcctcccaaaatactgggattgcaggcgtgagctatggtgccaggcccagtgtctttttaatctttacttgctctgcattttaactctacgatcaatgaattcatggttcatcttatgtttatcttataacacacttcaaaagaaaggaaatatgatgttcaacctaacagtctttaaaacagagtataagttgcccctctgatacctcaggagtagaacttcctttcttaggcctgatttcaaaactacatattcactggcttctacttctcaactgttcttaaaactgagaatttggccaggcgcggtggctcatgcctgtaatcccagcactttgggaggccaaggcggatggatcatgaggtcaggagactgagaccatcctggctaacacggtgaaaccccatctctactaaaaatacaaaaaattagccgggcgtggcagcaggcacctgtaatcccagctactcgggaggctgaggcaggagaatggcgtgaacccaggaggcggagcttgcagtgatctgagatcgcaccactgcactccagcctgggcaaaagagggagactccatctcaaaaaaaaaaaaaacaaaaaaaa

SEQ ID NO: 826 - DNA, 318 bp, Homo sapiens
gaactattgatacatgcaataacctaggtggatctcaaagtcattctgctgagtgaatgattccagttacatagcattctggaaaaggcaaaactgtggtgaccaggaacaagcatgattgccaggggttggtggtggggaaagcgtgtgactaccatggggtagtatgaggtgatttttgaggagatgaaactgttctgtgtcctcattgtggtagtggttacatgagttagtacatgtgttaaaactcatagataatacgcttccccaaggaatccatttactatacattaatttgttaaaaaaataaatgtaaaa

SEQ ID NO: 827 - DNA, 1212 bp, Homo sapiens
ttttttttttaagtatttattgatcattcttgggtgtttctcgcagagggggatttggcagggtcacaggacaatagtggagggaaggtcagcaaataaacaagtgaacagaggtctctggttttcctaggcagaggaccctgtggccttccgcagtgtttgtgtccctgggtacttgagattagggagtggtgatgactcttaatgagcatgctgccttcaagcatctgtttaacaaagcacatcttgcaccacccttaatccatttaaccctgagtggacacagtacatgtttcagagagcacggggttgggggtaaggttatagattaacagcatcccaaggcagaagaatttttcttagtacagaacaaagtggagtctcctgtgtctacttctttctacacagacacagcaacaatctgatttctctatcttttccccacatttcccccttttctattcgacaaaaccgccatcgtcatcatgacccgttctcagtgagctgttgggtacacctcccagacggggcggctgccgggcggaggggctcctcacttctcagactgggcagctgccgggcggaggggctcctcacttctcagacggggcggccgggcagagacgctcctcacctcccagacggggtcgcggccgggcagaggcgctcctcacatcccagatggggcggcggggcagaggcgctccccacatctcagacgatgggcggctgggcagagacgctcctcacttcctagacgggatggcggccgggaagaggcgctcctcacttcccagactgggcagctgggcagaggggctcctcacatcccagacgatgggcggccaggcagagacgctcctcacttcccagaaggggtggcggccgggcagaggctgcaatctcggcactttgggaggccaaggcaggcggctgggaggtggaggttgtagcgagccgagatcacgccactgcactccagcctgggcaacattgagcattgagtgaacgagactccctctgcaatcccggcacctcgggaggccgaggctggcagatcactcgcggttaggagctggagaccagcccggccaacacagcgaaaccccgtctccaccaaaaaaatagaaaaaccagtcaggcgtggcggcgcgcgcctgcaatcccaggcacttggcaggctgaggcaggagaatcaggcagggaggttgc

SEQ ID NO: 828 - DNA, 99 bp, Homo sapiens
aggccaaggtgggtggatcacttgaggtcaggagttcgagaccagcctggccaacatagtgaaaccccatctctactaaaaatacaaaaattagttggg

SEQ ID NO: 829 - DNA, 125 bp, Homo sapiens
ggtaatcccagcactttgggaggccgaggcaggcagatcacctgaggtcaggagttcgagaccagcctggccaacatggtgaaaccccatctctaccaaaaatacaaaaattagccgggcgaggt

SEQ ID NO: 830 - DNA, 141 bp, Homo sapiens
taatcccagcactttgggaggctgagacgggtggatcacctgaggtcaggagtttgagaccagcctggccaacatggtgaaaccccatctctactaaaaatacaaaaattagctgagcacggtggcaggtgcctgtaatcc

SEQ ID NO: 831 - DNA, 207 bp, Homo sapiens
tctcagcactttgggaagccgaggtgggcggatcacttgaggtcaggagttcgagaccagcctggccaacatggtgaaaccccatctctactaaaaatacaaaaattagccgggcatggtggcgggtgcctgtgatcccagctacttgggaggctgagacaggagaattgcttgaacctgggaggcggaggttgcagtgagctgaga

SEQ ID NO: 832 - DNA, 164 bp, Homo sapiens
cagcactttgggaggccgaggtgggtggatcacctgaagtcaggagttcgagaccagcctggccaacatggtgaaaccccgtctctactaaaaatacaaaaattagccaggcatggtggcaggtgcctgtaatcccagctactcaggaggctgaggcaggagaa

SEQ ID NO: 833 - DNA, 146 bp, Homo sapiens
ccaggccgggcatggtggctcacgcctgtaatcccagcactttgggaggccgaggcgggcggatcacccgaggtcaggagttcgagaccagtctggccaacatggtgaaaccccatctctactaaaaatacaaaaattagcgaggc

SEQ ID NO: 834 - DNA, 117 bp, Homo sapiens
atcccagcactttgggaggccgaggtgggtagatcacttgaggtcaggagttcaagaccagcctggccaacatggtgaaaccccgtctctactaaaatacaaaaaaaaaaaaaaata

SEQ ID NO: 835 - DNA, 129 bp, Homo sapiens
ctgtaatcccagcactttgggaggccgaggtgggcagatcacttgaggtcaggaatttgagaccagcctggccaacatggtgaaaccccatctctactaaaaatacaaaaaattagctgggcttggtgg

SEQ ID NO: 836 - DNA, 165 bp, Homo sapiens
cccagcactttgggaggccgaggcgggcggattacttgaggtcaggagttcgagaccagcctggccaacatggtgaaaccccgtctctactaaaaatacaaaaaaattagccaggtgtgatggcacacgcctgtaatcccagctactcgggaggctgaggcagga

SEQ ID NO: 837 - DNA, 145 bp, Homo sapiens
tcccagcaatttgggaggccaaggcgggtggatcacttgagttcaggagttcgagaccagcctggccaatatggtgaaaccccatctctactaaaaatacaaaaattagctgggcatggtggtgcgtgcctgtaatcccagctac

SEQ ID NO: 838 - DNA, 7000 bp, Homo sapiens
cggcccctcgtggtggcgccagatactcgcgctcctgcctgccagaccccgaggcccgcagcctccgcggatccgggcccgctcggcccctcccatggtgagccccccgccctttttccagagccttccacggccccgcccccccagcccctatcccgggctcacgcctttgtccgcagcccccgccgctccggggtgtcccctgtggcccgaagggtggtcccgcccggggccgggttcccccgtggagcacccggtggttcgcgccgcgctctcccctttgttgcgcgttcgggccggggtggggggttgggggacgggggcggggcgggctcatattactgctgactccgcggcccgatttaaacgcgggttgggggcggcagacaggcagccggcacgctcgcttgtttttcctattggagagttgctcgctctccgggcaggaaacctggaaatgggggcggggttgggggacagcggcgagggaggggcccgcgctttgtaccagcgcccccagatgtcgcacccgtgggcgttctccctggcggccgctccgtgcccgtggagtgcgcacctagaatacgcgcccgccccacatgtgggatgctttgatggactgccgtgagcccagaccttaaacgtaaacattcagcttcgcaggtactttgggctgcacacgcttctccggacccaaaagatgcacatgcttttcagaaaccgtaagtttacctggggctgtaaaaccgcacatcgcgactttgcaccgtgcacacgcttgccccgatgtgagatttcccctgggttcgcgctcgggtccgcttcttaaatacactgcctcagcggtgtggatggcacagagctgtggcagccctactgaaaccttaaacaggcttcctggggtcataaacatggataccgagacttagatcacctcccacaacttaaacgtaccccttcactccactgccttcgccccttcctgcagcattcgcatctagttgttcaaaagtgctttccgggtcctcagacatgcaccccaaggttttaaacctcagtgcaagtactagatgggcttccctgtgcaatagggatgtcaggcgcgcagttttgcacacgattgccaagatgtgagatttactttaggttgcaccttaaccgtcgtttttaaatatgatcgtcccatcttgatgtgctgctcctgctgtggaaggtatccctgggttttaggcaagcatatgtgttctttactatggctccagatcccagcatatttgaagtcctgagtcaacctgctctcctagacaagcagacattaagtatgtcgcttgggctcttaagtgcgttctcctgacttttacccatctttgtggcagtaaatgcatacgtgtcactgtatatgcggactagatacctcaggtcccagcgccataaacaacttgtatgttgtaagtgtaccctcatctcgaaagtcacctccagctgtgcgttttaactcatctcagatgctggatgtccggtatggtgcctgaagcccccggggcaacatccactctctgtccaactcattctaacgccaagatactcaggttttctatctgatcttctgacgactgcccaaaagtcagaatcacctgcgtgggtgaagaatcacctgcgtgggtggagaatcacctgcgtgggtggagagcaagtttgttcaggtttttctctttttaagcactcacaaaataaaattttttgtgtttgctagtattctggaaggaaagatctccttgtgcttcatagaaaatttggaaaatacctgtttgtaataagataaaaataaatcacccttataatttgttttcccccgcctggaggcgcctattacggggaaactctcgtgggtttcctgctgccaggctgtttgcggagctttcccttgtttgctttgagatgtttttggttttaaaaaacaataagtgaggtcaggcttggtggccctcgtctgtaatcccagcactttgggaggccgaggcgggcggatcacttgaggtcaggagttcgagaccagtctggccaacatggtgaaaccccatctctactaaaaaaaaaaaaaaaaaaaaaattagccgggcatgatggcgcggcttgcagtgagcgaggttgcagtgagctgagatcgcaccactgcactccagtctgggaaatgagtgaaactctgtctcaaaaaaaaaatagtaataaaaatagtggggagagtgcctgtgagtagcatttgtggcgttgcttggctttattgctagaactttctcttggtgttctacatgttttggtctgtgagacccctctgggggtgggtgtcccagctgtcttccaaatgtttcccccttttcctcgctgtctttctcctggatggtttagtcccctctgtgtttcttgtcatctccttcctgcctccccccggggtcagacttataaggccagagaggtgggcactggctgagccagaggaaggaattgaactttgggatgacagggagctttaggagagtttcagcctgggaaagacagggcaagctggtgtgtgggacagacacagcgcaacgcggcttgtgcctgtggaggctgcaaggaagccctggcccagctgggcacggggaaagccccctacagctggcttctaacttgggtctcaagaatcgatcaggcgcacagctggggcaaaggctggaggtggggctggctgaaggcttcaggactctgctgggccagtgtcaaggtgacagcaggctctgggaaggaagggtcctgagggtgggcagcgggaaaggacatgaggaccagcgtgtgggggtcctgaggggtgagcagagggtttggacatggccccgtgggcttccagcaggggatttggggctgaatattgggacgtcccctctggggtgtgtggggactgcctgtccttgcaggccccggcctcagttttcccacctatcccccactccattgcaggaaggtgctcgggtcttcggggcactgggtcccatcggtccctcctcagcctgggctcaccctcgggggtctggccgtgagcgagcaccggctcagcaacaagctgctggcttggagcggcgtcctcgagtggcaggaggtgagtctctgtggggctgcggctggcctccagggtcttgtcttgtccctgcggggacaggccagggcatctaggctgtgcacagtgacgcccctcctgcccccacagaagcgcagaccctactctgactccactgcaaagctgaagcggaccctgccctgccaagcctacgtgaaccaaggcgagaacctgtgagtgccggggcgtggcagccagggcggtggcaggggcagtggctgtggccgtggggatcagggcagccctttctgaccagctccttcccatagggagaccgaccagtggccgcagaagctgatcatgcagctgatccctcagcagctgctggtgagacccgcccctcccaccccacccactctgagcacccccatgcctggctgacccagctgtctgtcctgtcgcccccagaccaccctgggccccctgttccggaactcccagttggcacagttccacttcaccaacagagactgcgactcgctcaaggggctctgccgcatcatgggcaacggcttcgtgagtggggcgggctcccttgtagcactgtggtgacaagtacagctggaggcagcgctctgctcacacagtccaggcgggggtcggggggtctcccctggggccgagggtagccctcgtggcctctcggaccccatctggaaatgactgactccaggcaccctccgtagagcacagggtgaaggaactcagcctgagaggcctccagtttctgcatctgtgcccagcttcgaggtggccctgggggcgtgagtgcagggagggactggggccagccctgttggggcccaggagcctgtcggggacacatagcgtatggcagggacctggtaaatgggtgtgctaggcacaagagccagccaggagggagtggcacgttggggcttggtattctggtctgtaaaatgggctaacctccccgagtggcctgagctggccgtgagggagcagagctgagggtgctgaagcaggcgcggtgagtaggtcctcaggcctggcttcaaggggacccaggtatccagccagtggctgtgcagggactgagtggggcaggcgcggccatgacctggacccggggggctgccaagggatctgagagcggcttccgcagcactccagggttgggctggttgaggggtagagatgacattttctgaggtagggaggacaggggagccgtgcttcctagggccaccgggaggctggagggagggaatttgtgtaaagcgcttgagatggtgactttagtacctagtgagtgctgggtgaacccactggtgaggctgttcaggtgactgagattctggcgcagggcaggtcagaaagggggcttgggctgtgaaagatggcaggtgctggagaggaggcaggggtggggtgggagcgagttgtctgcccagaggacctggctctgggacattcccagtccctgttccctgttgggacagtctgcctctacccgtcccagctgccgttgagcgccctgggttccgctaggcctcccttctccctcaggagaccaggggcagaccagggcttgtgctggcatgaggtctcttaagtgacccgttcccccttcacccagcaccgtttgttgagggctgcatatctgggccccgagtacccagtctgtagggaaagtggacatccatactcaccccccaggcatggcctgggaggctgactgtgcatggctccagggaggccagggacagggccctgagcgggtgatccctgggctggacaccaaggttgagaagttaggccggcagcgtggaggggacagcactgtgggggtggccggtgtggggaggggacatggggttttgggacggtcacaccacttcatctagacaccacagccaggcacatctgtcaggcttagttctcccatgcgccatcctcaagaggcaccagcactttatctgttgagcctttatgtggcaccaactgtgtgcactattacccggttttacagatgatggaggcccagaagcaggaggtggctggtgttaggtcacacagctaggaggcagcagaacggtggggcgctgcctgtgctcttaacccccaggccaagtcaccccatcaggcagtcaggagggctggcggcagggggtgatgtgggtgggaggtagtgccttcttggcattctcaccgcagcctgggtgccgggtgccactctgacctcagccatggcagggtcgggggatgccgatgggcgctgcacgggctctcagaggcccctcacctatggccatggccttgactgtgggggcctctgtccaccgatgatctcccttcatcccctacaggtggggcggtccagggtggtgggggcacagtggccccgggcagtgaccacagggtcctgacccgcggcccccgcaggcgggctgcatgctgttcccccacatctccccctgtgaggtgcgcgtgctcatgctcctgtactcgtccaagaagaagatcttcatgggcctcatcccctacgaccagagcggcttcgtcagtgccatccggcaggtcatcaccacccgcaagcaggtgtgccagccaagcacagcccctctggggacagagggggattagaccccactgccctggttgggcagccagacttggtgtgggcggagtgtgatgcgatggctggagcaaggagctgcaggggagcccggaggatgccgggcgggttcccaccagggctccatggaaaagcggccactgggcggctctgcagggctggagggtgggtcttggcgcggcggcagggaagccagcggagcggggagctgggcaggggttgggatcgtcctgcggctggaaggccctgcctggtaaccacgtgtcctggtcatgccttgccagttgaggcagactctgcaggtcctgtgcaccaggtgagggccgggacctgtctcaggccactggggagccatggggggctgtgagcagatgaggggcagggcctgttcccctgggactagagaatggacccagctggggctaacaggccaaggctcggagggagggatggcaggccccaggacagacagacaggtttcccaggagcctgggcccctcttcccaccccgttcccttccaacaggcagtgggacctggtggtgtcaactcaggcccagtccagatcgtcaacaacaagtttctggcatggagtggtgtcatggagtggcaggaggtgagcactcggcagcccagggacttgggacccccagatcctcacggactgtggctgggaggggacactggcattgggggtctccagccctgagggctcctctttgcctctcccccaaaagcccaggcctgagcccaacagtcggtccaagaggtggctgccatcccacgtctacgtgaaccagggggagatcctgtgagtgctgggctggggggtggaggcagcatccaggggagctggggcttcctgaccctcgtccctttgtgccccacaggaggaccgagcagtggccaaggaagctgtacatgcagctcatcccgcagcagctgctggtgaggggctggggccgggtgctggagcctgcacgcagtagctcttccagagggcggggctgggggcaagagcgcctccccaggtggcctgagctggctgtgagggagcggacctgatcggtgctgaagcaggtgtggtgggtagctcctcaggcttggcttcaaggggtcccaggcagccagctggtggctgtgcagggactgagcggggcaggggcagccacgacctgcacctggggggctgccaagggatctgagagcggcttccacagcactccagggttgggcttggtgagcggt

SEQ ID NO: 839 - DNA, 125 bp, Homo sapiens
catgcctgtaatcccaacactttgggaggccgaggcgggcagatcacgtgaggtcaggagtttgagaccagcctggccaacatggtgaaaccccatctctaataaaaatacaaaaattagccagg

SEQ ID NO: 840 - DNA, 134 bp, Homo sapiens
ggccgaggcgggtggatcacctgaggtgaggagttcgagtccagcctggccaacatggtgaaaccccatctctactaaaaatacaaaaattagctgggcatggtggcgcatgcctgtaattccagctactcagg

SEQ ID NO: 841 - DNA, 131 bp, Homo sapiens
agtcccagctactcgggaggctgaggcaggagaatggcttgaacccgggaggcggagcttgcagtgagccgagatggcgccactgcactccagcctgggcgacagagcgagactccatctcaaaaaacaaa

SEQ ID NO: 842 - DNA, 755 bp, Homo sapiens
tgaagtagaacatgcatgagaaagaatgcagaaatcatgaataaacagctccagaaagggatcacgcccaactaaccagcacccgaattcagagcccaccagcccccgggatcccggccacgtccactctgaccccatgcctgcaaggatagggtctctatcgtgacttctaaccccaccaggtacttttgcctctttttagaaatggaatcatacagtctgtactcttttgtgcctggtttgttttggttaacattgcgtctgggagttttatctctgtccagggttggcgaaccccagcttacaagccaaatctggtcctttgcctgttttcatatggcctgtgagctaaggatggattttatgtttttaaatagttgcgggggggggcgggggggggaggaaagaatgatattttgtgacgcgtgaaaattatatgaaattcaaatttgtgtccacaaattgactgggcatggtggctcatgcctgtaatcccagcactttgtggggccgaggtgggtgggtcacttggggccagaagtttgctaccagcctgaccaacatggttgaaaccccatctctactaaaaggtacaaaaaaatagctgggtgtggtggttgatgcctgtaatcccagctactcaggtggctgaggcaggagaatcacttgaacccgggaggcagagattgcagctgagccaagattgtgccactgtacttcagcctggatgacagagtaacactgtatctcaaaaa

SEQ ID NO: 843 - DNA, 865 bp, Homo sapiens
aaggttcaattcagtacatccataaatcgacagaatgaagaaaacataacaaaaagccacctattccttcctcttgctcccttattagctaaagtaaaatttacatctgtaagacttactgagttgctgccaaaatggaactgaattcttaaaagcaggaacatgcctatgtgaaacattagaaaaccaaaataaatgggaaaattcagacttgaagagctgaatcatgtgacaacaaagtactgatcttaattcagaaaggctacttggagaaggtgtatcttaaggggtaaaaaacctgtgggttaccacatattaacagggaataatatcaacagaggcacccataagcaagcaagacacaactgagacagatgtaccaggtgaaaaaaatcttcagtatggatacacatgggtattctgaaggctacaatgaatggtttagtctttgacataaggaggatgaacatattatttatactgtgtaatctaatctggcttctatggggaaagcaacatgtacataagtgaattttctacatgaagtgggctacttctgattttaatcaaagctataaaatagattgtatatttcactagcttcttaaagtaactcttccattttcatttatctctaaaaacagttaacttcctgtgctctaggaaatgcaccaataccaaaggtcaatgtggaaatatgggcatgtttgccctatgctgtgtggtctctagatttctatatttgctttgcttttgtctgctctagtaatctccctccttttgatctgtggcctgggaaaatgtggtttctttgtatttcaaataaaagtaaaatagttttttgagtggttcactcaagagtaaa

SEQ ID NO: 844 - DNA, 651 bp, Homo sapiens
attatttggaaataaagaaggaaataaagatggcttcacatggaaatttaagttctttcagggtggagatttacttggttcatacaccttttgcctgaattaaagtatttcatgtaggaggacttttatcctttttgatagacagtttcatatatcttgaactcaatatctcagatctcttctactgtattactgaatagcatacatacatagacaatgttcgccattcactagatatttttttctattatcttacacttattcaagcttgtctgtgattaatggaattggtgtcagatgctggaatttattctgaccaatgaacacagctgactcaggggagtacaatctcctgccaagtaatagaaccaaacccaatatgcataaaagaaatacaatactccaggctttagctgaaggaagcaactacctgtgtaataacaaagcagcaaaaactatttctcatgtggctgcataggctgtatattatatctgatctctaatgtagcttactggtttgccttttttaaaaccaaaattggaaattttcctttgtaaagaaaaaaagtcttatgagataattgcttgattaatgttttgaacaataccaagaaattgtttaattaaaataaatatttttgtttgaaattg

SEQ ID NO: 845 - DNA, 185 bp, Homo sapiens
tttgaaataaaatatttatttcagataaagttaatatttccataattaaggtaaagcaaacatatatgcttgagtccattatttaaggactataaaatgacttccatgaatattagagttcctgaatgtcatttgagtatctgcctacatgcttgttggaagcttctgtagccttttctttgtag

SEQ ID NO: 846 - DNA, 1532 bp, Homo sapiens
cttgtgttgatttttgtataaagtaagagataaggatccagtttcattcttctacatgtggcttgccagttttcctagcaccatttattgaatagggtgtcctttccccactgtatgtttttgtatgctttgtcaaagatcagttggctataagtatttggctttatttctgggttgtctgttctgttccattggtctatgtacctgttgttatactagccccatgctattttggtaactatagcattgtagtatattttgaagttgaataatgtgatgcccccagatttgttctttttgcttagtactgctttggctatttgggctcttttttggtgccatatggattttaggattgtttctgattgacaaaggtattttgatgggagttctgtgaagagtgatggtggtatcttgataagaactgcattgaatctgtagcttgctttaggcagtatggtcattttcacaatattgattctacccatccatgagcatgggatatgtttccatttgtttgtgtcatctatgatttctttcaatagtgttttatagtttttcttgtagagctattttacctccttggttaagtataaccataagtattttattttattttttttgcagctgttataaaaggaatggaattgttgatttgattcttagcttggccgttgttggtgtatagcagtgctactgatttgtgtacattgattttctatctggagaatttactgaattcatttattagatctaagagctttttggatgagtctttagagttttctaggtaaatggtcatatcattggtggacagtgacagtttgacctccttttttccaatttggatgccctttcttttctgtctgattgctgtggctaggacttccattactatgttgaatagaagtggtgaaagtgggtaaccttgtcttgttccagttttcaggggcgtaggcaaagaattcatgactaagaacccaaaagcaaatgcaacaaaaacaaaaataaataaacgggacctaattaaactaaaaagcttctgcacagcaaaagaaataaccagcagagtaaacagacaacccacagagtgggagaaaattttcgcaaaccacacatccggcaaaggactaacatccagaatctacgaggaacctcaaacaaatcagcaagcaaaaaacaaataatcccatcaagaagtaggcaaagaacatgaatagacaattctcaaaagaagacatacaaacaactagcaaacatatgaaaaaatgctcaccattattaattatcaaggacatgcaaattaaaaccacaatgaggtatcaccttacttagtgagaatggccataattaaaaagtcaaaaaataatagacgttggcatggatttggtgaaaagggagcacttttacactgctggtaggaatgtaaactaatacaaccactgtagaaacagtatagagattccttaaagaattaaaagtagaactacctttcaatccagcaatcccactgtcaggtatctacccaaaga

SEQ ID NO: 847 - DNA, 409 bp, Homo sapiens
tgaaaaagagttaagaaagcctaaagtactaatgacacaccgtcaagtggaccaaatacataatatgcgagtccaagaaagagaagagagagagaaagaaacagaaagtgtatttaaagagataatggccccaaacttgccaaaacagaggaaggagatggacatccagatttaagaagtcttccacataggaggacttcagagatgtccttaccaagacacatgataatcagattatcagaagtaagagttaattttgaaagcagcaagagaaaagtgtctggtcacagaagaaagcccccacaaaatgatcagatttttcaccagaaagcttgcaggtcagaaaattggatgataaattcagaatggtaaaaacaaaaccaaataaaacaaacaaataaaaatgcct

SEQ ID NO: 848 - DNA, 319 bp, Homo sapiens
aaagaagccattatgtgaacaagacacatgcacacacatagttatagtaacacaatttgcaattgcaaaaatatgaaaccaacataaatgcccatcaaccaacaagtggaaaaagtcctatatatatacaccatggaatactactgagccataaaacaaaatgaaataatggcctttgagcaacttggatggagctaaaggccattactctaagttaaataactcaggaatggaaaaccagattattgtatgttctcacttataagtgggagctaagatatgagaatgcaaagacataagaattatataatggggccgg

SEQ ID NO: 849 - DNA, 5062 bp, Homo sapiens
cgagattactgaattttacaagcttgacattttctattggctttataagctcttctcatgtttttattaccctcacatccaatccgttcgagctacacgctaaatcaaattggtattttatatttttatttttttagaggcaggatctcgctctgtcacccaggcaggagtgcagtggcacagtcatggctcgctgcagccttgacctcgcctcagcctccccagtagctgggaccacaggctcatgccacgcacgcccggctgaagctagttttaactgaagaaaactcaaagtgttctctcgccgttaacctttattattgaggcattggctctgctataggaaaacgaggtgacgttaatgtcggtggttgacattaaccactggcaagtgacagtgtggctccttgacaagtggttgctgctcataaatgtcatgaaacaaaaacactgattttagagaagtgggattctacagttaatatcgccagcaaacttttattaagctctcactctgtgccaaacacatgcttgaagttggggtgaatctgtgaccattaagatgttggctgttcatgggcacgttatcaagcaactggggtgtgagagcgaatgataagagggtgaatctggatgaggagggacttccagggcacaggtggaggagaggcattgcagccatagagaggcccaagggaacagtcaagacaaggcggggacagtggccaggaggcgagggcagcacttcctgggcagggaaggcttgccagggagaccagactcctgtctctgtttggaaagaaaaggaaccgcactgggggtcagggaggctaggcacggcaccagcctgggatgccagtcccgcctgaggggccaaggcaaaggggaagcattcacagaccccacaccaggctctgacgccaagtggaagaagagggagatagaagcagaagcctgggcttccaggcctggttcctgggcgggtgttgatgggacccagggagagtcctgtggggatactttgggtctgggctggcaggggctctggaaggagaggcatggaggtgcgaacctggtgcccaggtggaggtgcagtgggggtaaggtggccaggctgcagacccctgcatcagaatgcctgcgaagctgtgggttttttgtttgtttgtttgttttatttcgagacagggtgtcactctgtcgcccagactggagtgcagtagcgccgtctcggctcactgcaagctccgcctcccaggatcaagtgattctcctgcctcagcctcccgagtagctggatttacagatgcatgccaccacgcccagctaattttttgtatttttagtagaaacgaggtttcaccacgttggccaggctggtctcaaactcctgacctcaaatgatccacctgcctcgtcctcccaagtgctggaattacaggtgtgagccgcaccagcctgttttttaattttatttagagacagggtctcactctgttgcccagactggagtgcagtggtgtaatcttggctcactgcagcctcaacttccagcgctaaagcaatcctcccacctctgcctcccgagtaactgggactacacacgcatgccactacacccaggtaatttttaaaaattttttttagagacagagcttctccatgttgcccaggctagcctcaaactcctgggctccagtgaccctcccgccttagtgtctcaaagtgctgggattacaggtatgagccaccacgcccggtcagaagctgtgtttttaagtggacataccatcttgtcctgctgaagtatctccatgtaatcacaatatctatgtcacccaaatctcctccttcctcctccctcccccaaaacacccccacaggcatgcataccctcccatgcgctggaggcagaatctcccaaggggagctggccaggagaggtgtccctgagttcagatggaggtggaagccagagtggggctgggaccacccagtgacatgaggatggggcttgggataaagccctggggacactgacatttaaagtgtggacagaaggagctactgaaggcaatggatttagaaaagcaattgagtatgatttccttcttcaagaaaggctgtccaactagctctcacttcctctcgtgtgttcagtgtcacccggaagcagagtttaatgtgactaaagtcaacattggctcacactgtcagggagtgtgggaagatgagtaaggactcatcgcagggcgatacccacagcttaaaataggcaccttcccctcccaggtctggttagggcagttgttacatatgaggggcgtggagttttgtcttgtattttggccttgttggtaaagcattccaaagcttcgacacaccctcctttcagcccattaggaaaggctgttgattgtaatattcacacagctccctgggctatggttaagagccttgcagaaggactgggagaagccctgtgtgtttgaagtattgtagcatcagaaaaaaacaccggaagaaggcaggtggggacaaggtgcctatgtctgctccttggaattcctttccttactgtccgaggcaactacagggaaagcaaagcgtgagcccccaaatccacacctgggaggaacgttcccctttgcaaggcatgggactggctggccctgtgtctcacgggggctctgagttttgaggtcacactagcctcctgaggcctggctgagagggctgggttgggggtcaggaggccccctgtagccacgaagctcctctggggcattgttaaaggttcaccctcttttttgtgggtatcctggaagatctcaagaaactgagcttggaagaagagaggctgagagggtctcccgccgcctgcgttctctgcagctatggccccacagcctccagtgaccatggaggggaaggtgccacccgccttggctgctgaaagggtgatgctcttatgcctgagtcttggctcctgtggtcctgcagagaccctgtgggggccgcccggtcgtcacctgcactcatcttgggttttccttccttttccaccctaagctgaaggtatttttttcctgttttcttcactctaacttggggaagaaggaagatcctttatggaaaagaaaaaaaaaaaagcacctttgaacgtcctgcaacttgagtttcaagctttcagaaggattcggtgctgctggcctgctcagacctccgcctgggctgtggagttcctcctgttggcccctcctctctgtaccacaaaagctctaggcggcccagccacccctgtgaaagcggcgcccgtagccagacgccaaggctgccgtcccgagccgagggtggcaccttgcccagcgcacgtgcattctcctgtgggaactcggagggcatgtggtgagcagtctcctgtcagttgaggtggaggctcccggcccatctttgctctcctcaggctgcccagctcctggcggcacatggtggcctggcaaagctgacttggcctcctcagttccccacccatccgcggatcatcgccttccctagccacctctctctatagccaccgacatctgcggagcgtcacagactggttctgagctgtggtttacaaattcaacccaacacagagtgaattcaaatttgcttttggaacagcctttatctccaattaagtgcaagtatatttacactatgtgatattaaaggacttctccaatgactgggaggtactgaaccaagatgtttgtaaagaaacggtggggtgaggtggttaggtagaatataccgtcctggccatttctcttccttcaggcgagtaagcgctccttcagcagaaaggctgcggattgctggctgtgctctgtggactgggccagtaggtgtggcccaggtccaggtcctggcacctctgctgagtgcccagcctgagatgacacatgccatcctggagagaagcagagagggtgctgtctccaggcgttctccagacagcctgggcctggcttgctgagccagctgcaggaggggatctcctgactggggcttgggaccagatctgctgcagagaggcaataactctgtctaaaaagaaaacttgtcccgtgtgattacaaaaacaggaaaaggctccaagctaggaaatgagatttgaggtatggagaacattctcacctgatggaagcatcctgttcctgtacaggaggaggagctggtgcaagccctaggccacatatgtcacagttgttttggaccctccgtagcttttatactcataaaatattaaagttgcccctttcatatttgggtcattgaaagagcccaccgtactctaggttcctgctcactatgcacaacatctcagaagatggcgtacaaaactatttttctaactatagcacaggtaatgtgggggtggggaggcttgggatatacctaaatgtggcaaatgatttatcttccaccttgagggatgaaaaggaaactatgcacttgaattttaattaaaattttaatttaattcattggatagcttgtgccagaaagaacagtcaatattcaagaagcaaaactgacgattagctcagtttcgggcctccctgtcgggggagttttcttgtctggaacacaaacacctacaagtagagtgtgagctggttcttgacaatcagatctcatcaaccctttgaaatgttctgggcagcacagctccttggtctgcatggttggtgtaagtataatcaagtagtgaaattgtatggtatatacctatatgccaacagtgtacacccgtatgtgcagaatttgctaatataaccatttcaataaaaacctattgaaaaagctgatttgaccacatggagtattgttggtggtgacgtgtatcactgaggactctcttggttacaaatgacagaaaacccagccaaaactggctaacacaaaaggggaatgtcatggctcccaaaagccaaaatgcccaggggtgcctatgtcaggcttggtgtgatttcaccctcaaatgctgacaccaagacacatgccaactttg

SEQ ID NO: 850 - DNA, 5061 bp, Homo sapiens
cgagattactgaattttacaagcttgacattttctattggctttataagctcttctcatgtttttattaccctcacatccaatccgttcgagctacacgctaaatcaaattggtattttatatttttatttttttagaggcaggatctcgctctgtcacccaggcaggagtgcagtggcacagtcatggctcgctgcagccttgacctcgcctcagcctccccagtagctgggaccacaggctcatgccacgcacgcccggctgaagctagttttaactgaagaaaactcaaagtgttctctcgccgttaacctttattattgaggcattggctctgctataggaaaacgaggtgacgttaatgtcggtggttgacattaaccactggcaagtgacagtgtggctccttgacaagtggttgctgctcataaatgtcatgaaacaaaaacactgattttagagaagtgggattctacagttaatatcgccagcaaacttttattaagctctcactctgtgcccaaacatgcttgaagttggggtgaatctgtgaccattaagatgttggctgttcatgggcacgttatcaagcaactggggtgtgagagcgaatgataagagggtgaatctggatgaggagggacttccagggcacaggtggaggagaggcattgcagccatagagaggcccaagggaacagtcaagacaaggcggggacagtggccaggaggcgagggcagcacttcctgggcagggaaggcttgccagggagaccagactcctgtctctgtttggaaagaaaaggaaccgcactgggggtcagggaggctaggcacggcaccagcctgggatgccagtcccgcctgaggggccaaggcaaaggggaagcattcacagaccccacaccaggctctgacgccaagtggaagaagagggagatagaagcagaagcctgggcttccaggcctggttcctgggcgggtgttgatgggacccagggagagtcctgtggggatactttgggtctgggctggcaggggctctggaaggagaggcatggaggtgcgaacctggtgcccaggtggaggtgcagtgggggtaaggtggccaggctgcagacccctgcatcagaatgcctgcgaagctgtgggtttattgtttgtttgtttgttttatttcgagacagggtgtcactctgtcgcccagactggagtgcagtagcgccgtctcggctcactgcaagctccgcctcccaggatcaagtgattctcctgcctcagcctcccgagtagctggatttacagatgcatgccaccacgcccagctaattttttgtatttttagtagaaacgaggtttcaccacgttggccaggctggtctcaaactcctgacctcaaatgatccacctgcctcgtcctcccaagtgctggaattacaggtgtgagccgcaccagcctgttttttaattttatttagagacagggtctcactctgttgcccagactggagtgcagtggtgtaatcttggctcactgcagcctcaacttccagcgctaaagcaatcctcccacctctgcctcccgagtaactgggactacacacgcatgccactacacccaggtaatttttaaaaattttttttagagacagagcttctccatgttgcccaggctagcctcaaactcctgggctccagtgaccctcccgccttagtgtctcaaagtgctgggattacaggtatgagccaccacgcccggtcagaagctgtgtttttaagtggacataccatcttgtcctgctgaagtatctccatgtaatcacaatatctatgtcacccaaatctcctccttcctcctccctcccccaaaacacccccacaggcatgcataccctcccatgcgctggaggcagaatctcccaaggggagctggccaggagaggtgtccctgagttcagatggaggtggaagccagagtggggctgggaccacccagtgacatgaggatggggcttgggataaagccctggggacactgacatttaaagtgtggacagaaggagctactgaaggcaatggatttagaaaagcaattgagtatgatttccttcttcaagaaaggctgtccaactagctctcacttcctctcgtgtgttcagtgtcacccggaagcagagtttaatgtgactaaagtcaacattggctcacactgtcagggagtgtgggaagatgagtaaggactcatcgcagggcgatacccacagcttaaaataggcaccttcccctcccaggtctggttagggcagttgttacatatgaggggcgtggagttttgtcttgtattttggccttgttggtaaagcattccaaagcttcgacacaccctcctttcagcccattaggaaaggctgttgattgtaatattcacacagctccctgggctatggttaagagccttgcagaaggactgggagaagccctgtgtgtttgaagtattgtagcatcagaaaaaaacaccggaagaaggcaggtggggacaaggtgcctatgtctgctccttggaattcctttccttactgtccgaggcaactacagggaaagcaaagcgtgagcccccaaatccacacctgggaggaacgttcccctttgcaaggcatgggactggctggccctgtgtctcacgggggctctgagttttgaggtcacactagcctcctgaggcctggctgagagggctgggttgggggtcaggaggccccctgtagccacgaagctcctctggggcattgttaaaggttcaccctcttttttgtgggtatcctggaagatctcaagaaactgagcttggaagaagagaggctgagagggtctcccgccgcctgcgttctctgcagctatggccccacagcctccagtgaccatggaggggaaggtgccacccgccttggctgctgaaagggtgatgctcttatgcctgagtcttggctcctgtggtcctgcagagaccctgtgggggccgcccggtcgtcacctgcactcatcttgggttttccttccttttccaccctaagctgaaggtatttttttcctgttttcttcactctaacttggggaagaaggaagatcctttatggaaaagaaaaaaaaaaaagcacctttgaacgtcctgcaacttgagtttcaagctttcagaaggattcggtgctgctggcctgctcagacctccgcctgggctgtggagttcctcctgttggcccctcctctctgtaccacaaaagctctaggcggcccagccacccctgtgaaagcggcgcccgtagccagacgccaaggctgccgtcccgagccgagggtggcaccttgcccagcgcacgtgcattctcctgtgggaactcggagggcatgtggtgagcagtctcctgtcagttgaggtggaggctcccggcccatctttgctctcctcaggctgcccagctcctggcggcacatggtggcctggcaaagctgacttggcctcctcagttccccacccatccgcggatcatcgccttccctagccacctctctctatagccaccgacatctgcggagcgtcacagactggttctgagctgtggtttacaaattcaacccaacacagagtgaattcaaatttgcttttggaacagcctttatctccaattaagtgcaagtatatttacactatgtgatattaaaggacttctccaatgactgggaggtactgaaccaagatgtttgtaaagaaacggtggggtgaggtggttaggtagaatataccgtcctggccatttctcttccttcaggcgagtaagcgctccttcagcagaaaggctgcggattgctggctgtgctctgtggactgggccagtaggtgtggcccaggtccaggtcctggcacctctgctgagtgcccagcctgagatgacacatgccatcctggagagaagcagagagggtgctgtctccaggcgttctccagacagcctgggcctggcttgctgagccagctgcaggaggggatctcctgactggggcttgggaccagatctgctgcagagaggcaataactctgtctaaaaagaaaacttgtcccgtgtgattacaaaaacaggaaaaggctccaagctaggaaatgagatttgaggtatggagaacattctcacctgatggaagcatcctgttcctgtacaggaggaggagctggtgcaagccctaggccacatatgtcacagttgttttggaccctccgtagcttttatactcataaaatattaaagttgcccctttcatatttgggtcattgaaagagcccaccgtactctaggttcctgctcactatgcacaacatctcagaagatggcgtacaaaactatttttctaactatagcacaggtaatgtgggggtggggaggcttgggatatacctaaatgtggcaaatgatttatcttccaccttgagggatgaaaaggaaactatgcacttgaattttaattaaaattttaatttaattcattggatagcttgtgccagaaagaacagtcaatattcaagaagcaaaactgacgattagctcagtttcgggcctccctgtcgggggagttttcttgtctggaacacaaacacctacaagtagagtgtgagctggttcttgacaatcagatctcatcaaccctttgaaatgttctgggcagcacagctccttggtctgcatggttggtgtaagtataatcaagtagtgaaattgtatggtatatacctatatgccaacagtgtacacccgtatgtgcagaatttgctaatataaccatttcaataaaaacctattgaaaaagctgatttgaccacatggagtattgttggtggtgacgtgtatcactgaggactctcttggttacaaatgacagaaaacccagccaaaactggctaacacaaaaggggaatgtcatggctcccaaaagccaaaatgcccaggggtgcctatgtcaggcttggtgtgatttcaccctcaaatgctgacaccaagacacatgccaactttg

SEQ ID NO: 851 - DNA, 5063 bp, Homo sapiens
cgagattactgaattttacaagcttgacattttctattggctttataagctcttctcatgtttttattaccctcacatccaatccgttcgagctacacgctaaatcaaattggtattttatatttttatttttttagaggcaggatctcgctctgtcacccaggcaggagtgcagtggcacagtcatggctcgctgcagccttgacctcgcctcagcctccccagtagctgggaccacaggctcatgccacgcacgcccggctgaagctagttttaactgaagaaaactcaaagtgttctctcgccgttaacctttattattgaggcattggctctgctataggaaaacgaggtgacgttaatgtcggtggttgacattaaccactggcaagtgacagtgtggctccttgacaagtggttgctgctcataaatgtcatgaaacaaaaacactgattttagagaagtgggattctacagttaatatcgccagcaaacttttattaagctctcactctgtgccaaacacatgcttgaagttggggtgaatccgtgaccattaagatgttggctgttcatgggcacgttatcaagcaactggggtgtgagagcgaatgataagagggtgaatctggatgaggagggacttccagggcacaggtggaggagaggcattgcagccatagagaggcccaagggaacagtcaagacaaggcggggacagtggccaggaggcgagggcagcacttcctgggcagggaaggcttgccagggagaccagactcctgtctctgtttggaaagaaaaggaaccgcactgggggtcagggaggttaggcacggcaccagcctgggatgccagtcccgcctgaggggccaaggcaaaggggaagcattcacagaccccacaccaggctctgacgccaagtggaagaagagggagatagaagcagaagcctgggcttccaggcctggttcctgggcgggtgttgatgggacccagggagagtcctgtggggatactttgggtctgggctggcaggggctctggaaggagaggcatggaggtgcgaacctggtgcccaggtggaggtgcagtgggggtaaggtggccaggctgcagacccctgcatcagaatgcctgcgaagctgtgggttttttgtttgtttgtttgttttatttcgagacagggtgtcactctgtcgcccagactggagtgcaggagcgccgtctcggctcactgcaagctccgcctcccaggatcaagtgattctcctgcctcagcctcccgagtagctggatttacagatgcatgccaccacgcccagctaattttttgtatttttagtagaaacgaggtttcaccacgttggccaggctggtctcaaactcctgacctcaaatgatccacctgcctcgtcctcccaaagtgctggaattacaggtgtgagccgcaccagcctgttttttaattttatttagagacagggtctcactctgttgcccagactggagtgcagtggtgtaatcttggctcactgcagcctcaacttccagcgctaaagcaatcctcccacctctgcctcccgagtaactgggactacacacgcatgccactacacccaggtaatttttaaaaattttttttagagacagagcttctccatgttgcccaggctagcctcaaactcctgggctccagtgaccctcccgccttagtgtctcaaagtgctgggattacaggtatgagccaccacgcccggtcagaagctgtgtttttaagtggacataccatcttgtcctgctgaagtatctccatgtaatcacaatatctatgtcacccaaatctcctccttcctcctccctcccccaaaacacccccacaggcatgcataccctcccatgcgctggaggcagaatctcccaaggggagctggccaggagaggtgtccctgagttcagatggaggtggaagccagagtggggctgggaccacccagtgacatgaggatggggcttgggataaagccctggggacactgacatttaaagtgtggacagaaggagctactgaaggcaatggatttagaaaagcaattgagtatgatttccttcttcaagaaaggctgtccaactagctctcacttcctctcgtgtgttcagtgtcacccggaagcagagtttaatgtgactaaagtcaacattggctcacactgtcagggagtgtgggaagatgagtaaggactcatcgcagggcgatacccacagcttaaaataggcaccttcccctcccaggtctggttagggcagttgttacatatgaggggcgtggagttttgtcttgtattttggccttgttggtaaagcattccaaagcttcgacacaccctcctttcagcccattaggaaaggctgttgattgtaatattcacacagctccctgggctatggttaagagccttgcagaaggactgggagaagccctgtgtgtttgaagtattgtagcatcagaaaaaaacaccggaagaaggcaggtggggacaaggtgcctatgtctgctccttggaattcctttccttactgtccgaggcaactacagggaaagcaaagcgtgagcccccaaatccacacctgggaggaacgttcccctttgcaaggcatgggactggctggccctgtgtctcacgggggctctgagttttgaggtcacactagcctcctgaggcctggctgagagggctgggttgggggtcaggaggccccctgtagccacgaagctcctctggggcattgttaaaggttcaccctcttttttgtgggtatcctggaagatctcaagaaactgagcttggaagaagagaggctgagagggtctcccgccgcctgcgttctctgcagctatggccccacagcctccagtgaccatggaggggaaggtgccacccgccttggctgctgaaagggtgatgctcttatgcctgagtcttggctcctgtggtcctgcagagaccctgtgggggccgcccggtcgtcacctgcactcatcttgggttttccttccttttccaccctaagctgaaggtatttttttcctgttttcttcactctaacttggggaagaaggaagatcctttatggaaaagaaaaaaaaaaaagcacctttgaacgtcctgcaacttgagtttcaagctttcagaaggattcggtgctgctggcctgctcagacctccgcctgggctgtggagttcctcctgttggcccctcctctctgtaccacaaaagctctaggcggcccagccacccctgtgaaagcggcgcccgtagccagacgccaaggctgccgtcccgagccgagggtggcaccttgcccagcgcgcgtgcattctcctgtgggaactcggagggcatgtggtgagcagtctcctgtcagttgaggtggaggctcccggcccatctttgctctcctcaggctgcccagctcctggcggcacatggtggcctggcaaagctgacttggcctcctcagttccccacccatccgcggatcatcgccttccctagccacctctctctatagccaccgacatctgcggagcgtcacagactggttctgagctgtggtttacaaattcaacccaacacagagtgaattcaaatttgcttttggaacagcctttatctccaattaagtgcaagtatatttacactatgtgatattaaaggacttctccaatgactgggaggtactgaaccaagatgtttgtaaagaaacggtggggtgaggtggttaggtagaatataccgtcctggccatttctcttccttcaggcgagtaagcgctccttcagcagaaaggctgcggattgctggctgtgctctgtggactgggccagtaggtgtggcccaggtccaggtcctggcacctctgctgagtgcccagcctgagatgacacatgccatcctggagagaagcagagagggtgctgtctccaggcgttctccagacagcctgggcctggcttgctgagccagctgcaggaggggatctcctgactggggcttgggaccagatctgctgcagagaggcaataactctgtctaaaaagaaaacttgtcccgtgtgattacaaaaacaggaaaaggctccaagctaggaaatgagatttgaggtatggagaacattctcacctgatggaagcatcctgttcctgtacaggaggaggagctggtgcaagccctaggccacatatgtcacagttgttttggaccctccgtagcttttatactcataaaatattaaagttgcccctttcatatttgggtcattgaaagagcccaccgtactctaggttcctgctcactatgcacaacatctcagaagatggcgtacaaaactatttttctaactatagcacgggtaatgtgggggtggggaggcttgggatatacctaaatgtggcaaatgatttatcttccaccttgagggatgaaaaggaaactatgcacttgaattttaattaaaattttaatttaattcattggatagcttgtgccagaaagaacagtcaatattcaagaagcaaaactgacgattagctcagtttcgggcctccctgtcgggggagttttcttgtctggaacacaaacacctacaagtagagtgtgagctggttcttgacaatcagatctcatcaaccctttgaaatgttctgggcagcacagctccttggtctgcatggttggtgtaagtataatcaagtagtgaaattgtatggtatatacctatatgccaacagtgtacacccgtatgtgcagaatttgctaatataaccatttcaataaaaacctattgaaaaagctgatttgaccacatggagtattgttggtggtgacgtgtatcactgaggactctcttggttacaaatgacagaaaacccagccaaaactggctaacacaaaaggggaatgtcatggctcccaaaagccaaaatgcccaggggtgcctatgtcaggcttggtgtgatttcaccctcaaatgctgacaccaagacacatgccaactttg

SEQ ID NO: 852 - DNA, 133 bp, Homo sapiens
ttttttttttttgagacggagtctcactctgctgcccaggctgaagttgcagtggcgtgatctcggctcactgcaacctccacctcccgggttcaagcaattctcctgcctcagcctcccgagtagctgggac

SEQ ID NO: 853 - DNA, 282 bp, Homo sapiens
cgctttggtgattttttttttttttgagacggagtcttgctctgtcacccaggctggagtgcagtggcgcgatcttggctcactgcaacttccgcctcccgggttcacaccatcctcctgcctcagcctcccgagcagctgggactacaggcacctgccacgacgcccagctaattttttgtatttttagtagagatggggttttactgtgttagccaggctggtctcgatctcctgacctcgtgatccgcctgccttggcctcccaaagtgctgggattac

SEQ ID NO: 854 - DNA, 133 bp, Homo sapiens; identical to SEQ ID NO: 852

SEQ ID NO: 855 - DNA, 246 bp, Homo sapiens
ttttttttttttttgagacggagtcttgctctgtcacccaggctggagtgcagtggcgcgatcttggctcactgcaacttccgcctcccgggttcacaccatcctcctgcctcagcctcccgagcagctgggactacaggcacctgccacgacgcccagctaattttttgtatttttagtagagatggggttttactgtgttagccaggctggtctcgatctcctgacctcgtgatccgcctgcct

SEQ ID NO: 856 - DNA, 115 bp, Homo sapiens
tttttgtatttttagtagagacggggtttcaccgtgttagccaggatggtcttgatctcctaaccttgtgatctgcccacctcggcctcccaaagtgctggggttacaggcgtga

SEQ ID NO: 857 - DNA, 18367 bp, Homo sapiens
cttatttgcaggtggactggcagaggaagtggacgacaaagttcttcatgctgcgttcattccttttggagacatcacagatattcagattcctctggattatgaaacaggtgagttagtgtctctcacgttcagaatcctcttactaggaaaataccttaaaaaattaaagtcacatcacaattctaaatatgcattctaaatatggttagtatacactacaggtaagttcaggaaggtgtctggtgacagtgatctcgatggagaaggaatgttctgaggccatgtggttgtgaactctgaatactttccagagtcttcagctgttgggttgagataagacagatttttcaatagaccagtagggagataggtttgaactacattgagatttgaatgttgttttaatctacctgatgggtaccccatcccacctgcaccttcttgcagctgtgctattaaatgaggcagcgggaaagcctagccccataatgggggtgggtgagggcgggggttcttggcctctgcacccctgggtgggtttcccatcgattggtatcacaaccacagttcagttttctgtttacctttgttgtcatttttaagattatagttttaggcctagttttatcatcaaccttgcatatgattgttagcaaagtctttaaactctctgggcctgggaaatctttatttgcaaaatgataaggttatgttggctttctaagggccttctagtctctgagttctatgataaacattattgtgcttggtctttctagttagttcagcattttcctgaagataaagactgagcatctttatcaggttttaggattcatgctttatgcacagttgatgcgcaaaatatatatttagatagataattgataggtcaaatgactttatttttctaattgctttgcatgcaatggttaaggttttaagtttggctttcgtagaataattgaatacttatcaattaaaaatacagtttactattcagctatgtccattaaaaaaacaaagtttattattgcttaaaatattgtataagaagaatcaagaatgagattccttcttcctaaatagtgattggatagaacttctggtgtttggatacgacatgtaactgacttcactttgtgaccatcctgtttcttcccactaccccacatagtaattacttgtttttgtttttccattttgtagaaaagcaccgaggatttgcttttgttgaatttgagttggcagaggtgagagtctgtgttactagtgtctagtccttggtttgtgatgttgttactgattacaaaggaagcttttcaccatttggttaggtttttgggccttaggctgatgcttccagagagatcagaagtaagtgctgttctaaggaaagcgtctctcacataatcagactggactgtgaataacatgtcagacctgccaggccctcccattcttgccctgcagaggagctagctcatgcacccctgttcattgagcattcttgcctggaagtagtgattatttcttgtgccttcaactagatggcaaattgttgcaccaccagctctaaaatcagccaggaagtgctctttgttagaaacacacaaaacctaggcaagaaatacagaggtggcatttttctggatttttgctactgagcatgtgtttagacaccataagaagcatttggctgcaagcctaaacttgtacctttgtctttccttggcaggatgctgcagcagctatcgacaacatggtatggctgggaatcttaattctaactaaagttgctttttggtggtacagaggctccttattcatatatcagtgttctggacttccaaagttacaaggttgcatggggaggtaaaaattctcacatgaaaatattcactgtgaattgatcacttataaaattagttcttactcagactccttcgccatttcagaataatgtaagtcctcatcatccttgttgaccagtctctcactggctctcccatgtttaggataatttgcagacacagtgcaaattgattgcacggtgtaactgcatattttgcaaaatagcaggatttcatgaagtgttagaccaatttacaattgagaagagaaatttaattatggcaggtgcaaatcactgatacaaatgatttggatattctggaaaggtccttgggaaaaatgatgatgctctttagtatttgtgccttccttgagatccttttagttttcatgtctgataagaagtgcaaagataccatactgttgatagaattttgttggaaaaataatacttcagtgcctgttacttttctttctttctttttttttttttttttttttttaacaatcttgaactcatgagttcaagacttctcagcttctcaagtagctggaattacaggctcaagccaacagggctacctgggctacctgttacatttctttctaccaagttacatttctttctaccgattagtgcatagttagtcctgaatattaatggtaagaaacttgtttttattatttttagtttcatcacagtaatttcccagtcagccttttaaaatttttcaattttaccacgaaatcttcatcaccacttcaagtggagtcaccttaaatgacctttcctggtaccgattatctttggataatgagatgttgttttatttgttgttctgttatccattcaccaaacatattcatcagctgtcagagatcatttttctttcatttcaaagcttatcttgacttttgaaggtgaactcaaatactgggaaactgcatttatttttgtaattttggagtgttctgaacccagagttacttttggtaatacaggtctttgtgtgctgctatgaaagaaaggggtgtgagttccctgaaacccacaggtggctttggggtggctgcatagcttactggtagaggcccagggattaagggaggacaaatcatgagtgtgtctcagaagtatatggaaagctggctggccctcttttaacctaagagagtttaagcagctggattttcaatcttttcagaatgaatctgagctttttggacgtacaattcgtgtcaatttggccaaaccaatgagaattaaggaaggctcttccaggccaggtgagtaggagcaacttccagattccctgtgatgttctgcagtttggccttagttgcattttttgtctctatttacttggaagtagatgctaaatgctgcttcctggtagataggagtagatgatggttcacattgggaagggcatgcaccacctttttagagaaacaagtgagtttgagcttctcagcaaagccaaagtgattgtttctgttatgagagaaattcctgcctgagctcatctttcccagttttcttgatattccattcctggggtctccatcaagggctgaaatcagcaaaggctacacctttgctttcggcatagctattttccttagccctactgagagctggacttcagggcctacattctggatgggaactttccttacccctgggagttctcagtggggaattgtctggcatacaggccacatagcatcttccactttgctgaccaaagcagctacttttcagttcaagctgacagcttgaatgaacatttgtttgattctttcctttcagtttggtcagatgatgactggttgaagaagttttctgggaagacgcttgaagagaataaagaggaagaagggtcagagcctcccaaagcagagacccaggaggtgagaatgaagctcctgcttccagagcacaggccggcgctgtccacaggagacttttttttttaagttttaatggaaatttgccaatatgtatatcaaagtggagggaatgaataatgaattcttagtactttggtaaagtcaatattgagttcttagtactttggtaaagtcaatatcgagtgaattcaagggcgaaactttgggtctcttgtccatgttgtgttctatgtgatgagtgtctcagctctgctcaggtatggatttgtgattatcaactgacagggaggaagctgaggtgcccctcttcacccctcctgatcagtccccctccttcactgaagagtttgccacaagggtcgtggtcttcctattcctgtgctaatggaggggagacagaatagggtagtgtcccttccttcaacctgtacatgggttcagggttctccagtcctacgggaacctgctggggcacttccccctgattctcagcatagtctctgacagttgcttcctgggcgtcccctcctctgagtactttgtgaatgttgtcattcttctgtatttctttcttggctcatggtttctctctcttctctcagctgaaacagtagcagtctatctctagttttatgcagcctctgttatgctgttgatcttcatggtctctttctagtcctgagcttcagatatttctgcctgcaagtctcatgggcagcttaagtttgcctaaaatggattctcccgcttctctaatcctgtcttcctgtgttctcaatcttggctaatttgccaccattcatccacacattgacccacgccagaaatttgaatgcaaatcagaactcataaagtggccatcacagtcagtggagtccccctggatcatcctgtatcctctgcttagtcttacctacttggagcacaatgcaaggcccaacatcttccactgtcttctgagcacttaggcctgagcaagagggctgcccccttgcttccatgtagttagccagtgtatatgcagggccaggcacagagggacgaggtggtacatggatgggtctgcctaactagaggacagtgggtgggctggaactggcatttgaagatactgagagttgtggatcatggaccagaaaagtgctgttctgtgactgtgaagcaagaggaggaagcagatgcatctgagggcaagcatgatgagataacacccccgtgtgtgaggctcaggttagccagtgctgagacctcctgtcgctgggcatccagctgggtgctacggccatggctcctgcctcctgcagccctatcagggcccaaggccttccccgtcagcacttgctccagcctacgcactggagttgtgttctgggtgggtgtgtagaatactcgcactcctacttagggcgtcagggagctctctctaactagcaatttcttctgcacctagggagagcccattgctaaaaaggcccgctcaaatcctcaggtgtacatggacatcaagattgggaacaagccggctggccgcatccagatgctcctgcgttctgatgtcgtgcccatgacagcaggtgagcaggacgctgtggtcagaacggcgggacgctggtggctgagcagtgagcctttcccaggttcttactgcttcacttcttgtgtccttgatattgcttctgacctaagttgatttgaggcatctcagatcctgggatctagtaacagataagtcagagcaggtgtttttgaagctttataagtgctggcttactgttttttaatcgttttttaaaaatacaagtaaataatgtattcttttttttaaagaatagcatatacatatattccaataatatttaagacaataaattgaaaattcattttcccctctctacatccagtcctcaattctagaagtaactagtgcttttattgagtattctttgtaatttattaaatattgacttctattctctttttaatctaaattttattatctagacatataaagagtcaattcagtttcacaaagcttgttttgaaaaaacagtcgtcccctggtgctgtccctgtgccctgctgccaacaccatttgctgctcctcagaggagcggatttcaactcttaggtgttttggtttttatttccatgttgataacagttttatatttctacttcctgttttccattttaaacattatcttctgattttctacttcagagaacaaagaattagttttttaaaatccccttccctgccccctcatcttccctgtataggtaccataattttggttaggtcctaagttattttaacaatgtaagcatcatgtgataacctcctttcatgcacagcattttgttttgcctggaattgataattgccttgtttttgcatagttttctgtgtaatcattcctgattttctcccagaccatcctgctgggggttttgcatccaggtgtctgcatcttgttaaggggagatgagggcaaggctgaattcctcaacattcagtatataaactttcacataatctccatttgtcattatggtacctcagccctcactatgcgtaggatgtcctagtccagagaccctctgctttaacctaccaaagactagacccccagctggctaccaggttggggaggggtggcccccagctgcagagtcagggaaaggatcccaaagattaaccactttcttaaatgggctttcagccaaacttactgtctccaggattacctgcaccctttcctctgagcttttggagtgcaaattgagttgcttcttggcttttaccagcttaagattcagctttctcgggtctgctatatcatttaggactcatctattttgttttctaacttcagaaattttgttgctgttgtctcttcctccctgctttttaagtttattttttggctattttagccactttaaagtgtttgttagcagtaattactctgttcgaaatttttgaatcatcctaaacaaaaccacttattaaaggtacctattaaataataactccccattttctcctccccttagcttctgataacctctaatctttgtgtctatgaattggcctatcctagatttttcatgtaagtggaatcatacaatagctgtccttttccacgccttgttgattttgcatagcataatgctttcaaggttcatccttgtaccatgtatcagtgcctcattcctttttgtggctgaataatattccgttgtatttggataaatatcttgttcattcatttgttgatgggcacttgcacattgttttcaccttttgactattgtaaatgcctgtgtgaatatccacatgtaagtatatgtttaaattcctgttttcaattcttttggatatatatgcctaggaatggaaatgcttagtcatatggtaactctgtatttaactttttgaggaaatgccaaactattttccacagtggctggaccattttacatttctaccagcaatgtatgagtgtttcagtttttccacatcttctctttttttttttttttttttttttttgagacagagtctcgcactgttgcccgggctggagtacagtggcgtgatattggctcactgcaacctccgcctcccaggttcaagtgattcttgtgcctcagcctcccgagtagctgggattacaggcgtctgccaccatgcccagccaattttttgtatttttagtagagacgaggtttcaccatgttggttggccaggctggtctcaaactcctgacctcatgattcgcctgcctcggcctcccatagtgctgggattacaggcgtgagccaccatgcctggcccacatcttctcttaacaggtgtgacatggcatctcattgtggtttttatttttattccctactgactaatgatgttgaacatcttttcatgtgcttgttgaccatttgtatatcttctttggagaaacatcttttcaaatctttggcttatttattaactggattgtttgttttgttttttttaagagacagggtcttgctctgactcccaggctggagtgcagtggtgagaacatggcttactgtagctttgaacccttgacctccagtgatcctcctgccttgacctcccaaagcactgggattacaccgtgcctggccattttgttgttgaattataggagttcattatatattctggatattaaacccatgttaaatatgatttgcaaataagcattctcctgttctgtgggttgctttgccctctattggtacggttctttgatgcacgtcttaaattttgataaaatctaattatttttttctttcacctctgcttttggtgtgacatttaagaaaccatcaccaaatccagagtcatgaagatttgcccctatgttttcttctaagatcctttggtttttcttttaaaaaatcagtttcctaccaatttagtgtggttttaaaagggaacagagctcgaacatgtatattcaatcccccttcaacagaatctcctatagtcctggccaggtgtggtggtttacacctgtaatcccagcactttgggaggccaaggtgggcggatcatctgaggtaggagttctagaccagcttggccaacatagtgaaaccccatctctactaaaaatacaaaattagccaggtgtatggtacatgcctgtagtcccagctactcaagaggctgaggcaggggaatgacttgaacccaagaggtggaagttgcagtgaactgagattgtgccattgcactgcagcatgggcaacaagagtgaaactccgtctcaaggaaaaagaatcccttatagtccttacaaggttagtatcacaaaggtttataatgagtatctcttattttaaaacaaaaatatgaacactaaaccaaagttttttcgaggttttttattttgtcctattttttaaccccagcgctttttcctttctcaattccagagaatttccgctgcctgtgcactcatgaaaagggctttggctttaagggaagcagcttccaccgcatcatcccccagttcatgtgccagggcggtgatttcacaaaccacaatggcactgggggcaagtccatctatgggaagaagttcgatgatgaaaactttatcctcaagcatacgggaccaggtaggagccagttggcatgtggtgacgagggaggctgggcaagggtgggatggccaggcaggatggaaggacaggttgtagttctggctggcggacactaagagtctggaggagacccagccaccagacataggagaaccatgcagccttgctagggtggagttggcttgttgacattcaggtactgttcatcccccaaccgtgtccacaattcctattagccccgcttggattctgtggtctgctgttgcaggctcttatgctctcaaccccactgctctccctgccctcaccatcagatttactcagtaaaatctcggtggttagtcccccagcaactagagaaaaaacacagaattgtactgaacaatcccacttgaaatttataactatagttcttaaggggacccttgccaacctgaccagatttccctacttgatgctcagtcccaaccggagatgatgtgtccatgcccgtcttcacttctgaagccctcatatcatcaccttcccacctcatctaatgcttcacctcctgcatctctccactcgtgcatgctctttcttccaattacaggggatgagctgtctctcctaggccagcctctccacctgtggactggatcctgtccctctcctctacttaggaacatggcttctaaagttgtccccttcttgtaatccatttcccctgctctgctagatcagtccattagcatgaaagcatgcagttatcaacctttaaaaaaaatcttcatccggttgccgggtgcagtggcttagtcctgtaatcccagcattttgggaggcagaggcaggcggatcacctgaggtcaggagttggaggccagcctaactaacatggagaaaccccatctctactaaaaatataaaattagccgggcgtggtggcgcgtgcctgtaatcctagctgctcggaaggctgaggcaggagaatcacttgaacctgggaggcggaggttgtgatgagccaagatcgcaccattgcactccagcctgggcaacaagagcgaaactccgtctcggaaaaaaaaaaacaaacttcatccttgtactcttgttccctctccagctatcacccatgcccctggtcccccatcttttttcaagaagtaaaagcataacttcttgaaaacatggtacagacttgctgccttcgcgttttctctaatcccttctaggcagacttctagtcccatctcgccattgaaaccactcttgccaaaaatacgagtagccagttcttggcgatcatcttatcccacctcccagatgttatcccacctcccaggagcatttcatactacaggttgagtgtccctttcctgaaatgcttgggaccagaagtattttgtattttggaatatttgcattatacttaccagttgagcatcccaaatctgaatatctcaaatctgaaatgctcgagtgagcagttcctttgagtatcatatcagtgctcgtgaagtttcagattttggggcattttggattttggattttcacatttgggatgctcagcctgtactaactctgttctccttgactccttcttcacttggctggcaggactcctgcctcttcttgtctccttttacctagatggctgctttttctgtctttgctgtctccttcttttcctgacccttaaacactgaagtggctcagagcccattctttggttctccagaagcctgttaccctgtgctccgtttttctaactggtggtttgtagggcccctctttactatactgaactgacatgtgtaggtgatatagcccactgacccacatcgttattttaaaaatcagtattcatctgtaactataatagggaagaacatcagaggaaataaacgaatttgtataatactcgaatatgtttccagatgtacatgcttaagcacagctgtgtcagaacacaaagtgaattattcaggcgtctgcccctgtactcaaacgcagcagttagaaatgcagacgggagtgtcaactggataccactaggagtgatgctattggtgatacggctttgtgaaatggtagataaagttgattagagtccaaagtaaagaataatctgtttatttacatagtagttacattcctagaagattccatggaaaatcaaaagcactccaaaactttgggcttatatgtataatggaattatgttttaggtgcagataactgtaaacacattttttacctataccaatatctggcaggatatttgttgttttgttgttgtttggtttttgtttttttgagacagggtctctttctgttgctcaggctggagtgcagtggtgcaagacggctcactgcagcctcaacctctccagctcaagcagtcctgcctcagcctcccaaatagctgggattataggtgcacgccatccataatgccaggctaatttttaagttttttgtagagacagggtttcattatattgctcaggctagtctggaactcttagcttcaagtgatcctcccacttcagcctcccagagtgctgggattacaagcattagccactgcgcccagcctctagcaggatgtttgtaagggccaagaggatatgagacaattcattgtgccagacattgcagaacatctagcattccaggcccccacctgctaaatgccagtagcacccccacaatatttcagacagtcaaaaacactttcaggccaggcacggcggctcatgcctgtaatcccaacactttgggagtctgaagtggcagcccaaagccagaggatcacgtgagttcaggagttcgagaccagcctgggcaacatagtgagaccctatatctactgaaaaaagaataaaaaaattatccaggtgtggtggtgcacgcctgtagtctcagccgcttgggagttgaggtgagaggattgcttgtgccccagagattgaggctacagtgagctgtgatgcactcctgtactcagcctgggtgacagagtgatccccatctcaaaaaaagtaaattcagatttccaaaggtttcctagggacaggacaccaaccccactgagaagcagtgccctaagcagtcacacccggtcccagggctttcagcggtatctctgagttaagtttgtgcagactggcatctgcatgctgatggctccctgagctccagactcctgtccaactgcctgcctgttgtcttcactggatatcccacgagcatctcacactttacatgtctaaaacagctcttggccttctcccctaaactcttcctcctcctcttccctgtttcaataaatgactccaccatccacttagccgcttgatcagaaacttaggagtcattgtggacacacacacacatacatacatgtacacatacacacacagacacacacatatacatgtacattctcttacgtgacaaatgtccatgttaccaggcctcactgtgtcatagctgtcattttgaatggctcttttccactgattgtgagctccaccagagcttggactatgttctgctcatcagtgttcccagggcttaacagggacctggttgtcaagtagacacttaattgttaaataaatgaattaatgaaagaacagaccagtataaagtgattgaaacacctcacttaccatttcactgactattaactgaatccaagataaggtggccgcatttgcatgtgatctgtgcatccccgagtctgagcctgactggctgaagggctgtcaacagcctgcacagacgtcctttaagggctggtagccagggttcggggagctgatggttgttctctccctcaggtctactatccatggccaactctggcccaaacaccaatggctctcagttcttcctgacatgtgacaagacagactggctggatggcaagcatgtggtgtttggagaggtcaccgaaggcctagatgtcttgcggcaaattgaggtatgtggccaggaatgggcctcctccttacccaggccctaggagcacagccctgtgtgagggctggagagtctctgtggcctgagagagatggccaggggctgtgtccagcgggaggggctgctgctgcccaggttccggggtggaagtgggcaaatgggcaggcaggggttggtatccctaaaccactgttagtctccggccttactccctcacttctattctgccacaaaggcccagggcagcaaggacgggaagccaaagcagaaggtgatcatcgccgactgtggggagtacgtgtgaggcggcactctctctgcttccccctccgctcttgaccctgcatatccaggaaggaactgccagcctcagaggaggcagcaccgagggtgcctgtttgaagcaagcagcatttgggatatgtgcccttcctcagggtctgcttggagcagctcctctgcaggcacagcctggactattcccaggcacagctgtgggcccaggagccagctcaggtgctcccctccaccatgggcaggctgtgcaaaaagccactggcttttctcagcatttgctgctgggcctctcctgggactaccagtgtggctcttacgtgttttctttgctaaaataaaccctagttcttatattgctcttcctgctagttcttgggagttgtcagagattgtgtctgtggctaagctggacctctgaggcaggctggtgagtggggagagcagagcatctttttcacagctttcatttcctcccttgggccgatccccttagatgtcaggtgatgtatcttcacaccaggcatcgatgtcagggcaacggaaattaaagactggaaagctccggtcttctgctgcctctgctcctaaacccagctgccggccttacagccagcaagtgtactctcagtggttcatttgtttatttgttcactttcaccctacagattttaaaaaatgaaatttttataactcaaagtgccttctctgtgccaagtactatgcctatttgtcaggagacaggaagccaacaaactacatgtgcctaatccagcccactgcctgtttttatgaatcaggttttattggaacacagccacgtccatttatttacatattgtccatggtggtttcttactgcagtggcagaggtgcgtaaggggctatagacacaatacaggctatggtccctgtattagggttttctagagaagcagaaccaatagggtgtgtatatatgtagaaagagatttattttaaggaactggctcaagcagtggtaggagctggcaagtctgcaatctgcacaacagaccagcaggctggagactcaggaaaaaaactgatgttgcagttcagctctgaggcagtttggaagcagaattcttcctccagtgatctcagtcttttttctcttaagaatttcaactgattggatgaggcctacccacattatggagggtaatctgctttactctctactgacttaaatattaatccatctaaaaaataggccaggcatggtggctcatgcctataattccaccactattgggaggctgaggcaggaggatcacttgagcccaggagttcaagaccagcctgggcaatgtagagacccccatctctagggggagaaaaaaaagccaggtatggtagtgcacacctatagtcccagctactcagaaggctgaggtgggaggatcgcttgaacctgggaggttgaggctgcagtcagccatggtcatgccactgtactccagcctgggtgacaagagggagaccctgtcttgaaaaaaagaaaccatcatcacagcaacatctagactagtgtttgactaaaaactggataccatggcctagccaaattgacacacaaaatagaccatcacagtcccaaggcctaaaatacttactatctgagcctttacaaaacaggattgccagccactgaagagaacaaatggtcccaccccctgctgagctcacagtctggctctcctgtgtgcagccacttcttggagctggcttctctccactccccctccagatgctggtcagccaggcggttataaagaatctcatctgctgaaggcttttagcagggactgagtcctgtagctgttggacacctcctgtgggttgggtcactcagaccattcagaatccactgagctgagcttttgcatcttggattgagatctggatgagccaggaggcaggagaggctaggtggtcctcatgaccctaggatagctcttgctgagggatggtggcattctgccctacctctggctcccatgtgccgactggactttgtgagctccagctgctacagttgactgagttcaggctccatgtagctgggatatactacatggttacccctcacccctatggagcttccaaaagagaccctccctcaaagcacagccccttctctgagtgcaaataatggccatcagaggtcagtcacaggtgttaggcaggcatctatgaagctggggatgatagcactgacttcagtgcttggacgagaaccaggagagagtgtgtagaaaaagcacagccagcctcccataaaaggacagactcctgtgacaaccttgtcactctgttcctccctgatactctggggaggtggaggccagtgggcagttctgaaagctcagcaggtttggagccattgggtgtggactcctctcccagtgttcctcctgggtgttcacagatgttattgaatgcacactggaaccctgcacaggtaaactgaggctttattggcgtgactgccaaaggtcacacagggtggtttggcagagctgggattagaagcccagcctgtctctcttcagtagtaatggagtcctgggaggtttactaggctttagcctcaatctgtggcggcagggtccacagccctggggagtgacacagtcatggtccccatgattggccaggacctgtgtggagagacacaggagacaagaccctgctcttccaggccagaagggaggggagccccagagctgggcagtggcatgccccacagcctggccacctgcttcggctacgcaccatgcagcagctgcacctggctgcctcgggaaaactctgacctctctgggaagtggagccagtggctctgtgggcgtcctttcctgcagcctggagagcaaagcggctttccctgggactgtgtggctcctgtcccaactggcctccccattccacattcccattgctggaccagcaccaggactgggcacagggcttccttttgctgattcatttcccccctaactcattcagagttgagccccatctgagtccccacatgctggccctgaaacggttacaaaggctgaaaccagggatggcaggcccaggatcagtgctgtggctgttggagtgtcctctccaacagcatgacagccgcctccaggtgctcccagcatctgttgcagtcatggcagcctcacggcaacctctgaagaaggaattatagaaccaactttttattgttgaaaatggagtcttgtagagttcagtgatgggaaactaaagtagaaaaagcacatcacaaagaaacatatatagtacagtgtgatcccaattttgtaaaaatatctgtaatatgtaagcataggtatttgtatatcttaagaaaaaaagcctagaaataaagccacaaaaatattaatagtgtgtttatttgacttgtgggactgtagtgatttgaattgtattttattttttatatatcccactttcctccaaaactgcattatttttttgagaagtgaaagacatttttgaaaaagggggtcaagtgcccatccagggttcctttcaaaaagggggccaagcagttgacctggatgggcagttcccccatgcaaattgccacccaagacacctggtgggtacagacctctctcagcaggacatgggatcccattgtctgggaacacagcaaagtttcacagccgctgccacaagtgacacttgctaggcctttaaaggctataagaatacaagtcccgccctctgagggatgccatgtgtagatggtttaggaaagagcacagctctgaaataaatacatcatcacctgcagaacacattttggtttaatggacagacatagaagtggctcaaaaataagcaaattcatttgtaataataccagcaaatacctattgttaagcatttatatgtcagacatcccaaagatttgtgtacatatttagtctttataatagctttgggaggaaagaaccaatatcatactctacaaaggaagaagcagaaccaggattcaaatctatttggcaccaaaaatctgcctcttgctacactgcctctattcctgtttctttggaccttttccagaacatgttacttccctgcctcagttagaagttagtgactacgaatcccctgctgacttggcctcaaggccagtattgcaccgcaaggaccaagactgctgggcattcctcttttgcctgttgtatgcgtcctctcttcctgtcaactgtcattgatttctcattgctgtcagtagatctgaaacaaccaccaccatcatccttccaaccctcatctggtgcaacgagataaacaggccatgccctgagcaaagaaaagggaaatggtggtatctgtgctgccagcctgggccacccactgcagatgcacatgcttggctcagcaaacggataaggattaaattcatggactttgtgttcattcacaattgtttcattgctcaagggatttttctattttatttcatttggtgactatctggatgataaaagttgctgaaagtctgatggccaactaggtagacaaagccttatgtttttccattgttctgtatgaaccaggaggatcacggctcgtattggttcctgctatgcacagcttgattaatgggtaaggtgtactccatatctacaaaccttcaggtagtttacagacattcttggtgcacccctaactatgccagatcattggctgggcactaaagatacaggtggagtaaaaaattaattgtcaaaataactggctaatttaaaatttacaattgcctagaagaccatctttgatgttaagaaggaacaattaagtaaatactaggatggcaaacaggttccataatttcattttgttgagacaacagttttgctcatgtcaccaggctgaagtgcaatgttgtgatctctgctcactgcaacctccacctcccaggttcaagcaattctgcctcagcctcctgagtagctgggattataggcatgcaccaccatgcccaggtaatcttgtatttttagtacagatggggtttcactgtgttggccaggatggtcttgaactcctgacttcaggtgatctgcctgccttggcctcccaaagtgctggggttataggtgtgagccaccatgc

SEQ ID NO: 858 - DNA, 19633 bp, Homo sapiens
gcgcgcgagcaagatggccaccaccaagcgcgtcttgtacgtgggtgagcaggaggggttgctaggcggagtctgagtgaacgcgacccccaagggtcggggcgtggggtgggacgcatctctgaaccaggaggacggcgagctgctgtcaaggccgggtctctggcggtagtgctggcgatagctctggctgtgcttaaactccttccaaggtttcccactgtcctcaggaaaaagtgcagacttcttagcagtacgcacttctccagcttctttgctttgcttcccgattcgctgggtctcccgaaaaatgacccacttgcccccaaggttcaggttatttcacacctttgggcctctgcttttgcgactcccttgcagtgaacagccttgccacacacctcaggtgcgtgaacccgagacggaatgattattctgacttcctagcccgctgagctccagcgggccccgaggagcggtaaaggagtattatggcccttcggatcctctcgttcatttgttttacaaacattcagtgcagcgacggctcagccccagcccctgccataaaggaaggagttcccagactagccagaaaaaaagtggaattacctcagtagcacacttttgataagcgctgtagtgaggatggatcatgataatatgggcctggctgcgggacaaatgacccatccatctggagaagcgagggcaaattctggatgcggcgatgccagagctgatgagcaggagttagctacgtaaccgaagcagaggcaaggccgttcactgcaagggagtcgcaaaggtgtgaaatagcctgacacttgggggcaagtgggtcattattcgggagacccaggaaattaggaagcaaagcaaaaaagctggagaggtgggtactgctaaggagtttgcactttatcctgaggacagtgggaagcctttgaaggagtgtaagcgaaaagttacgggttcaaatttgcattttcctaagatcattctagttggctttgtggagttgatggaatggaggcagggaggtcagttgtgaagctattgcagtaatcccaggactagatgagagtctgaaagaagggcgaagagaggaatatttttcataagtatgggtgggcagagatgagagggggatgtttgtttacccaaagaactgaatggaagggtcctgtcccctggctagcatgctaactgggctgcaaggacttctgcaagagtatggagatcagtggctcagaaggcccttggcttatttgcaggtggactggcagaggaagtggacgacaaagttcttcatgctgcgttcattccttttggagacatcacagatattcagattcctctggattatgaaacaggtgagttagtgtctctcacgttcagaatcctcttactaggaaaataccttaaaaaattaaagtcacatcacaattctaaatatgcattctaaatatggttagtatacactacaggtaagttcaggaaggtgtctggtgacagtgatctcgatggagaaggaatgttctgaggccatgtggttgtgaactctgaatactttccagagtcttcagctgttgggttgagataagacagatttttcaatagaccagtagggagataggtttgaactacattgagatttgaatgttgttttaatctacctgatgggtaccccatcccacctgcaccttcttgcagctgtgctattaaatgaggcagcgggaaagcctagccccataatgggggtgggtgagggcgggggttcttggcctctgcacccctgggtgggtttcccatcgattggtatcacaaccacagttcagttttctgtttacctttgttgtcatttttaagattatagttttaggcctagttttatcatcaaccttgcatatgattgttagcaaagtctttaaactctctgggcctgggaaatctttatttgcaaaatgataaggttatgttggctttctaagggccttctagtctctgagttctatgataaacattattgtgcttggtctttctagttagttcagcattttcctgaagataaagactgagcatctttatcaggttttaggattcatgctttatgcacagttgatgcgcaaaatatatatttagatagataattgataggtcaaatgactttatttttctaattgctttgcatgcaatggttaaggttttaagtttggctttcgtagaataattgaatacttatcaattaaaaatacagtttactattcagctatgtccattaaaaaaacaaagtttattattgcttaaaatattgtataagaagaatcaagaatgagattccttcttcctaaatagtgattggatagaacttctggtgtttggatacgacatgtaactgacttcactttgtgaccatcctgtttcttcccactaccccacatagtaattacttgtttttgtttttccattttgtagaaaagcaccgaggatttgcttttgttgaatttgagttggcagaggtgagagtctgtgttactagtgtctagtccttggtttgtgatgttgttactgattacaaaggaagcttttcaccatttggttaggtttttgggccttaggctgatgcttccagagagatcagaagtaagtgctgttctaaggaaagcgtctctcacataatcagactggactgtgaataacatgtcagacctgccaggccctcccattcttgccctgcagaggagctagctcatgcacccctgttcattgagcattcttgcctggaagtagtgattatttcttgtgccttcaactagatggcaaattgttgcaccaccagctctaaaatcagccaggaagtgctctttgttagaaacacacaaaacctaggcaagaaatacagaggtggcatttttctggatttttgctactgagcatgtgtttagacaccataagaagcatttggctgcaagcctaaacttgtacctttgtctttccttggcaggatgctgcagcagctatcgacaacatggtatggctgggaatcttaattctaactaaagttgctttttggtggtacagaggctccttattcatatatcagtgttctggacttccaaagttacaaggttgcatggggaggtaaaaattctcacatgaaaatattcactgtgaattgatcacttataaaattagttcttactcagactccttcgccatttcagaataatgtaagtcctcatcatccttgttgaccagtctctcactggctctcccatgtttaggataatttgcagacacagtgcaaattgattgcacggtgtaactgcatattttgcaaaatagcaggatttcatgaagtgttagaccaatttacaattgagaagagaaatttaattatggcaggtgcaaatcactgatacaaatgatttggatattctggaaaggtccttgggaaaaatgatgatgctctttagtatttgtgccttccttgagatccttttagttttcatgtctgataagaagtgcaaagataccatactgttgatagaattttgttggaaaaataatacttcagtgcctgttacttttctttccttctttttttttttttttttttttaacaatcttgaactcatgagttcaagacttctcagcttctcaagtagctggaattacaggctcaagccaacagggctacctgggctacctgttacatttctttctaccaagttacatttctttctaccgattagtgcatagttagtcctgaatattaatggtaagaaacttgtttttattatttttagtttcatcacagtaatttcccagtcagccttttaaaatttttcaattttaccacgaaatcttcatcaccacttcaagtggagtcaccttaaatgacctttcctggtaccgattatctttggataatgagatgttgttttatttgttgttctgttatccattcaccaaacatattcatcagctgtcagagatcatttttctttcatttcaaagcttatcttgacttttgaaggtgaactcaaatactgggaaactgcatttatttttgtaattttggagtgttctgaacccagagttacttttggtaatacaggtctttgtgtgctgctatgaaagaaaggggtgtgagttccctgaaacccacaggtggctttggggtggctgcatagcttactggtagaggcccagggattaagggaggacaaatcatgagtgtgtctcagaagtatatggaaagctggctggccctcttttaacctaagagagtttaagcagctggattttcaatcttttcagaatgaatctgagctttttggacgtacaattcgtgtcaatttggccaaaccaatgagaattaaggaaggctcttccaggccaggtgagtaggagcaacttccagattccctgtgatgttctgcagtttggccttagttgcattttttgtctctatttacttggaagtagatgctaaatgctgcttcctggtagataggagtagatgatggttcacattgggaagggcatgcaccacctttttagagaaacaagtgagtttgagcttctcagcaaagccaaagtgattgtttctgttatgagagaaattcctgcctgagctcatctttcccagttttcttgatattccattcctggggtctccatcaagggctgaaatcagcaaaggctacacctttgctttcggcatagctattttccttagccctactgagagctggacttcagggcctacattctggatgggaactttccttacccctgggagttctcagtggggaattgtctggcatacaggccacatagcatcttccactttgctgaccaaagcagctacttttcagttcaagctgacagcttgaatgaacatttgtttgattctttcctttcagtttggtcagatgatgactggttgaagaagttttctgggaagacgcttgaagagaataaagaggaagaagggtcagagcctcccaaagcagagacccaggaggtgagaatgaagctcctgcttccagagcacaggccggcgctgtccacaggagacttttttttttaagttttaatggaaatttgccaatatgtatatcaaagtggagggaatgaataatgaattcttagtactttggtaaagtcaatattgagttcttagtactttggtaaagtcaatatcgagtgaattcaagggcgaaactttgggtctcttgtccatgttgtgttctatgtgatgagtgtctcagctctgctcaggtatggatttgtgattatcaactgacagggaggaagctgaggtgcccctcttcacccctcctgatcagtccccctccttcactgaagagtttgccacaagggtcgtggtcttcctattcctgtgctaatggaggggagacagaatagggtagtgtcccttccttcaacctgtacatgggttcagggttctccagtcctacgggaacctgctggggcacttccccctgattctcagcatagtctctgacagttgcttcctgggcgtcccctcctctgagtactttgtgaatgttgtcattcttctgtatttctttcttggctcatggtttctctctcttctctcagctgaaacagtagcagtctatctctagttttatgcagcctctgttatgctgttgatcttcatggtctctttctagtcctgagcttcagatatttctgcctgcaagtctcatgggcagcttaagtttgcctaaaatggattctcccgcttctctaatcctgtcttcctgtgttctcaatcttggctaatttgccaccattcatccacacattgacccacgccagaaatttgaatgcaaatcagaactcataaagtggccatcacagtcagtggagtccccctggatcatcctgtatcctctgcttagtcttacctacttggagcacaatgcaaggcccaacatcttccactgtcttctgagcacttaggcctgagcaagagggctgcccccttgcttccatgtagttagccagtgtatatgcagggccaggcacagagggacgaggtggtacatggatgggtctgcctaactagaggacagtgggtgggctggaactggcatttgaagatactgagagttgtggatcatggaccagaaaagtgctgttctgtgactgtgaagcaagaggaggaagcagatgcatctgagggcaagcatgatgagataacacccccgtgtgtgaggctcaggttagccagtgctgagacctcctgtcgctgggcatccagctgggtgctacggccatggctcctgcctcctgcagccctatcagggcccaaggccttccccgtcagcacttgctccagcctacgcactggagttgtgttctgggtgggtgtgtagaatactcgcactcctacttagggcgtcagggagctctctctaactagcaatttcttctgcacctagggagagcccattgctaaaaaggcccgctcaaatcctcaggtgtacatggacatcaagattgggaacaagccggctggccgcatccagatgctcctgcgttctgatgtcgtgcccatgacagcaggtgagcaggacgctgtggtcagaacggcgggacgctggtggctgagcagtgagcctttcccaggttcttactgcttcacttcttgtgtccttgatattgcttctgacctaagttgatttgaggcatctcagatcctgggatctagtaacagataagtcagagcaggtgtttttgaagctttataagtgctggcttactgttttttaatcgttttttaaaaatacaagtaaataatgtattcttttttttaaagaatagcatatacatatattccaataatatttaagacaataaattgaaaattcattttcccctctctacatccagtcctcaattctagaagtaactagtgcttttattgagtattctttgtaatttattaaatattgacttctattctctttttaatctaaattttattatctagacatataaagagtcaattcagtttcacaaagcttgttttgaaaaaacagtcgtcccctggtgctgtccctgtgccctgctgccaacaccatttgctgctcctcagaggagcggatttcaactcttaggtgttttggtttttatttccatgttgataacagttttatatttctacttcctgttttccattttaaacattatcttctgattttctacttcagagaacaaagaattagttttttaaaatccccttccctgccccctcatcttccctgtataggtaccataattttggttaggtcctaagttattttaacaatgtaagcatcatgtgataacctcctttcatgcacagcattttgttttgcctggaattgataattgccttgtttttgcatagttttctgtgtaatcattcctgattttctcccagaccatcctgctgggggttttgcatccaggtgtctgcatcttgttaaggggagatgagggcaaggctgaattcctcaacattcagtatataaactttcacataatctccatttgtcattatggtacctcagccctcactatgcgtaggatgtcctagtccagagaccctctgctttaacctaccaaagactagacccccagctggctaccaggttggggaggggtggcccccagctgcagagtcagggaaaggatcccaaagattaaccactttcttaaatgggctttcagccaaacttactgtctccaggattacctgcaccctttcctctgagcttttggagtgcaaattgagttgcttcttggcttttaccagcttaagattcagctttctcgggtctgctatatcatttaggactcatctattttgttttctaacttcagaaattttgttgctgttgtctcttcctccctgctttttaagtttattttttggctattttagccactttaaagtgtttgttagcagtaattactctgttcgaaatttttgaatcatcctaaacaaaaccacttattaaaggtacctattaaataataactccccattttctcctccccttagcttctgataacctctaatctttgtgtctatgaattggcctatcctagatttttcatgtaagtggaatcatacaatagctgtccttttccacgccttgttgattttgcatagcataatgctttcaaggttcatccttgtaccatgtatcagtgcctcattcctttttgtggctgaataatattccgttgtatttggataaatatcttgttcattcatttgttgatgggcacttgcacattgttttcaccttttgactattgtaaatgcctgtgtgaatatccacatgtaagtatatgtttaaattcctgttttcaattcttttggatatatatgcctaggaatggaaatgcttagtcatatggtaactctgtatttaactttttgaggaaatgccaaactattttccacagtggctggaccattttacatttctaccagcaatgtatgagtgtttcagtttttccacatcttctctttttttttttttttttttttttttgagacagagtctcgcactgttgcccgggctggagtacagtggcgtgatattggctcactgcaacctccgcctcccaggttcaagtgattcttgtgcctcagcctcccgagtagctgggattacaggcgtctgccaccatgcccagccaattttttgtatttttagtagagacgaggtttcaccatgttggttggccaggctggtctcaaactcctgacctcatgattcgcctgcctcggcctcccatagtgctgggattacaggcgtgagccaccatgcctggcccacatcttctcttaacaggtgtgacatggcatctcattgtggtttttatttttattccctactgactaatgatgttgaacatcttttcatgtgcttgttgaccatttgtatatcttctttggagaaacatcttttcaaatctttggcttatttattaactggattgtttgttttgttttttttaagagacagggtcttgctctgactcccaggctggagtgcagtggtgagaacatggcttactgtagctttgaacccttgacctccagtgatcctcctgccttgacctcccaaagcactgggattacaccgtgcctggccattttgttgttgaattataggagttcattatatattctggatattaaacccatgttaaatatgatttgcaaataagcattctcctgttctgtgggttgctttgccctctattggtacggttctttgatgcacgtcttaaattttgataaaatctaattatttttttctttcacctctgcttttggtgtgacatttaagaaaccatcaccaaatccagagtcatgaagatttgcccctatgttttcttctaagatcctttggtttttcttttaaaaaatcagtttcctaccaatttagtgtggttttaaaagggaacagagctcgaacatgtatattcaatcccccttcaacagaatctcctatagtcctggccaggtgtggtggtttacacctgtaatcccagcactttgggaggccaaggtgggcggatcatctgaggtaggagttctagaccagcttggccaacatagtgaaaccccatctctactaaaaatacaaaattagccaggtgtatggtacatgcctgtagtcccagctactcaagaggctgaggcaggggaatgacttgaacccaagaggtggaagttgcagtgaactgagattgtgccattgcactgcagcatgggcaacaagagtgaaactccgtctcaaggaaaaagaatcccttatagtccttacaaggttagtatcacaaaggtttataatgagtatctcttattttaaaacaaaaatatgaacactaaaccaaagttttttcgaggttttttattttgtcctattttttaaccccagcgctttttcctttctcaattccagagaatttccgctgcctgtgcactcatgaaaagggctttggctttaagggaagcagcttccaccgcatcatcccccagttcatgtgccagggcggtgatttcacaaaccacaatggcactgggggcaagtccatctatgggaagaagttcgatgatgaaaactttatcctcaagcatacgggaccaggtaggagccagttggcatgtggtgacgagggaggctgggcaagggtgggatggccaggcaggatggaaggacaggttgtagttctggctggcggacactaagagtctggaggagacccagccaccagacataggagaaccatgcagccttgctagggtggagttggcttgttgacattcaggtactgttcatcccccaaccgtgtccacaattcctattagccccgcttggattctgtggtctgctgttgcaggctcttatgctctcaaccccactgctctccctgccctcaccatcagatttactcagtaaaatctcggtggttagtcccccagcaactagagaaaaaacacagaattgtactgaacaatcccacttgaaatttataactatagttcttaaggggacccttgccaacctgaccagatttccctacttgatgctcagtcccaaccggagatgatgtgtccatgcccgtcttcacttctgaagccctcatatcatcaccttcccacctcatctaatgcttcacctcctgcatctctccactcgtgcatgctctttcttccaattacaggggatgagctgtctctcctaggccagcctctccacctgtggactggatcctgtccctctcctctacttaggaacatggcttctaaagttgtccccttcttgtaatccatttcccctgctctgctagatcagtccattagcatgaaagcatgcagttatcaacctttaaaaaaaatcttcatccggttgccgggtgcagtggcttagtcctgtaatcccagcattttgggaggcagaggcaggcggatcacctgaggtcaggagttggaggccagcctaactaacatggagaaaccccatctctactaaaaatataaaattagccgggcttggtgggcgcgtgcctgttatcctagctgctcgaaaggctgaggcaggagaatcacttgaacctgggaggcggaggttgtgatgagccaagatcgcaccattgcactccagcctgggcaacaagagcgaaactccgtctcggaaaaaaaaaaacaaacttcatccttgtactcttgttccctctccagctatcacccatgcccctggtcccccatcttttttcaagaagtaaaagcataacttcttgaaaacatggtacagacttgctgccttcgcgttttctctaatcccttctaggcagacttctagtcccatctcgccattgaaaccactcttgccaaaaatacgagtagccagttcttggcgatcatcttatcccacctcccagatgttatcccacctcccaggagcatttcatactacaggttgagtgtccctttcctgaaatgcttgggaccagaagtattttgtattttggaatatttgcattatacttaccagttgagcatcccaaatctgaatatctcaaatctgaaatgctcgagtgagcagttcctttgagtatcatatcagtgctcgtgaagtttcagattttggggcattttggattttggattttcacatttgggatgctcagcctgtactaactctgttctccttgactccttcttcacttggctggcaggactcctgcctcttcttgtctccttttacctagatggctgctttttctgtctttgctgtctccttcttttcctgacccttaaacactgaagtggctcagagcccattctttggttctccagaagcctgttaccctgtgctccgtttttctaactggtggtttgtagggcccctctttactatactgaactgacatgtgtaggtgatatagcccactgacccacatcgttattttaaaaatcagtattcatctgtaactataatagggaagaacatcagaggaaataaacgaatttgtataatactcgaatatgtttccagatgtacatgcttaagcacagctgtgtcagaacacaaagtgaattattcaggcgtctgcccctgtactcaaacgcagcagttagaaatgcagacgggagtgtcaactggataccactaggagtgatgctattggtgatacggctttgtgaaatggtagataaagttgattagagtccaaagtaaagaataatctgtttatttacatagtagttacattcctagaagattccatggaaaatcaaaagcactccaaaactttgggcttatatgtataatggaattatgttttaggtgcagataactgtaaacacattttttacctataccaatatctggcaggatatttgttgttttgttgttgtttggtttttgttttttttgagacagggtctctttctgttgctcaggctggagtgcagtggtgcaagacggctcactgcagcctcaacctctccagctcaagcagtcctgcctcagcctcccaaatagctgggattataggtgcacgccatccataatgccaggctaatttttaagttttttgtagagacagggtttcattatattgctcaggctagtctggaactcttagcttcaagtgatcctcccacttcagcctcccagagtgctgggattacaagcattagccactgcgcccagcctctagcaggatgtttgtaagggccaagaggatatgagacaattcattgtgccagacattgcagaacatctagcattccaggcccccacctgctaaatgccagtagcacccccacaatatttcagacagtcaaaaacactttcaggccaggcacggcggctcatgcctgtaatcccaacactttgggagtctgaagtggcagcccaaagccagaggatcacgtgagttcaggagttcgagaccagcctgggcaacatagtgagaccctatatctactgaaaaaagaataaaaaaattatccaggtgtggtggtgcacgcctgtagtctcagccgcttgggagttgaggtgagaggattgcttgtgccccagagattgaggctacagtgagctgtgatgcactcctgtactcagcctgggtgacagagtgatccccatctcaaaaaaagtaaattcagatttccaaaggtttcctagggacaggacaccaaccccactgagaagcagtgccctaagcagtcacacccggtcccagggctttcagcggtatctctgagttaagtttgtgcagactggcatctgcatgctgatggctccctgagctccagactcctgtccaactgcctgcctgttgtcttcactggatatcccacgagcatctcacactttacatgtctaaaacagctcttggccttctcccctaaactcttcctcctcctcttccctgtttcaataaatgactccaccatccacttagccgcttgatcagaaacttaggagtcattgtggacacacacacacatacatacatgtacacatacacacacagacacacacatatacatgtacattctcttacgtgacaaatgtccatgttaccaggcctcactgtgtcatagctgtcattttgaatggctcttttccactgattgtgagctccaccagagcttggactatgttctgctcatcagtgttcccagggcttaacagggacctggttgtcaagtagacacttaattgttaaataaatgaattaatgaaagaacagaccagtataaagtgattgaaacacctcacttaccatttcactgactattaactgaatccaagataaggtggccgcatttgcatgtgatctgtgcatccccgagtctgagcctgactggctgaagggctgtcaacagcctgcacagacgtcctttaagggctggtagccagggttcggggagctgatggttgttctctccctcaggtctactatccatggccaactctggcccaaacaccaatggctctcagttcttcctgacatgtgacaagacagactggctggatggcaagcatgtggtgtttggagaggtcaccgaaggcctagatgtcttgcggcaaattgaggtatgtggccaggaatgggcctcctccttacccaggccctaggagcacagccctgtgtgagggctggagagtctctgtggcctgagagagatggccaggggctgtgtccagcgggaggggctgctgctgcccaggttccggggtggaagtgggcaaatgggcaggcaggggttggtatccctaaaccactgttagtctccggccttactccctcacttctattctgccacaaaggcccagggcagcaaggacgggaagccaaagcagaaggtgatcatcgccgactgtggggagtacgtgtgaggcggcactctctctgcttccccctccgctcttgaccctgcatatccaggaaggaactgccagcctcagaggaggcagcaccgagggtgcctgtttgaagcaagcagcatttgggatatgtgcccttcctcagggtctgcttggagcagctcctctgcaggcacagcctggactattcccaggcacagctgtgggcccaggagccagctcaggtgctcccctccaccatgggcaggctgtgcaaaaagccactggcttttctcagcatttgctgctgggcctctcctgggactaccagtgtggctcttacgtgttttctttgctaaaataaaccctagttcttatattgctcttcctgctagttcttgggagttgtcagagattgtgtctgtggctaagctggacctctgaggcaggctggtgagtggggagagcagagcatctttttcacagctttcatttcctcccttgggccgatccccttagatgtcaggtgatgtatcttcacaccaggcatcgatgtcagggcaacggaaattaaagactggaaagctccggtcttctgctgcctctgctcctaaacccagctgccggccttacagccagcaagtgtactctcagtggttcatttgtttatttgttcactttcaccctacagattttaaaaaatgaaatttttataactcaaagtgccttctctgtgccaagtactatgcctatttgtcaggagacaggaagccaacaaactacatgtgcctaatccagcccactgcctgtttttatgaatcaggttttattggaacacagccacgtccatttatttacatattgtccatggtggtttcttactgcagtggcagaggtgcgtaaggggctatagacacaatacaggctatggtccctgtattagggttttctagagaagcagaaccaatagggtgtgtatatatgtagaaagagatttattttaaggaactggctcaagcagtggtaggagctggcaagtctgcaatctgcacaacagaccagcaggctggagactcaggaaaaaaactgatgttgcagttcagctctgaggcagtttggaagcagaattcttcctccagtgatctcagtcttttttctcttaagaatttcaactgattggatgaggcctacccacattatggagggtaatctgctttactctctactgacttaaatattaatccatctaaaaaataggccaggcatggtggctcatgcctataattccaccactattgggaggctgaggcaggaggatcacttgagcccaggagttcaagaccagcctgggcaatgtagagacccccatctctagggggagaaaaaaaagccaggtatggtagtgcacacctatagtcccagctactcagaaggctgaggtgggaggatcgcttgaacctgggaggttgaggctgcagtcagccatggtcatgccactgtactccagcctgggtgacaagagggagaccctgtcttgaaaaaaagaaaccatcatcacagcaacatctagactagtgtttgactaaaaactggataccatggcctagccaaattgacacacaaaatagaccatcacagtcccaaggcctaaaatacttactatctgagcctttacaaaacaggattgccagccactgaagagaacaaatggtcccaccccctgctgagctcacagtctggctctcctgtgtgcagccacttcttggagctggcttctctccactccccctccagatgctggtcagccaggcggttataaagaatctcatctgctgaaggcttttagcagggactgagtcctgtagctgttggacacctcctgtgggttgggtcactcagaccattcagaatccactgagctgagcttttgcatcttggattgagatctggatgagccaggaggcaggagaggctaggtggtcctcatgaccctaggatagctcttgctgagggatggtggcattctgccctacctctggctcccatgtgccgactggactttgtgagctccagctgctacagttgactgagttcaggctccatgtagctgggatatactacatggttacccctcacccctatggagcttccaaaagagaccctccctcaaagcacagccccttctctgagtgcaaataatggccatcagaggtcagtcacaggtgttaggcaggcatctatgaagctggggatgatagcactgacttcagtgcttggacgagaaccaggagagagtgtgtagaaaaagcacagccagcctcccataaaaggacagactcctgtgacaaccttgtcactctgttcctccctgatactctggggaggtggaggccagtgggcagttctgaaagctcagcaggtttggagccattgggtgtggactcctctcccagtgttcctcctgggtgttcacagatgttattgaatgcacactggaaccctgcacaggtaaactgaggctttattggcgtgactgccaaaggtcacacagggtggtttggcagagctgggattagaagcccagcctgtctctcttcagtagtaatggagtcctgggaggtttactaggctttagcctcaatctgtggcggcagggtccacagccctggggagtgacacagtcatggtccccatgattggccaggacctgtgtggagagacacaggagacaagaccctgctcttccaggccagaagggaggggagccccagagctgggcagtggcatgccccacagcctggccacctgcttcggctacgcaccatgcagcagctgcacctggctgcctcgggaaaactctgacctctctgggaagtggagccagtggctctgtgggcgtcctttcctgcagcctggagagcaaagcggctttccctgggactgtgtggctcctgtcccaactggcctccccattccacattcccattgctggaccagcaccaggactgggcacagggcttccttttgctgattcatttcccccctaactcattcagagttgagccccatctgagtccccacatgctggccctgaaacggttacaaaggctgaaaccagggatggcaggcccaggatcagtgctgtggctgttggagtgtcctctccaacagcatgacagccgcctccaggtgctcccagcatctgttgcagtcatggcagcctcacggcaacctctgaagaaggaattatagaaccaactttttattgttgaaaatggagtcttgtagagttcagtgatgggaaactaaagtagaaaaagcacatcacaaagaaacatatatagtacagtgtgatcccaattttgtaaaaatatctgtaatatgtaagcataggtatttgtatatcttaagaaaaaaagcctagaaataaagccacaaaaatattaatagtgtgtttatttgacttgtgggactgtagtgatttgaattgtattttattttttatatatcccactttcctccaaaactgcattatttttttgagaagtgaaagacatttttgaaaaagggggtcaagtgcccatccagggttcctttcaaaaagggggccaagcagttgacctggatgggcagttcccccatgcaaattgccacccaagacacctggtgggtacagacctctctcagcaggacatgggatcccattgtctgggaacacagcaaagtttcacagccgctgccacaagtgacacttgctaggcctttaaaggctataagaatacaagtcccgccctctgagggatgccatgtgtagatggtttaggaaagagcacagctctgaaataaatacatcatcacctgcagaacacattttggtttaatggacagacatagaagtggctcaaaaataagcaaattcatttgtaataataccagcaaatacctattgttaagcatttatatgtcagacatcccaaagatttgtgtacatatttagtctttataatagctttgggaggaaagaaccaatatcatactctacaaaggaagaagcagaaccaggattcaaatctatttggcaccaaaaatctgcctcttgctacactgcctctattcctgtttctttggaccttttccagaacatgttacttccctgcctcagttagaagttagtgactacgaatcccctgctgacttggcctcaaggccagtattgcaccgcaaggaccaagactgctgggcattcctcttttgcctgttgtatgcgtcctctcttcctgtcaactgtcattgatttctcattgctgtcagtagatctgaaacaaccaccaccatcatccttccaaccctcatctggtgcaacgagataaacaggccatgccctgagcaaagaaaagggaaatggtggtatctgtgctgccagcctgggccacccactgcagatgcacatgcttggctcagcaaacggataaggattaaattcatggactttgtgttcattcacaattgtttcattgctcaagggatttttctattttatttcatttggtgactatctggatgataaaagttgctgaaagtctgatggccaactaggtagacaaagccttatgtttttccattgttctgtatgaaccaggaggatcacggctcgtattggttcctgctatgcacagcttgattaatgggtaaggtgtactccatatctacaaaccttcaggtagtttacagacattcttggtgcacccctaactatgccagatcattggctgggcactaaagatacaggtggagtaaaaaattaattgtcaaaataactggctaatttaaaatttacaattgcctagaagaccatctttgatgttaagaaggaacaattaagtaaatactaggatggcaaacaggttccataatttcattttgttgagacaacagttttgctcatgtcaccaggctgaagtgcaatgttgtgatctctgctcactgcaacctccacctcccaggttcaagcaattctgcctcagcctcctgagtagctgggattataggcatgcaccaccatgcccaggtaatcttgtatttttagtacagacggggtttcactgtgttggccaggatggtcttgaactcctgacttcaggtgatctgcctgccttggcctcccaaagtgctggggttataggtgtgagccaccatgc

SEQ ID NO: 859 - DNA, 314 bp, Homo sapiens
aaaaaaaaaattagctgggcatggtgacgtgcacctgtactcccagctgctactcgggaggctaaggtgggaggatcatttgaggctgggaggttgaggctgcagtgaaccatgatcatgtcactgccttccagcctgggtaagagagcaagaccctgtctcaaagaaaaaaagaaaaaaaaaatcaccctggacaagtggattggaggaacagagccactatcaactcttccttagtctactacattaacttcctggtctcctgggttccaatcaacccatcctgggcctagtgtcagagcactgtctaaaat

SEQ ID NO: 860 - DNA, 599 bp, Homo sapiens
aaatgtccatgctcttacatgtctttcctagatggcagaggcaaatgcaaagcaggaagacaagggaagataaatgccattggctttagccctaaatcatgctgttcactcagctttttcttgagttgactccacatgtctacctgtgaccagtggatcagtgcttcagatccatgaatatacaatacttcaggggttatccagttttataccccaccttgcacctcgggcaggcaatggggagccaaccagaccctgactacacacaccacaccctgtgatggatggtgaagagctcaaggtggccaacagtgggctccaggtgcctctcaggtcattccacatctatctcacgacctgagccagtaaggggcatggataggacctcagacaggacttctgtgccaaccccaaagaaccagccaggacatgcctccgggagaggcgtttgcatttgggtagaacactgcctgatgattgagaccacctgggctggaaacaggacagtcacacaaatgcctggcagggcaaggggagcataggagcctggcatgaaggagaaagggtcatgtacgtggttgtgagggtcctccctggca

SEQ ID NO: 861 - DNA, 3310 bp, Homo sapiens
gtccaaggaaaagcctggaggctggtatagcacattccgtcgagggaagaaggtgagtcaccgaggccgagatggggagtgacatgaaaattgatgggaaccagcaggggggtttgaggggtgggttctgagaggtgagatgaagaggataggctttcctctaccttcctagggatcgcaagctggaggtggggtggcagcagcatcagatgtgtaacaggcagtcaattgccatacagaatgatggtgccaggataggggaagcacagggcatggtggaaatttagaggcagtgttggaaagaccagaaggcttcctagtagagatcacagctcatctgaagcctaaagaatgcactgtgttagcaagctaggaaggacaaggacaagtgttccagggagagggaaaggcatatgcaaaggctcagtcaagacagggtctggtgaatttgaagaagaaaaagccacatggctgggtacagtggcctgtaattccagcactttgggaggccaaggtaggcggatcacctgaggtcaggagttcaagaccagcctggccaacattgtaaaaccccatctctgctaaaaatacaaaaaattagccagacatggtgatgtgtgcctgtaatcccagctactcaggaggctgaggcaggaaaatcacttgagccctggaggaagaggttgcagtgagccaaaaccgtgccactgcactccagcctgggcaacagagcgagattccgtctcaaaaaaaaaaaaagcattattaagatattttgtatttttttcagattagctcttcaaaatctgatggagattttacatttatagtacatcacaatttgaatgctaaattttattgggaatatttgctctatatttagatttcataaaaccattgaacaacagttcaaaaagtagattcagactcaagttgttccaagcataagctttctgataactggattgaagctcagtcattagttgtgaatttttttaagtaaaagaattcagggccaggcacagtggctcacgcctgtaatcccagcactttgggaggccaaggtgggcggatcacgaggtcaggagatcgagaccatcctggctaacatggtgaaaccccgtctctactaaaaatacaaaaaattagccgggcgtggtggcaggcgcccgtagtcccagttacttgggaggctgaggcaggagaaaggcgtgaacccgggaggcggagcttgcagtgagctgagaccatgccactgcactccagcctgggcgacagagcaagactccgtctcaaaaaaaaaaaaaaaaattaaatgaagttaaaaaaaaaaaaagtcccagccaggcatggtggtgtgcacctatagtcccagctacttgggaggctgagatgggaggatgacttgagctcaggagatggaggctggaatgagccaggattgtgccagtgcaccccaacttgcgcgaaagagcaagatcccaacccttaccccccaaaaaaggaaaaaaaattaaataaagtaaaaaaaaatccctccttcaaatcagccacatttcaagtgctcaaaagccacgtggctattagacatgtggctgccatattggacagggcagaaatctggtatcagggacagtgagctctgtagatccagcgactcacaagagtggaggcagagttgtgtcttctgggtggggatgagtgtgttaaaaccctggattggtggatgaagcaatcagaatttgggaggtcagatggagtgggcatggaggcctactggatggagaggtggacagagtggatgttcaggtgactcttgggattctgccagggatctctaggtggctggtgggacctcctcagagatggtgacatggggggggtggcttgtctgccagtggatggagattccagggggtggcttctgcagaaagaggctcatggagcccctcatcctctgccttgccctcctctcaccagttctcctacgtggacgccgacgggtccccagtgaatgtcgtgcagctgaacttcctgaaactgctgagtgccacagctcgccagaacttcacctactcctgccagaatgcagctgcctggctggacgaagccacgggtgactacagccactccgcccgcttccttggcaccaatggagaggagctgtctttcaaccagacgacagcagccactgtcagcgtcccccaggatggctgccgggtaagagggtggggcagtggccagctagagaggggaggcaagatgtcggccaccttcccggtaactcaccgtctctgtcttctctggggacagctccggaaaggacagacgaagacccttttcgaattcagctcttctcgagcgggatttctgcccctgtgggatgtggcggccactgactttggccagacgaaccaaaagtttgggtttgaactgggccccgtctgcttcagcagctgagagtgtccggggtgggagggaccatgagggagccccagaatggggtgcatttggtgctgaggctttgaagccaccgtatttttcgttacctgtgactatggagccaatgggatgtgacttcgctcatcacggacagtcattccttctcctttccagggtgctgggggctggggttccctggcccaagggtccagcctcctctcaccccattccaggtggcatactgcagtctggctctttctcccctccctccccacccaagcctcacctccccaccccttgaacccccatgcaatgagcttctaactcagagctgatgaacaaaagcccccccacccccaatgcctgcctcctcactcctccgtcgctgcccttcacaccttttggtgctacccctccccagagttaagcactggatgtctcctgatcccaggctgggacccctacccccaccccctttgatcctttctacttccacggtgaaaggactgaggtcggactacagagggaagagggacttcccttgactgggttgtgtttcttttcctgcctcagcccagctctgcaaatcccctccccctgccccccacctccccaggctcaccttgccatgccaggtggtttggggaccaagatgttgggggggtgaatcaggatcctaatggtgctgccctatttatacctgggtctgtattaaaagggaaagtcccccctgttgtagatttcatctgcttcctccttagggaaggctgggatatgatgagagattccagcccaagcctggccccccaccgccaggccatagggcataatttgcatctcaaatctgagaataaactgatgaactgtg

SEQ ID NO: 862 - DNA, 495 bp, Homo sapiens
actgtaacctaaagcactgggattaagcagtgggagaaagccactgtgcccagccccatattgttttgttcttttgagacatagtctcactctgttgcccaggctggagtgcagtggcgtgatcttggttcactgcaacttccacctccccagttcaagcaattctcctgccttagcctcccgagtagctgagattacaggtgcctgtcaccacacctggctcattttgtattgtatttttagcagagacggggtttcaccatgttggccaggctggtctcaaactcatggcctcgagtgatccacccatctcggcctcccaaagtgctgagattacaggtttgagccaccgcgcctggccccatgttgttatttttaactggtttattttctcctggtttagtgggagctcagatgcccagtggatgggaatttagacaagcttggacttcccactgggcccggagtgcaagacttgatccctaaacaattact

SEQ ID NO: 863 - DNA, 3975 bp, Homo sapiens
gatcctgaaatggaaaatgaagaacaaccatcctctgaaaatgattctcagaatcagagtggtgaacagatttcatcaagttctcaggaggttgatttggttgatcaagagtcttctgaggaaaattctctaaattctcacccagaatcattatctctagcagatatggacaatgctgcaagcatttccccttctgaacagacttctaatcccacagaaaaccatgagactacaaatcttaatggtgaatgtacagatttagataaccagcttcaagaacaatcagaaactgaggaagattccaatcctaatgttagctggggtaaaaaggtccagcctatagactccatattagcagactggaatgaagatatagaagcatttgaaatgatggagaaggatgagctatgacttgctaaacaatctgttggtaggtatttaaaaagaaaaggtaaactgtgtgtggttaatagacatcctaatactaagcaggctttctaatgggaggctttaagtatggtgatgaacaaccacgttctgactggcgtagttatcgtaggaatctggagcatgctgtgttagaattgaccttgtttaaaactgtcccatcaaaaatggaaatccacagttcccccttcaaatgcagcactgcaccaccctgcaacacctcaggccagggaaagattactgagcattcctgcgaaccagatttctgttgtctctggatagacaagaaacaaaattcatttagtagtggagtggggaataggagtttggatagccttctaattaaaggaagctcgcctttcttggttttgggggttagaggctcttttgggaagatgcatccgagtattgtggcattctgattatgctgccttcacaaaacactctaagtgacctaagtggttatgaagcaaatgcatttatggtgaaaacagtctttgctcattgctttctcttgtttcatttagtgacaaatgatcaagatgacttgattttttttccttcttaacaatgtcttttttatttaaaccaaaggtgaagccagtgtactttctcagtgagttctctgcataaagactaatcagtgggaccaggtaaaaaggtcatataatacattgtggagattgcttacttaatacttctgaaaaatggagtaagggagaaactgtaatgttgcaatatgaacctcccattgggccttccatagggaaagctgtgactactctgaaatggaacctagcattatatccttgtagggtagattataaatcatttccagttcatttctcttagaggtgattacctctagccatcagccttactccatcccatgtttggtatgcaatttgagccacaaggctcgtatcgccaacagctatatacattttgttccatttttctgtcttacagagccatgatagaactgtggttagtgagttaaaattcctggagtaactactgtttttctcctttgaaacttaggtttctaaagttgcacctaaggaatctgtcacattttctgttgaatcatggtttttgtttttgtttttaacagatattccttctgatacggacttgaaaattagtgtatggtgacctgtgtttaaaaaaaaaagtacaatacaactacatatagctatatagcttaatgagacttccaccccccccctttttttttttggtttgttgttgttgtagtagtctggtgctggccacatttaagtcttaaaaatttttaaattttgttgttgatgtttgtagacagccctgttgttgaaatcatggctttattcattttatttattttttaaacttgcctgaatttgttctaaaggaatatttaagagacataattttcttctctttaccataacattacacaaaactttttcctaaaacacggttgtgaggtactgatgaggtgtaagtggagctgttaaaaacagcagtgctgtattgcagttatgtatattcgtgtacagtatgtttagatcccaggtaaacatattcttttctgagaggataaatacctgcattcagatattccaggtaaatataattgagtcagggagtagtaaatctgatggagaattcactttggggaggggaaaaagaatagtatgcaagacccttattggcttttaattatacctgaaaccaaaatggatatttttagtctctctgcatgtgagatttggtgtaacaagatagaactataatatatacagtatatggaaggatagatatagtgctttgttcattttaattgcaaagctgccaaaatagttgaagcttaattacttgacttgccttgatttataggactggggcttggagaaaatgagcagatgttcctctaagacatcgattacagaagccttatatacatggatttgattttgtatttgtagctgaaagtcactgttgtctaaaactaacttttctaagttatcaaaacaacctaatttcttttccaacaaggagaacttaatggcatgaaggattgtgtgacacattggaaaagccagcttactgccactctcttcctttggccattagagggaggtgttgcctttcattgacgcttagaagcaaattgttcacttgttaagaaaagtaaatccttaaaaaaagaaaaggaaaaaatttaaccaatttttcttaatacccagaaggaattatactcaatatttccctagttaagaaaagaggagataatgttcgtctaaaaaactccaacgttgtaattacaactctacattcatttacttacttgacatactgccacaaagtagtttttgagttcattaaaaattccaaaggcattagttgttttttttttttttagtgttttgttttttagttaacttttatagacattttagtaacttgctaaagattcaggggattctatgaaaccccgaatttagaaacatctggtctacctcagttaaatgttgactgcttagaaatatagctgaagtgatcaccacagccataaaattgtttaagaaagatttatataatgtttacaaatctggaatcaaggattttagctgaaatcctttaagagatattagagcaagtatttaattcaggtattttcaagttttaaaacttaacctgtttacctactaaaaataaaatagctagtttttttctgcatataaaagttcattgaaatgatatgcccttatttgcaatacttttcccataaagttttaagtgtgaaagaattgtaatttactagatatgtttggtatgggatattttgttaggcaagttttcttttttcttcttaaattgcaataggcttccaaaaagagtataattgtttcagaacaaattaactcttggcattatacgtctccctttttctttacagtattagtaaaaagaaaaattgtacactttctgattttaacttcactaatgtaattactctctcaagaagcttttaaaatttaaattaccatcacacaaccttttttatagtaaagccaacatttgttctctcaccaaaccccatgccaaattcatcatgaagaaagctcagcataagtaattcaaatactgcttataattttagaggggggtagaatttagtaaatattccagccggtcgttttatgcacaaggcttcagtcagaacatagaaaaaaaaaacattctgtgaatgaaatattgtatgttcagattttataaaagacatttttaaaagcccaatttacagccgtatattttcttatgatgtaatttatgaaaaagatgtctgtactaacaggtgctgtaacactactgttgttggattttattgtttggtgataaatgtatacaatatttctaagggaaactatgtactgtgatgtaaaagtctgggcaaaatgtatataatcctgtatataattatgtatttgattataattactgattgtaaagatttaataaaatatgtaaatattccagttt

SEQ ID NO: 864 - DNA, 304 bp, Homo sapiens
gcacccatggattcaaccaactgtggataggaaatattcaagaagaaaaaagcatctgtattgaacatacagagattttttttcttgtcattattctccaaacaatacagtataccaatgatttgcataacatttacgttgtattaggtattataaagtaatcaagagatgatttaaagtacatgggaggatgtgtgtcagttatatgcaaatactgtgtcattttacataagggacttgagcatccaaaatccttatctctctttcataacgtgtcacagttgagttttctatttattttccg

SEQ ID NO: 865 - DNA, 5786 bp, Homo sapiens
cgcaggacctcatgagtaagctgtggcggcgtgggagcacctctggggctatggaggcccctgagccgggtaagcgcgaatagatcaagcaatttaggtcgtgttagaaaagaagtcccgttcttgctcctcggagagtccagggtacttcggccacaggtggcaaggagaaaggcggtgctgttgttatggtaacagcgagtactgcgggaagggtgggatccagtaggggcttaggttattcagggcttcccctgccaccctccggccaaacactgtcgacaggctttccttccacaggagaagccctggagttgagcctggcgggtgcccatggccatggagtgcacaagaaaaaacacaagaagcacaagaagaaacacaagaagaaacaccatcaggaagaagacgccgggcccacgcagccgtcccctgccaagcctcagctcaaactcaaaatcaagcttgggggacaagtcctggggaccaagaggtgaggccaagagggtcatagttttataaggggaactttaggagcagagatagtagttagaagccgactgggctttctagaagaccgaatggacactgtgacttcagggtccagatttaggcagcaagagtctaagagggtggggaaagttgggtgtagctacggagtaggaggaggagacgcttgctcattttaaagagtagtgttgcttctctgcagtgttcctaccttcactgtgatcccagaggggcctcgctcaccctctccccttatggttgtggataatgaagaggaacctatggaaggagtcccccttgagcagtaccgtgcctggctgggtgaggatctggaggtggggaaactgggtttcttattatacccgcctaaagaaagaaggttggttctgaaatgggttaggattttccatgtcccagtattaactcagccaaattagggtgccccatctgaacaattctgtttttctttctccaacttccttcccagatgaagacagtaatctctctccctctccacttcgggacctatcaggagggttagggggtcaggaggaagaggaggaacagaggtggctggatgccctggagaagggggagctggatgacaatggagacctcaagaaggagatcaatgagcggctgcttactgctcgacaggtatgttggttcattgtttattcactcaccaaatgtatacagtattgagaactctccacgacccacgcactttgcgtggcattggggatatcgatagtagagaaaagacaaagtttctgttctcctggagctagtattctagtgtgtgtgttggggggctgggaagtaaataagtaaataatttcaaaaagctatatggtttatgacaaaaagaaaagggtgatgaaatagaaagtggcgtaaacaaacagatagaaatgatggaagagagacattagggtagttagagaaggcttctttgaagagataacatttgcaataccagaagagcttttgagcagagaccagcaggcgcacagaccttgagactggaacatgtctagcaaaggagaagaaaaagtggacaagccactgaagggctgtacgcagagaagtgacatacttggtttacatttcaatagattactttggcatctttgtagagaatgaatcttcgtggagacaagagatagaagtatggagaacaactaggaagctgttgaagtaatcagctgagaggcagtggttgctttaaccaagacgaaagtggtggagatggagaaaatcagatgaattatggctatattttggaagtagatacttgtggggaggggaatggagagaaaatatatcaaggctaagcctgggattttggcttgagcagttatccacctgatactctctattgagataagattaaaaataacaacagacctctgggaaagctggtacagttttggtgcacaggtcaggcaggtaacattactgatgcttctccccttgagagataaggacctaaagctaaatgtcaggagatctgggaggaggcagtatttatgaagaggaacctatggaaggtgtcctggagagggtgctcattaattaatatcccgcctccgaaggcctgcactgctcaagaccctgccttccatgtcccttctttcccctcccccgatctggccgacctcgcctctccatcttcctccattttcagacagcaccccgtctctgtctctccctagcgagctctgctccagaaggcgcggagtcaaccttcccctatgctgccgctgcctgtagctgagggctgcccacctcccgccctcacagaggagatgctgctgaagcgcgaggagcgggcgcggaagcggcggctccaggcggcgcggcgggcagaagagcacaagaaccagactatcgagcgcctcaccaagactgcggcgaccagtgggcggggaggccgggggggcgcacggggcgagcggcggggagggcgggctgcggctccggcccccatggtgcgctactgcagcggagcacagggttccaccctttccttcccacctggcgtccccgcccccacggcagtgtctcagcggccatccccctcaggcccgccgccgcgctgctctgtccccggctgtccccatccgcgccgctacgcttgctcccgcacaggccaggcactctgtagtcttcagtgctaccgcatcaacctgcagatgcggctgggggggcccgagggtcctggatccccccttttggctacgtaaggcccttaacccggactctgcgccccgtcccatgcccgctcttgagtatcttccccaccctattaaattacatccggtgcttcggcttgtacagaactgggggagtgggatgttgtgggcagaccagtctccggtatacacgtattttgcccctgtcggagcttgcgtcgatgcctggggcttggaaaccaccgcaaaaaaccaggctgcaaaccagcggaccgacttttgggactccgcctcttccagccgggattacctggcgtgcttcggcctttggcgtcattccgaaaacataccgcaagccaatcagcggcaaccttgctcttcggggcggctgttcgttggttgatatgccagagcctgttctgttgtctgtattggctattgccgctgtcagtcagggccgtgggtcgaaccttcacctactctttgtctgtacaagctcttgttgtctgggtgagcggcggaggcgctgctgtggattggtcacagggagaaacctctgatctgttcctattggcccgtccgtcaagggacgatgatgattggtagggcagagcaatctgagtcctagttggtggagttctgcccggatggaagctccggccgcggagtgatggtggcctcagcgaagatgggccgggcagggaccatggcggtggcagcagaggtggcaggggcggggcggctggcggtagaggaggctgtggtcctcagggggctgtaggtggaggtatggctcgggccagcagcgggaacggcagcgaggaggcctggggggcacttcgggcgccgcaacagcaggtatcccaatagctccaaaacctatcacgacagccatttgtctctttcccctttccttgtcccttccttttgggggtgggggaggaactcacggagccaaaggtactgtgaagttcctaaacatgtctcttccactctttgtctaaactttgtaacgtagatgcagctgactttgcctgtagcctcatagaacccatcccatggctgcagtggaagcttgcggtggctctccagtgaccagaggcatagtgaggtcccagggaggctccctctgtcttgcaacagttatttgtgatctttttctatgtgcctattgtcacaacagagtccggcagcgtcttctcttgagggagcaatttggagaagagctggaacccagactcgcgccctggatgccatcctttatcatccacagcaatcccatctggttgggagcactgctctgggtctcacactgcccctcctctatcctagggagcctgaggcccaggggtggaaagatccagttgcgggtggggggtagtgaaccgcgcaggataatgaaagcaacttgctttggaaatgacctaccgctacccgttgtctgagactgagattatctcagactgtcttctggcttctgccaaaacactcccttaacagaaagcaccgaggggatgggggtaggggggttggggagagtgaggcttgagtgtgaaggaagtctcatatatgcagagctgaaatctccctctttgtatgtccacacttttgtcttgttctctagactgattcttgctattccaaatcctcttccacgttgacagcccttcagatatttcaacactcctctcagcatcctccacttcccccatctctccaagctgaacttggttcacagggtgggattgtgtatgtgcatgcaggaggtgggggtggacagtgccctgggctggaatcccccttagttctaagtgcctccttgcccgcagcttcgagagctgtgcccaggagtgaacaaccagccctacctctgtgagagtggtcactgctgcggggagactggctgctgcacctactactatgagctctggtgtaagtctccaagagggctatttccaggtccctgtgtccaccctcccttggacctcagaatttcggccttcagggccccttctctgcatgaaagatgcctgagttgctccctccttgcctcttgcagggttctggctgctctggactgtcctcatcctctttagctgctgttgcgccttccgccaccgacgagctaaactcaggctgcaacaacagcagcggcagcgtgaaatcaacttgttggcctatcatggggcatgccatggggctggtcctttccctaccggttcactgcttgaccttcgtgagtgacttgatgccctgggtcagctaccagtggccctccccaaaccagaaccccaaatcgtctcacattcccttttccacacatttcaaagtatttttccctaatataaaaactagcaccctatacctggttgtcttcaaccaatcatgccaattttctcccctgcaggcttcctcagcaccttcaagcccccagcctacgaggatgtggttcaccgcccaggcacaccaccccccccttatactgtggccccaggccgccccttgactgcttccagtgaacaaacctgctgttcctcctcatccagctgccctgcccactttgaaggaacaaatgtggaaggtgtttcctcccaccagagtgccccccctcatcaggagggtgagcccggggcaggggtgacccctgcctccacacccccctcctgccgctatcgccgtttaactggcgactccggtattgagctctgcccttgtcctgcctccggtgagggtgagccagtcaaggaggtgagggttagtgccaccctgccagatctggaggactactccccgtgtgcactacccccagagtctgtaccgcagatctttcccatggggctgtcttccagtgaaggggacatcccataagtagttttgagagggtggatgggttacttgcccaccagaaacagccctagtcccaactccttgcgttcctttggcccctccctgcctacctagaatctgcctgaaagggctggagaggggcagtattgggggactgtgctagctttacccccgcaggacatacacaggagcctttgatctcattaaagagatgtgaaccagctacttgtg

SEQ ID NO: 866 - DNA, 4332 bp, Homo sapiens
tagagttcaaaatgttttttccaatttatttagaaaaatagactctggattcacattcaccccagggctatgtgggatgacagcaaggagacacctgagatgaaatgaggaaggtttgaattactggtatccaaggggctgggggcaaaagccagaagcctttgtcccttcagagccagagtggcatgagtgtcttggctcccctcctctccctcccttcagtagtcttcagccatggccagtaagacaaggctggtccagccgtggaaagggcggcagcccatgcctcgcccatcgcggtcactgtactgctcccaaagaaagcctgtagcctggtactggcgccatacattgcctaccacgttggcacggagctcaccgtggagtttggcagcccgagcctggtgaggaccctccagatgcccatagtggtggagtgctcccaaagccaggtagttgacattgagccacacagcaccccgccagtaggggggatcatgctctgaattgcgctggccataaaaggagctggaggctgcaagggagcgtaaaccaaaggggctccagagatggcggctgtcggctagaatgtccagcaggggcccaaggcgggatgaggtggggtccagcagtcgcagcagcaagggaaaaagactgacatagccaagagcatctacatactgcagttgaggttggggccgacccaccacccgaacgagcccctgagggggcctgggcttcagctgtactgcttttgtgtggttcccaaagtctgcaaagactcctagctctggggcccagtgcagctcatccaggctctctgctgcctccagtgaggcagccagtgggcccagctcagcagctacctcagcctcacccagatgctctgccagccgcgtcagcacacgggcacccagtgccacccaacatcgcaggtccaggtgccgctcggttactgaagggtgtgaagcccgggggtagtcatccagcccagagggtagggtcttggggttcagtaaggttggtaaggcagggtcccgtccccgccagcggtaagatagtggcagtgggcctgcctggctctgatggagccaggaaaaccaggcatgcaggcggggcaaggcctttcggaggaaagccaagtcgtcagggtcaccaacctctagcatatgggctacaggcaaaagtagggttggggggttggcgtggactgctcgttgtactaggaattctggaggcacccgggctcgggcctcatcccccagtatctgctccctcccaatccagccatcagcatttagcagccccagccagtggccaagggcttcccgggtgagggagggatcccaccgctgaaccaccagctggtgaaagccttcatcccaaaggaagcctcgtgggaagaatgaccgggagggcactgctgtaaaaagaggtacgggtggaaagagggctgggtccaccttctgctcagacccttccaccccgatgtctggcaataccagcccttgtccgtagaagtagccaattccaccaaggaggccgctgagggcagcctgacccaaaacctgctcgccagagctcaggcccttctccttcagctggaaggtcttctcaaagcgctctctaaagccttcagcatggctctccagggcctgggtcagtagactgcctgccagtcttggcagggcttgatttcctcctgcctgggcactgcctgattcaaacacaaactctatggaaatgggaattttcagggtcacctgctgtatcaagaactgcccctgcccttgcccacttggacctctgtcctcccacttcagggatcctggcaagccgaggtagcgttcagggggggcccctgggggccgatgctgaaaccagctatttaggcgactctttaccatctctgtcagcaggggcagtcctgggttggaggtccagaagacattgtagcttgaaggggagaagataaataggaaatattattcaagagaaggcagtgggcattataaagagaaatacaaagtgttcaggagtcaggttgggaggtctcaggcaggggacatggagactggtgaaaatgggaataaccaccccttccatcccccaacattcttttcccccagttacctgccatacttgggggctgtatcccctggactggttggtggcaaaagtgtaaagcggaagtcaccaagttcactggtgtgcccactgataaacttcaactgccccttggccccaacctctggtagtaggacttccttgccatctgtcaccacatagaagaacagggagaccaaagggagggcagaagtacctgagtcctgagtgaccaacgaggacagaaaagaacagtgttagattggcattctctcttgaattccctcttgagaatcagccttagtgagggaaaggaacagtaggcaggggtaatgtaaacaacatacgtctggcagtaatgagggtcactgagggtaaccaggtacacccaagcgggatgagataaagagccttgcactgggtgccctgggagataacagtatacttttgtactatgtcctacactaagaactctacacagttgatttcatttaattctttttttttttttttttttttgaggcggagtctcgctctgtcgcccaggctggagtgcagtggcgcgatctcagctcactgcaagctccgcctcccaggttcacgccattctcctgcctcagcctcccgagtagctgcgacaataggcgcccgccaccacgcccagctaattttttgtatttttagtagagaccgggtttcaccgtgttagccaggatggtctccatctcctgacctcatgatccgcccgcctcagcctcccaaagtgctgggattacaggcgtgagccaccgcgcctggcttttttttttttcttgagatggagttttgctcttgttgcccaggctggagtgcaatggcacgatctcggctcagcgcaacctccacctccctggttcaagcaattctcctgcctcagcctcccaagtagcttggatcacaggcatgcgccaccacgcccggctaattttatattttcagtagagacggtgtttctccattttggtcaggctggtctggaactcctgacctcaggtgatccgccagcctcggcctcccaaagtactgggattacaggcgtgagccaccgcgcccagcctctttttcatttaattcttacagtcctgtgagttaagtgctattattatctacattgtacattttacaagcaaggaaatcaaggcttagagatggtaaatagaaatggttatacaggcagttgtttaaggcaggatttaagccaggcagccagagcccacttcatgctgcatttgctggcagcaagggaaggatggagggggtctgggctgagaaaagggtgtcctgaggccctgacctgaggctctacagtcactctccagctccagtcccctccgtgctgacccccaggcctcttgacgaactcagtggtgagccttaaggccccatcctggatgtgttggcgcccgaaggagaggccgtcgtggaactcccagccatagggacccacaccgtccccctgctcacacgtgtgcctgagcttaggagtccccggggtggtgccctgctgcgcccacatcagtcctgggggtagaatggccacgtaagtcaaagagcaggggacctgtccctccgggtctccgggtcatccctcttcataactctcctgatccattccttcccacccttgctctcgcttcaagctggggcgcccagattaggagtccgcctgcctgcccgccctggggcccggttaccggtgaggaggggcttcgggctgcgggtcttcatgccgaagtagacgtgagggcggtaggttccccagaagaggtccggggccacggcggggctggaggagtcggcaggcaacacaggaggcgcggagtgcagcgtgaccgcccgccgcgcacggtaccacgccagcacccagcgccccgacatacccagggccaaagacaggaccacgacggccagagccactcctccagccgtgctacgcggcccgccgccccggccgtcccgtcgcccggggcctccccgagccgccctctcggctgtccgcactccctctgccggcactgcgcggcgccgccgctcgccccgagccatcctggcactgaggtccgcgtcacaagagctcggagaggcggcagtggagcccgggtcctgcctcacctctccggctcccgcctctcgccctggcgaccaccgtccggttagcgacacctgccagccagcgcctgcgcctcc

SEQ ID NO: 867 - DNA, 143 bp, Homo sapiens
tgagacggagtcccgctctgtcgaccaggctggagtgcagtggcgcgatctcggctcactgcgacctccacctcccgggttcaagcgattctcctgcctcagcctcccgagtagctgggactacaggcgcgtgccatcacgcc

SEQ ID NO: 868 - DNA, 1936 bp, Homo sapiens
gaacttgagttagaagaacctcagctctgtagtgatcttattttactgttttcccaggataaaatgcccttggtaccacatactgtatgcagagtatttatgattgcttgagtacagttccttggaaaggacacaaggggtttcataaagcggtactaaaaatctgcttttctccctagcatttaccaacaaccttgcgatccgatggcttgaaataatggtcagagtgcatgttacccaacttctcctggctgctcctactctgtcacactgcacacagatcatgcccgccaccaccctacactccccgacctcacccaccagtcagacagtttaagtcctgctgacgcaccaggcgtgtgttggctcgtggttgtacttttcatgagtagcagggaagatacactccaggaaggtgggatacaaattattgaactgtgtgacttaaaagctccagtgagtttcgtcggaagtataggagtttgaaagtgctccccagtcaaacccagaactacatagggtcagccgtggttgagctaatttctgcttacacatgtgtggagggtgtcattttctgactacgcctaggcctgagtggacagccgattaaaagatgtaaattcgtggattgtatcaaggagagcgggttccatctttgtggtcaggagggggcccactcttttgttccgcaaagggtttatctggatgttccttgctggaagttgcttttccagtttggatcaaaccacttaagtggagctccagcctcagtccttgcaataaaaaaaaaaaagtcctggaaagccagaattttgctaatatcttacatagaatctcaatgatgggaattgggagtagaaggcagagagtggtgcttggctgatggaagttaaaagttgggttaataataaactacatttatatatcagttaacagcttgctaagtgcccacatattatttgagcttcatacttgcttgctgagaaagaatggctattattatcattatcatcattaccactttccattttatagataacaaaactgaggctctgagaatttaaagagattttccccaaatcattaaacggtgacttctgaatctggatatatgacaagacctctgtccccagtccccttgctttcacctctataatatatagtagctaagctcagctttctgagaacttccctgtcttatgtcatatttgacattataggagaattgaagatgttttgtaagtacatactttgtttactacctcagtagccagtataacaaatggcactgaagttttatgctttgcttgctaaaaccagcaccatttgtgaaacaggtcttggctccgagttacccttaaatgtaactcctttattataaaatcatttgcaaagagctgcagagatcaaggaatacactcttcccacttccctaatgccaggtagtactatgacaggacttcatagtaccacttcttcaacaaaataagtgtctgcagtgaaatatttgttaaaatgcacatttctcagtgaatatatttcttttaaaactgaaaaaaatagtacctaacggaaattttatcattgctttaaaatgtattttaatgaagatattaaaaaatacctttgatggattcttcaatattgtcgaactgctcaaaatgattatactgttatatgaagtctaaaatctttcatgcaacttacaagaatatttttgttgtatgcaacacagttggaaaattctagtgggaccatgtccatgcaattactgattatgtaatgctgtaaatttttgataagcatgttccaagttttcctgttctaaaaacaaaaacattaaaatcacccactgttgaagacaaaagatcattactttattaggagatattattagatatgtttagaactagttaaaaaaaaaaagtaaaagact

SEQ ID NO: 869 - DNA, 1936 bp, Homo sapiens
gaacttgagttagaagaacctcagctctgtagtgatcttattttactgttttcccaggatagaatgcccttggtaccacatactgtatgcagagtatttatgattgcttgagtacagttccttggaaaggacacaaggggtttcataaagcggtactaaaaatctgcttttctccctagcatttaccaacaaccttgcgatccgatggcttgaaataatggtcagagtgcatgttacccaacttctcctggctgctcctactctgtcacactgcacacagatcatgcccgccaccaccctacactccccgacctcacccaccagtcagacagtttaagtcctgctgacgcaccaggcgtgtgttggctcgtggttgtacttttcatgagtagcagggaagatacactccaggaaggtgggatacaaattattgaactgtgtgacttaaaagctccagtgagtttcgtcggaagtataggagtttgaaagtgctccccagtcaaacccagaactacatagggtcagccgtggttgagctaatttctgcttacacatgtgtggagggtgtcattttctgactacgcctaggcctgagtggacagccgattaaaagatgtaaattcgtggattgtatcaaggagagcgggttccatctttgtggtcaggagggggcccactcttttgttccgcaaagggtttatctggatgttccttgctggaagttgcttttccagtttggatcaaaccacttaagtggagctccagcctcagtccttgcaataaaaaaaaaaaagtcctggaaagccagaattttgctaatatcttacatagaatctcaatgatgggaattgggagtagaaggcagagagtggtgcttggctgatggaagttaaaagttgggttaataataaactacatttatatatcagttaacagcttgctaagtgcccacatattatttgagcttcatacttgcttgctgagaaagaatggctattattatcattatcatcattaccactttccattttatagataacaaaattgaggctctgagaatttaaagagattttccccaaatcattaaacggtgacttctgaatctggatatatgacaagacctctgtccccagtccccttgctttcacctctataatatatagtagctaagctcagctttctgagaacttccctgtcttatgtcatatttgacattataggagaattgaagatgttttgtaagtacatactttgtttactacctcagtagccagtataacaaatggcactgaagttttatgctttgcttgctaaaaccagcaccatttgtgaaacaggtcttggctccgagttacccttaaatgtaactcctttattataaaatcatttgcaaagagctgcagagatcaaggaatacactcttcccacttccctaatgccaggtagtactatgacaggacttcatagtaccacttcttcaacaaaataagtgtctgcagtgaaatatttgttaaaatgcacatttctcagtgaatatatttcttttaaaactgaaaaaaatagtacctaacggaaattttatcattgctttaaaatgtattttaatgaagatattaaaaaatacctttgatggattcttcaatattgtcgaactgctcaaaatgattatactgttatatgaagtctaaaatctttcatgcaacttacaagaatatttttgttgtatgcaacacagttggaaaattctagtgggaccatgtccatgcaattactgattatgtaatgctgtaaatttttgataagcatgttccaagttttcctgttctaaaaacaaaaacattaaaatcacccactgttgaagacaaaagatcattactttattaggagatattattagatatgtttagaactagttaaaaaaaaaaagtaaaagact

SEQ ID NO: 870 - DNA, 1932 bp, Homo sapiens
gaacttgagttagaagaacctcagctctgtagtgatcttattttactgttttcccaggataaaatgcccttggtaccacatactgtatgcagagtatttatgattgcttgagtacagttccttggaaaggacacaaggggtttcataaagcggtactaaaaatctgcttttctccctagcatttaccaacaaccttgcgatccgatggcttgaaataatggtcagagtgcatgttacccaacttctcctggctgctcctactctgtcacactgcacacagatcatgcccgccaccaccctacactccccgacctcacccaccagtcagacagtttaagtcctgctgacgcaccaggcgtgtgttggctcgtggttgtacttttcatgagtagcagggaagatacactccaggaaggcgggatacaaattattgaactgtgtgacttaaaagctccagtgagtttcgtcggaagtataggagtttgaaagtgctccccagtcaaacccagaactacatagggtcagccgtggttgagctaatttctgcttacacatgtgtggagggtgtcattttctgactacgcctaggcctgagtggacagccgattaaaagatgtaaattcgtggattgtatcaaggagagcgggttccatctttgtggtcaggagggggcccactcttttgttccgcaaagggtttatctggatgttccttgctggaagttgcttttccagtttggatcaaaccacttaagtggagctccagcctcagtccttgcaataaaaaaaaaaaaagtcctggaaagccagaattttgctaatatcttacatagaatcccaatgatgggaattgggagtagaaggcagagagtggtgcttggctgatggaagttaaaagttgggttaataataaactacatttatatatcagttaacagcttgctaagtgcccacatattatttgagcttcatacttgcttgctgagaaagaatggctattattatcattatcatcattaccactttccattttatagataacaaaattgaggctctgagaatttaaagagattttccccaaatcattaaacggtgacttctgaatctggatatatgacaagacctctgtccccagtccccttgctttcacctctataatatatagtagctaagctcagctttctgagaacttccctgtcttatgtcatatttgacattataggagaattgaagatgttttgtaagtacatactttgtttactacctcagtagccagtataacaaatggcactgaagttttatgctttgcttgctaaaaccagcaccatttgtgaaacaggtcttggctccgagttacccttaaatgtaactcctttattataaaatcatttgcaaagagctgcagagatcaaggaatacactcttcccacttccctaatgccaggtagtactatgacaggacttcatagtaccacttcttcaacaaaataagtgtctgcagtgaaatatttgttaaaatgcacatttctcagtgaatatatttcttttaaaactgaaaaaaatagtacctaacggaaattttatcattgctttaaaatgtattttaatgaagatattaaaaaatacctttgatgaattcttcaatattgtcaaactgctcaaaatgattatactgttatatgaagtctaaaatctttcatgcaacttacaagaatatttttgttgtatgcaacacagttggaaaattctagtgggaccatgtccatgcaattactgattatgtaatgctgtaaatttttgataagcatgttccaagttttcctgttctaaaaacaaaaacattaaaatcacccactgttgaagacaaaagatcattactttattaggagatattattagatatgtttagaactagttaaaaaaaaaagtaaaa

SEQ ID NO: 871 - DNA, 6584 bp, Homo sapiens
cagattgcttccaagtatgatcatcaggcagaagaagatcttcgcaattggatagaagaggtgacaggcatgagcattggccccaacttccagctgggcttaaaggatggcatcatcctctgcgagtgagttacagccctccagaatctgtttctgctcttccagttctttccacagccttctctctcactctccttctcagcccagggtgtcagaccttgatattctacagatatctttaatgctttcccttactgatgctaaagggagcaacttgatatttcaatccttgtttttgtgtgccagtaaataagatgtctctcatatttttcttttcagacttataaacaagctacagccaggctcagtgaagaaggtcaacgagtcctcactgaactggcctcaggtaacagccaaaccaaccacctctggttctagttggttgcattttatgtagtgaaaacttgatttcaggtttggttttttggttttgtgttttttttttttttaactttttgattacggtttttacatagacattgtagcagaaatttgtgcatatttaattttttgcccttttgtaatggttctgtaattacttatttaactagttctgtaattattatgtttagcttagaagttttcctatatttagtctgtgtacattcagaaaggacttgacacagcttacacagagaaatgcaacccagaccttaaggataagggaaaaaacaaggcattccacataactaacagtggactgcagagcactgtatcagacataaccttagttcatgagtgtgtatgaggaaggaaaatgggatacttactggtcttgaacatgtgtttggagatatgagagaatgagtatttagtaaccacaaatgtattctgaaattaaaataacacataatgaattatttattagtatgagtaattatataccttttgacaaataaaattccaggcctggatagctctgatacagaatccttttaaaatatataaggaagatcttgcccataaaaactgaaaacacgtaactgcttaaaaatattaagactgtgatgtgacccacagtgagagacacactctcttcttgctctttcctgttccagagagagccatgcttagtatgtatttggttgaatccttgtcaaacagctttctgggcagcgtcttataactggttatgaagacttggaattcttagaaattatgaatgtcaatatttagctccagaaattataaaactcttcttctttatagttggagaatattggcaactttattaaagctattcaggcttatggtatgaagccacatgacatattcgaagcaaatgatctttttgagaatggaaacatgacccaggttcagactactctggtggctctagcaggtctggtacgtacatgtctttaatggctggttgacagattcccaccacattggtgatgaattgcatcattgctttttcatgggggttcagaccaggtggggcggggcctgtctcttctgtaattagtagctttgtggaaaggctgctgacatcagctgcatcgtactagatagcttacttagaacactcacatttcaaatgatgcagtatattattgaacagccttaaatactttttatctctagtttgggcccctttgtctatggacatatcatttctttgttgttccttctgtgaaactctgttggccttttcagttagtgtgcatgtttctgtctaggctaaaacaaaaggattccatacaaccattgacattggagttaagtatgcagaaaaacaaacaagacgttttgatgaaggaaaattaaaagctggccaaagtgtaattggtctgcaggtaagtaatgtggtgttgcttattcaattacttattcaatatgattaattctcaccatgcaaaatattaagcctctcctaagaatagatagaagtactatagtactggggggggtgtagtttatacaatttatatctatttataaagcccataagacagtgataattttttagaggaaacctcaggtatgccacctgacttgacaattatttctccaggaaacgaaaatttttaattgaatcatattgtcttttttttttttttttaaaagaaaaatacacttttaaattttttattttatctttttttttttgagacagagtctcactcttttgcccaggctggagtgcagtgacgcgatctcggctcactgtaacctccacctcctgggttcaagcaattctcctgcctcagcctgccaagtagctgggattatgggaatgagccaccatgcccggctaagttttgtagttttagtagagataggatttcaccatgttggccaggctggtcttgaactcctgacctcaggtgatctgcccgcctcggcctcccaaagtgcttggattacaggcgtgaactactgcacctggcctgttttatcttttatatatagatgggatctcactttgttgcccaggatagtctcaaactctggagctcaagcagtcctcctgccttggcctcccgaagtgctgagattacaggcatgagctaccacacccagccagaaatgtactttataaattccttaatgttattgaccaaattaggcaattttacacgaccttaatgccaaagtcacttatttacagtaccaaatcatgatatagcagccaagccctgttagaatttgtcagtttaaattcttctgaaatacgtagttcagatgttttccttctcttcattgttctcttcactggtcatggaaacgtcattgctaattccccaaatgctgttggctttactctccaaaagccactgtacctgcttgatacagtgcccctttctactgagtctatgcaagttagatttatttttacacagtacaaaattgtattggtggtgagaaactggaaacctaaatttcagaacagtagtcagttggttgaattacaactccataaaagcaaagtgtaatgtaaaattatacactagagtttgaaaagataggttatgggggaaaaaaatcagatcatcaaatactgtggtcagtatggatttttaaaattaaaaatgcacatgtttttgtatgtatttgtatatatgtgcatctatagatatatacatagacacataggttaaaaagctaaaaggatattcacaaatgttgacagtgaatggatggtggtatcacaatgatttttcccccctcctttttgcttatatgtgttttctgaattttcttcaatgaacagattttatattagtaataaagattttctttaatcttatttttaaagaaaaaatatccaacatcagaaaagtgtgcctaaccagtggaacagggtgtaatggttggtcctgaagccatactgttctcagtggggaagaaaaattaattattgtttccctgaactttgctgagttcaaattcctcattccacctttctccagctctgtccaaggacatgggagttacaggaataaaatgtggttcctttctggagaaaatgttggtgattttgaaactttaaaaagcccttgttaagctcccagagaaaacacttggcatttgctttcacattttatgtaaaacattcctggagtagaacagcatattgcttggcctaggattacttctgttgaaataaccgaagctggtacctcttaatttggttatctggggaaagagtagcagaggaaattattctgccactgtaatgacttttggtgtgtcagtccacctgttaaagtgtgtttaattcttctatgtatgagtttttatctatagtgactttaaattttctttttaaagttagcacttgaaatttgtttgtagacacatagaagagttgactggagcctcagctcagtaacttgtcggttgtgccccttctgtctttttggtagcatggaaagttttgtttgtgttgtgtatattgttgacatctgataatttgtgcaattttatttttaacttaaaagatgggaaccaacaaatgtgccagccaggcaggtatgacagcttacgggactaggaggcatctttatgatcccaaaatgcaaactgacaaaccttttgaccagaccacaattagtctgcagatgggcactaataaaggagccagccaggtaagcaatacctttttatacgtgtacaagagtacacttaccttatttttattaaccagaagtttaaagtaggtattttttgtatagtttatttagagtatattccttcaggaatgtggactttgctgggaaagcaaaataatcaaaagaccttttcgatagcagcaaaagcatgatgtgtctcgtggtttttgttggcagttagaacagctggcctttctacctagccagcagaaaaaaagatatgtttattacagtgttcttgctccaaaatccaagtaaaatattgctcatttaaatgctgacttttttttttaaggagcccttaattaataggtaaaattacctggtgttccactaagaaggatttaactagcattcctattagatgtgtcaatataaggagatggaaatgcaacatggtgaaaataccagtataccacatccaagatagaaatatttccttgttaaaaatagatcaccagcacctcagaaggaagttcaacaaccatttgagaacagacaggtctcacatccaacaacagctgggatagggtttgaaaaacattttcttaccgagtccaagggagatttatcaaactttgcccttatggaacacatcctaccgggtgcggcattatgtctctcatagctgccactcacgtttacttttctacccactctgaacctggaagtgtgtgcttgatgtaagtagagagatgaagtatgagttactgtactctgaaaaagaggggagtggctgtgaagtggctggttcttctgtatctcagccttttgaaaagactcaagtccttaagatctgctcaacatagtttctgttgaatatattataaatttttgaaattggtaacccagataatgtatgtggtccccatgggcattcacatggaactttctggtgtggaagcattatgatttcacattctttatgtctcattctctcttaaatccagagtaggtagtaatgtctccattttgcagtttgagaaacctaaagctaaatttacgtgtttgaggccacatagtaattttatagcagagcaaggattttgaagaaaggtctcacctagctcaaaagccaatgaatattgcttcatggaagtgattcggtatcaggatattttggttaagctagctttacccctgaaccaaatgaaagttcatgtattactgttcatattcaatgtgaattctataatttataaattattcacaagaatagattctagctgctgttttaacttttatactatgttctaataccaggcagggatgttagcaccaggtaccagaagagacatctatgatcagaagctaacattacagccggtggacaactcgacaatttccctacagatgggtaccaacaaagttgcttcccagaaaggaatgagtgtgtatgggcttgggcggcaagtatatgatcccaaatactgtgctgctcctacagaacctgtcattcacaacggaagccaaggaacaggaacaaatggttcggaaatcagtgatagtgattatcaggcagaataccctgatgagtatcatggcgagtaccaggatgactaccccagagattaccaatatagcgaccaaggcattgattattagatccacacagaaggagctcagtatttagtcctttgtttttattcagtgagaaccaagctagccttgagtaatttttatcttgtcttcctaaaacactattaagcttattgtacttttaagaaaaattgccttacgtacattcctttttcctttttctgcctcttccctcaatagttgccttttagtgctgtaatagttaaatcctacagcataatcaataactcgcatatgaagtaaaaaggaatactgtgaaaggggagtactcttgtacagccagttcttttatgcaaaaatctatgcatttttacaatcttatattaaactggtattttcaaacaataggaaactttttttttttttttttttacagtttagtgtatctggtttctacatggaagactaaactcatgcttattgctaaatgtggtctttgccaactaaatttaagatgcagcattttagaaatttacatatcaatgtttctacagtattgtttgctaatttttaaataaagtcatgatcagtgtgcatttgtgattatatgtgtactcattctcttacctagcgaacaagatcttttcagagtggtgtttctaaaagagcatgtacaaaagtggcctgtggacatttaggcctgggtgatgcatttgctcttcctgtttgtgccaatgtatcaatgtagagttgctctgttttcttcaactgtatttattgctgcatttctcagcataaacttatcccattgtattttttataaataaatattttttttgaactttcatatgaaccacaggctgatta

SEQ ID NO: 872 - DNA, 2582 bp, Homo sapiens
ggaaccaacaaatgtgccagccaggcaggtatgacagcttacgggactaggaggcatctttatgatcccaaaatgcaaactgacaaaccttttgaccagaccacaattagtctgcagatgggcactaataaaggagccagccaggtaagcaatacctttttatacgtgtacaagagtacacttaccttatttttattaaccagaagtttaaagtaggtattttttgtatagtttatttagagtatattccttcaggaatgtggactttgctgggaaagcaaaataatcaaaagaccttttcgatagcagcaaaagcatgatgtgtctcgtggtttttgttggcagttagaacagctggcctttctacctagccagcagaaaaaaagatatgtttattacagtgttcttgctccaaaatccaagtaaaatattgctcatttaaatgctgacttttttttttaaggagcccttaattaataggtaaaattacctggtgttccactaagaaggatttaactagcattcctattagatgtgtcaatataaggagatggaaatgcaacatggtgaaaataccagtataccacatccaagatagaaatatttccttgttaaaaatagatcaccagcacctcagaaggaagttcaacaaccatttgagaacagacaggtctcacatccaacaacagctgggatagggtttgaaaaacattttcttaccgagtccaagggagatttatcaaactttgcccttatggaacacatcctaccgggtgcggcattatgtctctcatagctgccactcacgtttacttttctacccactctgaacctggaagtgtgtgcttgatgtaagtagagagatgaagtatgagttactgtactctgaaaaagaggggagtggctgtgaagtggctggttcttctgtatctcagccttttgaaaagactcaagtccttaagatctgctcaacatagtttctgttgaatatattataaatttttgaaattggtaacccagataatgtatgtggtccccatgggcattcacatggaactttctggtgtggaagcattatgatttcacattctttatgtctcattctctcttaaatccagagtaggtagtaatgtctccattttgcagtttgagaaacctaaagctaaatttacgtgtttgaggccacatagtaattttatagcagagcaaggattttgaagaaaggtctcacctagctcaaaagccaatgaatattgcttcatggaagtgattcggtatcaggatattttggttaagctagctttacccctgaaccaaatgaaagttcatgtattactgttcatattcaatgtgaattctataatttataaattattcacaagaatagattctagctgctgttttaacttttatactatgttctaataccaggcagggatgttagcaccaggtaccagaagagacatctatgatcagaagctaacattacagccggtggacaactcgacaatttccctacagatgggtaccaacaaagttgcttcccagaaaggaatgagtgtgtatgggcttgggcggcaagtatatgatcccaaatactgtgctgctcctacagaacctgtcattcacaacggaagccaaggaacaggaacaaatggttcggaaatcagtgatagtgattatcaggcagaataccctgatgagtatcatggcgagtaccaggatgactaccccagagattaccaatatagcgaccaaggcattgattattagatccacacagaaggagctcagtatttagtcctttgtttttattcagtgagaaccaagctagccttgagtaatttttatcttgtcttcctaaaacactattaagcttattgtacttttaagaaaaattgccttacgtacattcctttttcctttttctgcctcttccctcaatagttgccttttagtgctgtaatagttaaatcctacagcataatcaataactcgcatatgaagtaaaaaggaatactgtgaaaggggagtactcttgtacagccagttcttttatgcaaaaatctatgcatttttacaatcttatattaaactggtattttcaaacaataggaaactttcttttttttttttttttttttacagtttagtgtatctggtttctacatggaagactaaactcatgcttattgctaaatgtggtctttgccaactaaatttaagatgcagcattttagaaatttacatatcaatgtttctacagtattgtttgctaatttttaaataaagtcatgatcagtgtgcatttgtgattatatgtgtactcattctcttacctagcgaacaagatcttttcagagtggtgtttctaaaagagcatgtacaaaagtggcctgtggacatttaggcctgggtgatgcatttgctcttcctgtttgtgccaatgtatcaatgtagagttgctctgttttcttcaactgtatttattgctgcatttctcagcataaacttatcccattgtattttttataaataaatattttttttgaactttcatatgaaccacagctgattatttt

SEQ ID NO: 873 - DNA, 2579 bp, Homo sapiens
ggaaccaacaaatgtgccagccaggcaggtatgacagcttacgggactaggaggcatctttatgatcccaaaatgcaaactgacaaaccttttgaccagaccacaattagtctgcagatgggcactaataaaggagccagccaggtaagcaatacctttttatacgtgtacaagagtacacttaccttatttttattaaccagaagtttaaagtaggtattttttgtatagtttatttagagtatattccttcaggaatgtggactttgctgggaaagcaaaataatcaaaagaccttttcgatagcagcaaaagcatgatgtgtctcgtggtttttgttggcagttagaacagctggcctttctacctagccagcagaaaaaaagatatgtttattacagtgttcttgctccaaaatccaagtaaaatattgctcatttaaatgctgacttttttttttaaggagcccttaattaataggtaaaattacctggtgttccactaagaaggatttaactagcattcctattagatgtgtcaatataaggagatggaaatgcaacatggtgaaaataccagtataccacatccaagatagaaatatttccttgttaaaaatagatcaccagcacctcagaaggaagttcaacaaccatttgagaacagacaggtctcacatccaacaacagctgggatagggtttgaaaaacattttcttaccgagtccaagggagatttatcaaactttgcccttatggaacacatcctaccgggtgcggcattatgtctctcatagctgccactcacgtttacttttctacccactctgaacctggaagtgtgtgcttgatgtaagtagagagatgaagtatgagttactgtactctgaaaaagaggggagtggctgtgaagtggctggttcttctgtatctcagccttttgaaaagactcaagtccttaagatctgctcaacatagtttctgttgaatatattataaatttttgaaattggtaacccagataatgtatgtggtccccatgggcattcacatggaactttctggtgtggaagcattatgatttcacattctttatgtctcattctctcttaaatccagagtaggtagtaatgtctccattttgcagtttgagaaacctaaagctaaatttacgtgtttgaggccacatagtaattttatagcagagcaaggattttgaagaaaggtctcacctagctcaaaagccaatgaatattgcttcatggaagtgattcggtatcaggatattttggttaagctagctttacccctgaaccaaatgaaagttcatgtattactgttcatattcaatgtgaattctataatttataaattattcacaagaatagattctagctgctgttttaacttttatactatgttctaataccaggcagggatgttagcaccaggtaccagaagagacatctatgatcagaagctaacattacagccggtggacaactcgacaatttccctacagatgggtaccaacaaagttgcttcccagaaaggaatgagtgtgtatgggcttgggcggcaagtatatgatcccaaatactgtgctgctcctacagaacctgtcattcacaacggaagccaaggaacaggaacaaatggttcggaaatcagtgatagtgattatcaggcagaataccctgatgagtatcatggcgagtaccaggatgactaccccagagattaccaatatagcgaccaaggcattgattattagatccacacagaaggagctcagtatttagtcctttgtttttattcagtgagaaccaagctagccttgagtaatttttatcttgtcttcctaaaacactattaagcttattgtacttttaagaaaaattgccttacgtacattcctttttcctttttctgcctcttccctcaatagttgccttttagtgctgtaatagttaaatcctacagcataatcaataactcgcatatgaagtaaaaaggaatactgtgaaaggggagtactcttgtacagccagttcttttatgcaaaaatctatgcatttttacaatcttatattaaactggtattttcaaacaataggaaacttttttttttttttttttttttttacagtttagtgtatctggtttctacatggaagactaaactcatgcttattgctaaatgtggtctttgccaactaaatttaagatgcagcattttagaaatttacatatcaatgtttctacagtattgtttgctaatttttaaataaagtcatgatcagtgtgcatttgtgattatatgtgtactcattctcttacctagcgaacaagatcttttcagagtggtgtttctaaaagagcatgtacaaaagtggcctgtggacatttaggcctgggtgatgcatttgctcttcctgtttgtgccaatgtatcaatgtagagttgctctgttttcttcaactgtatttattgctgcatttctcagcataaacttatcccattgtattttttataaataaatattttttttgaactttcatatgaaccacaggctgatta

SEQ ID NO: 874 - DNA, 4114 bp, Homo sapiens
tccttatcttaaaaaggtttatttattagttgtgcacttacaaacttacctcagttcttacatagtgtactttgtaagttgatgcatataaacatggttttagaagagtttttctgtcctaatttgtacaaaaaaaggtaaactaatatagttccagtattgttacctggtcaaacaataatgacaaagacaatgaggaagaatagggtttattaggtcttttaaaaaaaaattcactaacttttctctagtggtctcatcttctattctgtaaatggctcttagaaggaaatgttttccaggtacagatacctaaatgggtatctatctcacaatggcctggagttctgttccctcctcattccttaatgagtgcttgtcctgctgtgcccttgcattgtttaatttgttgctcctttttacgaaactctgaaaaacaaaagaacaagttagaatagtattatgtgtctgtactgttgataacgtaggggccgagggaaaacttctcctttgccctctgacggtttgctgaagaattaacttacaaaaggcagattaacaggagaaatggcatataaagtagcacaggggagaatcacagtgagtgtctaaatggggtacagataattctgtttttgggaaagggagatggggaagtgtggatgattttatgggggtggtgaattacttttaggggagtttaatgagcttgaagaacacttagtggctgggaacaaagtctgttgggcccacaggacagtggtttgtgacaaaagtctgtccaggtgtgttgactgaatttagtctttgtttctgctatataagtccagttaatggaaaactcagggaaggggccagaggtggtttttttctttggtgggtctggactttaggcagataaggggatttcattcagatgacagcttcatcctgtgctttgggagaaggtcagagagttcttgaggcttcttcagttcagcatgtcaaagtgccatattatggagtatcaatttctgagtcccaatgatagccatttacaagttcttggccttaaatttcagataactggatccttaagaaagtttcttctgttgaaaaaactattttaaggggtaaatttcaaggtggattttttttgggggggaggtggtggagacggagtcaccctctgtcgcccaggctggagtgcaatggcgccatctcagctcactgcaacctccacctcccgggttcaagcgattctcctgtctcagcctcctaagcagctgagattacaggcgcctgccactgtgcctggctaatttttgtatttttagtagagatagggtttcaccatgttggccaggctggtctcaaattcctgacctcatgtgatccacctgccttggcttcccaaagtgctgggattgcaggtgtgagccatagtgcccggatttcaaggtggatttttaactggaaaagtaaatcaggggatggagacctggctagctacataccaccatcataagcactttccttagagtacatacaaataagtcaataaacaagtaaaaagtaaaaattgtattttggctgagtgcggtggctcacaactgtaatcccagcacttgtgggaggccgaggcagatggatcacctgaggtcaggagttcaaaaccagcctgaccaacatggtgaaaccccgtctcttctaaaaatacaaaattaggcgtggtggtgcacgcctgtaatcccagctacttgggaggctgaggcaggagaatcgcttgaacctaggaggtggaggttgcggtgagctgagattgcgccattgcactcaagcctgggcaacaagagcaaaactctgtctcaaaaaaaaaagtaaaatttgtagtttatgttttatatggagaaggatgaggatacattaattataaattgtagaagtggttcttaaaaaattgagtgcctgctgaaccaaagagtgcattaaatgctctgtttaaagctaaaagggctttaacacctaatttttatggcaacagaatgaaagaaaagtatgcaaatatcatataactcagacaaggaaaagagatgagacatcattcagctgttaaaatatccctgtctacccaggataaggcaaataagcaacaactgtgttgcaaaggctgttgcaaacagctgcctgctatttccagatataagcagtatgggcgctccgctgagggtgtggcttttctcacactggtgtgcctgggctaataaagggcctgagaattgcagatctgtcaatactggcacagaggagcacacaagtgtgctctccctaatatagtgggtatgaacatcatgcttggagatgcaaaaatgctttagaaaaagatcaactgttaaacttctagaccacccaaaaggccagatcatgccatgagcaccaaagggagctgaactactgtgttcaggacatcttctgcccagggtaagaagtgctgctgctacttaggaatccatctgatcagcattcttgttcagcttcacttcttcagggagaaggttctcagaaagggaggtgggttcagccttggagagttcagcgcaaatcccactttcaggcccgggggtagtagaagcctcagagccctctagaagagagaggctgggtatgagcctctttcgtgtgtgcagctttacaaaactttcaagattgcgagcatggagattgcaactggaaatgaaatgtttgcttaccagaaattcttgatccataaagtagggcttttctgacgatccatcatttgtttccagatcaacagcaaaacacaggaaaagtgcatccagcacagtttcaaacacagataaaaaactatgggctactaagtaggcaaaaaaagctaccaataacagagggactgcccacacctggaatgcccgattgtagttaaaagccatgagtcctccaaaaacagtgaaacacaccactaacacctgtgcaaaagaagagtttgttgaaaatctttatgaatcagttgcttagatgtttttgtcagttacaagtaatggtttaatatacgttcctgtgtgcaacgtgtgtgtgcactattgtaaagaatgcttgtcagaaattttggcagaatgaaatagaggaaaaaatgaaaagctgtatcaaaaggaaacccagttaatggcgagtaggaaggttatatgtaattttatctgtgcctagcttttgtatttatataaatgtaataatatctcacaagctttttattctgctttttcacttaacaccaaaataagcctattcactttaaaactttttttagaaaccatccctctttcttttgagacagagtctcgttctgttgcccaggctggagtacagtggtgtgatctcggctcactgcaacctccgcctcccaggttcaagtgattctcctgcctcagcctcctgagtagctgggattacaggcacccgccaccacacccggctaatttttgtatttttagtagagacggggttttcccatgttggccaggctgatctcaaactcctgacctcaagtgatctgcctgcctcggtatcccaaaatactgggattacacatgtgagccactgtgcccagtccaggtttcaatactctttccatatattcttaatgagaaacccacaaacgttcattttctgagattagtagcattttcattttagacctgaaaaagagggaatcagaatggtagaactgatcacaggtaagagagtaagactaagattaaaattctggctctacctattgtagtaccctggaaaggttattaaaccttcattttctcttctgcaaagtagggatacctcatgggattgaggattaaatgagataatgaagcacagcacccactatagagtaagtactcaagaaatatagttccctttcaaaccaattgttgtatggcttaattttcagaatcccaggctcctttatttagtcaagatatctcacctttcctagaaaaattatgaagtctccaaagcagttaatagatgtaaagtgacttgagttcttggacaagattttgaatgcatcttttgctgatgtacagaaatctgtcccattaatagcagttgtagtatatgc

SEQ ID NO: 875 - DNA, 240 bp, Homo sapiens
tcacatgtttgggtgtcaggttcaattctagatactaagaatctgaatgaactagatgcttttcctgcctgtaagaagtctaataggatagagactacataaacagaatttaaatattgtacagtaattagtactgaggaaagtgtgtgtgtgtgtgtttagtatatagtgtgtatttggctgaatagaaggcaaataccagaactttccagtcaacaaaactattggaatgttatgtat

SEQ ID NO: 876 - DNA, 1115 bp, Homo sapiens
tccttatcttaaaaaggtttatttattagttgtgcacttacaaacttacctcagttcttacatagtgtactttgtaagttgatgcatataaacatggttttagaagagtttttctgtcctaatttgtacaaaaaaaggtaaactaatatagttccagtattgttacctggtcaaacaataatgacaaagacaatgaggaagaatagggtttattaggtcttttaaaaaaaaattcactaacttttctctagtggtctcatcttctattctgtaaatggctcttagaaggaaatgttttccaggtacagatacctaaatgggtatctatctcacaatggcctggagttctgttccctcctcattccttaatgagtgcttgtcctgctgtgcccttgcattgtttaatttgttgctcctttttacgaaactctgaaaaacaaaagaacaagttagaatagtattatgtgtctgtactgttgataacgtaggggccgagggaaaacttctcctttgccctctgacggtttgctgaagaattaacttacaaaaggcagattaacaggagaaatggcatataaagtagcacaggggagaatcacagtgagtgtctaaatggggtacagataattctgtttttgggaaagggagatggggaagtgtggatgattttatgggggtggtgaattacttttaggggagtttaatgagcttgaagaacacttagtggctgggaacaaagtctgttgggcccacaggacagtggtttgtgacaaaagtctgtccaggtgtgttgactgaatttagtctttgtttctgctatataagtccagttaatggaaaactcagggaaggggccagaggtggtttttttctttggtgggtctggactttaggcagataaggggatttcattcagatgacagcttcatcctgtgctttgggagaaggtcagagagttcttgaggcttcttcagttcagcatgtcaaagtgccatattatggagtatcaatttctgagtcccaatgatagccatttacaagttcttggccttaaatttcagataactggatccttaagaaagtttcttctgttgaaaaaactattttaaggggta

SEQ ID NO: 877 - DNA, 1115 bp, Homo sapiens; identical to SEQ ID NO: 876

SEQ ID NO: 878 - DNA, 21982 bp, Homo sapiens
gagaccatggcgagcccagggaaagacaattatcgaatgaagagctataagaacaatgctctaaaccctgaagaaatgagacgaagaagagaggaagagggcattcagctccggaagcagaagcgagagcaacaagtgagttaatgggagtattctcaaacatactattctgggaaacaagcccctatggttggcctccaccatgcaccctgacttgccctgtagaaaagtagcttactaggtgggcatggtggctcatgtctgtaatcccagcactttgggaggccaaggcaggcagatcacctgaggtcaggagttcaagaccagcctggccaacatggtgaaacttcattttctctactaaaaatacagaaattagccggacgtggtggcatgcgcctgcaatctcagctacttgggaggctgaagcaggagaattgcttgaacctgggaggcggaggttgcaggagctgagttcgtgccattgcactccagcctgggcaacaagagtgaaactccatctcaaaaaaaaaaaaaaaaaaaaaaagaaaagtagcttacttactgagtgagctactcatccagtttcctttgttgtaaataaatgttgggagctttgagaaagagaaaactgaccttatccccttttcacaagttagaccaacttagacatcatttatgtctttactgtaacattctagttctagttccttgttaccttttcttttcttttttttttctttttttttttttgagacggagtctgattctgtcacccaggctggagtgcaatggcacgatctctgctcactgcaacctctgcctcctgggttcaagcaattctcctgccttagcctcccgagtagctaggattacgggcatgtaccaccacgtccaattaactttgtatatttttggtagagactgggtttcaccatgttggccagactggtctcgaactcctgaccttgtgatctgcccagatctgcccgcctcagcctcccatagtgctgggattacaggcgtaagccaccacgcccagcctgagactataataatgcctcaccatctgcactcctacgccaccccgccaacagattcagtcacctgattattattatttatttatttatttatttatttatttatttatttattgagacaaggtctcactctgtcacccaggctggagtgcagtgagtgcagtgagtgacatgatctcagctcactgcagcctcaagctcccgggctcaagtgatccttcttcctcagcctcctgcatagctggactataggcatgtaccaccacgcccggctaatttttgtggattttttttttttttttttttttgtacagacagggttttgccatgttgcccaggctggtcttgaactcctgagctgaagtgatccacctgccctggcctcccagagtgctgggattgcaggcatgcgccactgtgcctggccaacctaacctgattttgcccacccttttgctatactatcattcctttttttcttttttttttttaagacaggatcttgccctgttgcccaggttggagtacagtggcgtgatcttggcccactgctgcctctgcctccaagtccttgaatatcttttccatgttagtaatcaatagtctcctcttctctttgtggaatacattccaggacccacagtggatgcctgaaactgcagatattactgaaccttacatatactatgttttttttcatgttttcatctttttacttaaaggaagcactttacagcttctctttggcacatttgaattgccagcatcactactcttgcactttgtggctattactaagtaaaataagggttacttgaacacaagcaattgccacctgataaccaagttggttattaagtgactaactggcagcagcgtatacagcatggaatggatgcactggacaaaggatgttcacatcctgggccagacagaacaagatagcgtgaaacttcaacactactcagaatggcatgcaatttaaaacttatgaattgttcatttctggaattttctgtgtaatattttcagaccacggttgactggataactaaaataatagaaagcaaaactgaataaggggagactaatgtataaagcttggcctcacttctcagctactctagtatatccttgtcagttatgccataatttaacattggattgttctttgttttctttggttcagagagtactcttaaccactgtctctttactttcagctttttaaacggagaaatgtggagctgattaatgaagaagctgccatgttcgatagtcttctcatggactcttatgtgagctctaccactggggtaaggcccctgcatgtgcctcaggctgacctggaaaacacctgcttctaaggacagaaattgggccgttcacatcatctaccagctttgccagtaaccatgacaagttctttcctctgtggaccctttcgtcagctttaggagtcaacaaagattcaactttgttagatatatctgaggaaacatttaagagaagccatcagttgcctcagaattaggaatcacttttcaaatgtcccaacttgaagcacctatagattaaacagaccccttctcctgagcctattatgccatcctcttgccctcagttttttagaaaacaggatgccaagcagtattatgtgctcacatctggctctaatgttggtttgcaaagtcctaaacttgttttatgttctaggagagtgtgatcacaagagagatggtggagatgctcttttctgatgattctgacctgcagttagcaaccacacagaaattccggaaactgctctccaaaggtacaaagcctggcccttgtcagagaggccttatatgatttagcctcttttctcttcactgatgtcatcaacttacacgtgccctcactcattctgctctagccctactgaccttggtgttgcttgtacaagatagacacattgctaccttcacactggatacttcctctgcctgatgtcctctattcccagatatctttgtagcaactcccttactcctatgattaaatcccaccttcaacagttttatctttttaccttgccctacatattctcctcctctccccccattatatttatcttctaacataataaaatgactcttcccactaggatataaactctctgagggcagagacttttgtttttgttccctcctgtgtcctctgtacctagaactgtgtggcacaccataggtacttaataaaaaaatttaatgtatgattggaaaaatacctcttgtttcagtatatcaaatagtcttcccaagaagagagtactggtctttcttgaaagggaaatgtgcagaccatggttgttcatcccttaggtggttctctctcccacacctttctttgcttacatttagtaagccaaagatgaacattcttaaattaggattggctttactctttaacattccagctgtattatacagttcaaagacgagtagatattgttaaaaccaccttaccagaagggagtttgggaatgtttgtaagggtggtcagaagtgtctaagaaggattgcaagctgacccccatgaagggatcagcaaaagcttctcctgtgtttttattttcccttctcccttatccagagcctagtcctccaatagatgaagttatcaacactccaagagtggtggatcggttcgtggagtttctgaagaggaatgagaattgtacattacaggtgaggcctgaagggaaggggtttgttttgtcttttaatttttgggggatacatagtaggtatatatatttatgggatacatgagatgttttgacacaggcatgcaatttgaaataagcaaatcatggagaatggggtatccatttcctcaagcatttatcctttaagttacaaacaatccaattatacactttaagttattttaaattgtgtagttattattgactatagtcaccctattgtgttaccaaatagtaggtcttattaattctttctgggtttttttgtacccattacttatccccatcccacccccagtcccccactactgggaaggggttattagatgaaagccctacttccaagaaattgcagtgggatacttctattgacatatctctcaggaagttcaaaagtaatgttaggaaacattcaggagaaaccatcagttccctcacagccagaatctcttccttaaaacaatttcaaaggaaaggcaccagactatgatagactgatcattcagttataaatcagaggctatagtccactacctgtgtgacctgaggcaaattgtttagcctctctgggtctcttgtttcagagatgggtgatgggtcaatccattggaacttgccagaactcagctgaaagggactttgagagacccatttcattctaatcctcatttcagaaatgaagaaagtgaagctcaggaaataaaagagtgacctggcaaaggatgcatgggtgttgtggtagtgcaggactaaacctgggaccctggaagcccaatgtcttattctcatctatatcacatcactgcatcttcccactctctaaagacgggaggggaaaggcttgtattttatgtgtgtgtgttttaaattcgtgggcaagaggcttgcttgtgttttgtgaggttttgttttggttttttaaattcatgggcaggaggcttactgttctgagccagctgataggcatggctgctcagtctgaaatgacctttcaatcattgcttaatctcactttcagtttgaagctgcctgggctctaacgaatattgcctctggaacctctcagcagaccaaaattgtcattgaagcaggggctgtccccatttttatagagctgcttaattcagactttgaggatgttcaggaacaggtaatgcttagatttggtgtgattctttatagtacctgtggtataataaaaaatatatttggtctttgtcctggttcttggcacagtgttaaaactcttggaatttcctgagtgataggggtgtcaagtacagatggcccctgggacttgcaactggtatctcaagttggggcagtcttgtgggactaacctgcggactctgcattaactctaggtgttagagtcagaattgaattaaatcgttggacacatggttggtatcagagaatgggtggttgatgtggaaaaaactctatacatttgttgttggaagtgccattggaaaaaagacaccacagtacccatatctgagtacccacaaatcatggagataaagatacaacttccatttctcccattgaattcttactagttggatagaattggagagtggtagtgggctcttttatagacttggtccaaggcagctacaagagtgcaactttcgccaggcgcggtggctcacgcctataatcccagcactttgggaggccgaggtgggcagatcacgaggtcaggagttcaagaccagcctgaccaacatggtgaaactccatctctactaaaaatactaaaaagttagctgggcatggtggagcttacctgtaatcccagctattcaggaggcttgagacaggagaatcacttgaacccgggaggtggaggttacagtgagcagagattgtgccactgcactccagcctgggtgacagagcgagactccgtctcaaaaaaaaaaaaaaaaaaaaatgcaactttctgattactttctccttttctgggcgatattgttttggcttctgtggctatagtacagatggcagcctgtctttccctgctgaaccaggaactcccagggataggtcattgtagaacaagtgctcagtaagaatttcaatagggaggttacctgagcttgtgtagtatatttggggccttgacatcattctcatcctggtgggtactcactttgcagttgtggctataaagtactcacaggagtaccaagctttgtgggtgacagtttcattatccccttttcaggcagtctgggcactgggaaacatagctggagatagctctgtttgccgagattacgtcttgaactgttccatccttaatcctttgttaacgtgagtaattataatcatctgtacctgggcgtctactgggtggccacgtggcaggtcatttgggggcagcatacttgattccttaagatgataggtaagtgcaaaaactataaaaatgcattctgattgccaaagtaaaagataggtatctttggagattgagaaggttgtggccgggcatggtggcttatgcctgtaatcccagcactttggtaggccagagcaggtggatcccttgagcctagagttcaaaaccagcctgggcaacatggtgaaaccccaactctacaaaaaatacaaaagttagccaggtgtggtggcaggcacctgtagactcagctacttgggaggctgaggcagggaggatcacctgagcccagggagatcaaggctacagtgagctgtgattgatcacaccactgcacttcagcctgggcaaaagagtgaaaaaaaaaaaagattgtgccacccatctgccaaaaaggatcttgttcctcacttcatggcactgcagaacctcatgttagtcatatcctcatatcctcctcattgttgagccaggggagagaggcaggactagcccacctggaaaaatccaaccttctctacaaaatgcattgatttgttatggggttttgcatacatacatcggacagctctgtcgtaaattatagatcaaagaccccgtgaagcgtcattgtatccttctcccatccttccctccgtacccttagagtaaactatgcctaaaccaaaacagatgaatgaactgttcttcagagaccacagtctcatagcctaccactgtcactttcttggacccttcacagaaaattattccatactgtgtggctaaagctctcacagtagacctatagcttttatttcttagacttttagcttttatttccagagaacaccattccttgtcctggacttgtggccagggttatgggcatgatatatcccactttagaagctttacaggcttactccagatctagccctctgtttcgtccctattatctatggtattaactagccacagctggtcctgaaatgaatactctgtatagagcctggcctcctaacctataccagctctattaacttaggtctgtgagtaggaagaaacaggctgctagagtctgagaggtctcattggatttgtctctgggttcattggcaacagtcctatgccaaggcctcagtgctcaggatctggctttgctgtttccttcagactccttaccaagtccacacgactgacgatgacacggaatgcagtctgggccctgtcaaatctctgccgagggaaaaacccacccccagagtttgcaaaggtgagagagctacttactagaccctgagtgacatcaggttccttcatatggagtttttaagtctttgggatactccttggagtctcaaatcatgggaaactgaaagaagcaattgttagtgaagtagatgatcttgtgtacctggatagtaaagtgaaaaggtagacccaaatgtttaatgtagtagcgatccctagggtctggaattacttgtgtgtgtgtattgtgggggcggtggttgcaatgttagggttcgtgatagagctgatatagtcttgttcccctgtgagtctttctcactctgcttcccacaggtctctccttgtttgcctgtactgtctcgcctactcttcagcagcgactcggacttgctggcagatgcttgctgggccctttcttatctgtctgatggccccaatgagaagatccaggcagtcatagactccggagtctgccggagattggtagagctgctgatgtgagtggtcttagaaggggtacaggttctggctgggcacggtggcttatgcttataatcccagcactttgggatgccaaggtgggcggatcacaaggtcaggagttcgagaccagcctgaccaacatggtgaaaccccgtctctactaaaaatacaaaaattagctgggcgcagtggcaggcgcctgtaatcccagctacttgggaggctgaggcaggagaatcatttgaacctgggaggcagaggttgcagtgagccgagatcgtgccattgcactccagcctgggtgacagagcaagactccgtctcaaaggaaaaaaaagaatcccagcactttgggaggctgaggcgggtggatcacaaggtcaggagatcaagaccatcctggctaacacggtgaaaccccgtctctactaaaaatacaaaaaattagccgggcgtggtggcgggcacctgtagtcccagctactcgggaggctgaggcaggagaatggcgtgaacccgggaggcagagcttgcagtgagccgagatcgcgccactgcactctagcctgggcgacagagcgagactctgtctcaaaaaaaaaagaaaaaagaaaaaaaaagggtacaggttccttaagcttctccaggctcagactaaagagagagaatcagcagggccgaaaatggtgtgctggccttctgatcagatctccctcctctgtaggcacaatgattacaaagtggcttctcctgccctgagagccgtgggtaacatcgtcactggggatgacatccagacccaggtaagaaagaggagggtgcaggatcttagaccagctatggaagagcttgtggagagctgccagtggacaaaagcctttcctgcaaagggctgtggtcctgatgggaggcactatggtctaaggaagtaagtgtgggcttgagtgaaaagttccagctctgttattctctaaacagtcatgggaaacttggttccttcttttcttacataaattgggaacaaatcatcgtctaatgggtgaaggaaaactaagtggaataactggacttaccacctgggacattgtgagttagttaagtttgagtcatggtccctttgagatactgaaagctatggaactccacccctgcttcctagatctttaaggtctcatggatatcatggaccttggaataatcttttgtaaataacccttctggtgaaggcatagtaaacaaagttcccctgctcaaaggctagagatttgggtattctttgggttttgagtagcgagcataattctgtgggattctggacaggtttcttaacaggtgagtagtgtcactcaaacactcaaacccacatgctcattttctgggttactttgtatatgtatatgcatgtactttaaaatacaacataaaatttaccattttaaccattggcataaagtacattcacattgtttttccgttattgccactagccagctacagaaattttttatcatctcaaactgaaaccgtacacattaaacagtaactccccattctcccttcccctagtgcctagtaaccaccattctattttctgtatctgtgagtttgagtgctctaagtacctcatgtaagtggaatcatacagtgtttattctttctcgtctggtttatttcacttagcctagtatctttaaaattcgttcatgttgtagcatgcatcagaactcctttgaaaggctgaatgatattccactgtatgtatataccatattttatttatccatcaatagacatttgggttgtttccaccttttggctattgtgaataatgctgctatgaacattggtgtacaaatatttgttcaagtccccggtatatacccagagtggaattgctggatcatgttctaattttatgcctaatttttttgaggggacaccatactgttctgcacagctgctatgccatcttacattcccaccaacaatgcagcatgttccagtttccccacagccttgccaacagttgttattttccgttttttgttttttgttttttttttgataatacccaccctaatgggtgtgaagtgatatttcattgtggttttgatttgcatttttctaatgattggtaatgttgagcatcttttcatatgcttattggccatctgtgtattttttttttttttttggacacatgtctattcaagtcttttgctcatgttttaattgggttgttgagttttctggttgttcaattttaggagttcttcatatgttctggatattaatctcttatcagacacatgttttgcaaatattttctcttgttctgtggttttatcttttaactttggtgtctttaaaaaaaaaacttttaacttatttaattttttaaaattgagacagagtctgtctttgtcacccaggctagagtgcaatgatgccatctcggctcactgcaacctctgcctcctgagctcaaagcagtccttccacctcagcctcccaagtagctgggactacaggcatgcaccatcatgcctagctaattttttgaatttgtttttttttggagagacagggttttaccatgttgcccaggctactcttgaactactgggcttaagcaatcctcccaccttggcttctcaaagtgctgggattacaggcatgaagccacctcacccagaccaactttcttttcttttttaattttttttagagggtctcactatgttgccccagctggccttgaactcctgtgctgaggtgatcctactgcctcagcctcctgagtagctgggactgcaggtgcataccactgtgcccagcttactccaatgtcttgatgcacaacagtttttcattttgattaagtccagtttacctgggccaggtgcagtggctcatgcctgtaattccagcactttgggaggctgaggcaggaggatcacttgagcccagaagtttgagaccagccctgcaacatgggaagaccctgtctctacaaaaaaaaaaaatgttttttaattagcagagtgcggtggcaccctgctactcaggagtccccagctactcaggaggctgaagtagaaggattgcttgagactgggaggtcaaggctgcagtaagccatgatcatgccactgcactccagcctaggcaacaaagtgagaccctatttaaagaaaaaaaatgaagccgggcacagtggctcacacctgtaatcccaacactttgggaggccgaggcaggcagatcacctgaggtcaggagcatgagaccagcctggccaacatgatgaaaccccatctctactaaaaatagaaaaattttccgggcgtggtggtaggcgtctgtaatccaagcgtcttgggaggctgaggctggagaatcacttgaacctgggaggcggaggttgcagtgagccgagattgtgccattgcactccagcctgggcgtcagagcgagactctgtctcaaaaaaaaaaacaaaaacaacaacaacaacaacaacaacaaaaaaacataaaaaaaattaaaaacagtttaatttttcttttgtttcctgtgcttttggtgttctaggtcattcttaactgttcagccctaccttgccttctccacttgttgagcagtcccaaggagtcaatccggaaggaagcttgctggactatttcaaatattactgctggcaacagggctcaaatacaggtaaaacaggcagggaagtcaaggggcatgggaagtcataggaacttgggaggttgttggaatatttgctttcagaagaaagaatttgtttccctttaaaaataggagtcaattggccaggcacggtggctcacgcctgtagtcccagcactttgggaggccgaggtgggcagatcatgaggtcaggagtttgagaccatcctggccaacatggtgaaaccccatctgtactaaaaatacaaaaattagatgggtgtggtggcggacgcctgtaatctcagctattcgggaggctgaggcaggagaattgcttgaacccgagaggcaaaggttgcagtgagctgagatcacgccactgcactccagcctgggcaacagagcgagactccgtctcaaaaaaaaaaaaaaaaaaagaggggctgggcatggtggctcatgcttgtaatcccagcactttgggaggctgaggtgggcggatcacaaggtcaggagatcaagaccatcctggctaacgtggtgaaaccatgtctcttctaaaaatacaaaaaaaaagaaaaattagccgggcgtggtggcaggcgcctgtagtcacagctagtcgggaggctgaggcaggagaatggcgtgaacctggtaggtggagcttgcagtgagccgagatcgcgccactgcactccagcctgggtgacagagcaagactgtctcagaaaataaataaataaataaattaattggagtcagtgtgtactattggtcaaagaagctgtgtaaccaaaactgggttcttctgtagtagcctgtcacctatataggaagaacaaaagaaaactcccagaatggggaagatgtctaagtctcagctgatttggggactagatttatttatcatgctgaaatgactttctccttccatctgcctcctctcaattctctctcaggctgttatagatgcaaatatcttccctgtgttgatcgaaatccttcagaaagcagagtttcgtacaaggaaagaggcagcctgggccatcaccaatgccacatcaggaggaacccctgagcagatcaggtattacattcctttcccgttgtcttgaatgataatggatgctctccctgtttgctcatggtttacaggtgacctataaactgctcttgctcagacaggtctgccccctagtctcactgtaatagaattttactggtaaactgctacagtgtcactagaatctggaatagattccatgtaagccatgtgggaatctattccagattccagtgacactataacagtttaccagttttcccttctggagaagagaaacatgacatggacatccatcctttctctaccttttcttatccaacagagaactgaaatctatgtagttctcaattcaaatgaaggggaaccgtactatgggttactcaaaacagtttcttcagcctgaccaacataagaagactctgtctctacgaaagacaaaaattagccgggcgtggtggcatgtgcctatagtcccagctgagatgggaggatggcttgagcctggaaggtcaaggctgcagtgagctgtgattgtaccactgcactccagcctgagtgacagagccagagtctgtcacaaaaaaaaaaaaaaacaaaaaaaaacaagcaagctggtgtagtggctcatgtctgttatcccagcaccttgggaagctgaagcaggaggatcctttaaacccaggagttcaagactagcctgggcaacatagggactttgtctcatgtgtacaaaaatgtaaaaattagcaggttgtagtggcgtgtgcccgtggccacagctactcagtaggctgaagcaggaggatcacctgagcccaggaggtcacagttgtaataagctgtgattgtgccactacactccagcatttgctacagagcaaggtcctgtctcaaacaaaaaagcagcttctttgagaaattaatttgggatatgagacttgaaagaagcgaatagaaagctattttgtgtatgtgtgctctttttgagaccgcaacctctgcctcccaggttcaagcgattcttctgctttagcctcctgagtagctggggttacaggcacgtgccaccacgcccggctaattttttgtacttttagtagaaacggggtttcaccatgttagcaggctggtcttgaactcctgatgtcagatgatcctcccaccttggcctcccagagtgctgggattataggcatgagccacctggcctgtgtactcttttattttagtttacattatctgaacattagtggaaagtggtgggaatagttaagtgttttgcccttcacttgttgcctattaaggggagcacagttagtatatataaagtcttaggagaaaagagatagctgttgagttaagctttgaaggataaatatgggattgtaaaaggcctcttagacagggaaaagcataaataaaggtacaggaatcagaaacctggagacctttacaagtgtgactagaatgtattgtccttggaagggaataatgggaggcagagctagaaaggaactaggagccagattgcagagcatccaggctgggctgggcttgtggtattatggtattgttgtgccatagaatttggagttcagcgaattagggagcctgtgaaaaattttatgcagggaagtaatgtgttcagaggggtaatattgcagccaaggagacattagaggcaaggaggaggagtgtttggtagcatccacatgtgaaatgaactagaccaaccacatgtgaaatgaactagaacaatatcaacaggaaggtagagagatagagaaaggataagcggttatcaaggctcagtaagagcagtggctcacacctgtaatcccagcactttggggaggtcaaggtgggaggatcgcttgagaccaggaatttgagaccagcctggacaacataatgagactttgtctctacaaaaaataaaaaataaattagctgagaatggtggcacacacctgtagtcccagctgtttgggaggctgaggcaggaggatcacttgagcccaggaggctgcagtgagctgggatcgcaccagtgcaccccagcctgggtgacagagcaagaccctgtctcaaaaaaaaaaaaaggacttggttggggaacactctcattctctggcatggaatggggtgttgcacaattcttttttcttttcttttctttttttttttttgagacggagtctcactctgtcgcccaggctggagtgcagtggcgtaatctcggctcactgcaagctctgcctcctaggttcacaccattctcctgcctcagcctcccgagtagctgggactacaggtgcccgccaccacacctggccaattttttttttttttttgtatttttttttagtagagacggggtttcaccatgttagccaggatggtcgcgatctcttgacattgtgatccgcccacctcagcctcccaaagtgctgggatcacaggtgtgaaccaccgcgctcggcctcacaattcttaaaaataaaaaaataaattagtaagagtgggttgctgagagttcagagcacctgcccagcacttcatgtgtcctgtactagtttagcacttgcctggtctctggcccctaggtacctggtctcactgggctgcatcaaacccctatgtgacttgctgactgtaatggattcgaagattgtgcaagtggccctcaatggactggagaacatcctgcggcttggagagcaagagggcaagcgcagtggctcaggggtcaatccttattgtggcctcatagaggaagcctatggtatgtgccctctcctcaatctaggtcagaacctgagactgtaggcctccaacgtggtatacatatgttggtggtggcggagtgtgggttgggaagcatccatagcttccatgagactgatgtctgtgtcttcagaacagttaagagctcctgccctagccaagtttcaccatccacagggtttcacacgttaccatgagtataatcaggatgtgctgagtagctggggtacagctaggatttggatttggctcatcttttgagttgagagttgtctctcaccagtttcttctccttctaaggagtgataggtcagttctctttctgataggctgtacctataagagtgctggattaactcatcactcatccctgagaggctgatgatgtgcccaggtcatgcttctagtttaaagcagaatcaggactagaacctctgtaactgacattttggtctctttcctttgggattctgtagttttgagaagaaatcttaactctcccctttcaggtccaagagtgatctgatcatatgacttgtgtttgtaagcactaacatacctcagggaaggaaaaataggtaaatgtttcacctgcccatagaaaagcactcacacttccctctccttccttcttactactgtaggcttggataaaattgagtttctccagagccacgagaaccaggagatctaccagaaggccttcgacctcattgagcactactttggtgtagaagacgatgatagcagcctggctccccaagtcgatgaaacgcaacagcagttcatcttccagcagcctgaggcccccatggagggcttccagctataatatctgcctccagggaggggaggggatgggaagcaccaccagccagcggaagagcagccctctggtgggcgggaaaccagtgtccccaccatcagccaccacacacctctgctgccctggagactgtgctcttgacctgctccgcccccttccctggagggagcaccctctggacagacagaaccatctgaggctcacctttgggttttgtgacaagaaggggacgtgttgggtttttcttccttacactatattttggctgcacacatgtctttaacccaggagcccaggggtagacaaaggaggactaaggtaatcaatttgcacctttttttatttttattttttttctttttttcttcagtggtgacttccttccctttatcttttttcattcttcccggtcctctgccctgatctgtgtaactcttatcttgggtacttgagcagacggtatattccagaggtgggaggtgggaggggaagggagaaatccaaaacaaagtgttcttgctctgacagaatattaatcttgtacgcttggattgagttatttaatttttttttcttttgcacatttttcttgtattaagattgctcttcccaagagccacaagttcctggttttagtaaacccagctgcctgcattgcctgggactagaggctggggaggctaccatgaaacaaaggtccctccctccctctgactctttgcccagacctctttagtttgggggatcctcctcactctcctgaagtgtctcaagtataccagtgggagtgcaggggaggagcacaggccttcagatggggcttcccacgtgtagctactgatcccatatttcctactcaccttccaaatggtgcgacccaacttcatttgtttacttgaaaattccccctcgaggttgagagaacctctgaggtggctgtattttctcctaagcttgagatagggggctgtggtccttcctttctcctgaggagaaagtccttgctctggtgacctgtaagttgcagaggagggtggagtgagagtgtcatgtattgggatagtcagggatccctgcctttggcctttcttcttcttcttcttcctcttccatagttggatcatgtatattttacttctaaaggagagaatgtcaaaaagttctgtatttttttatattctatatattaggtaggtcaatcttaattggtctcaagaggaagaactgtctgtcatttcggtaagtaggatactgtgaggaagaccaaaaagagatatggatgcttcctcgctcaggaggcctgagcttggtccttttcctctctgcttggattctggaccaccacctgggaccaaccttcagctctggaaccttcataaagcaggtcagcgtggcctgattgtcccaggacctgaagggagcaaggatggcctcagggcctggtgaagtctgctactctgtccttactgctgaacatcctgcttgtatcaggaaactcagaagcagtttgccttgtcaaattcaatctcaatggccattgtccacataactgatcacccatggctgcctctcctattatctattatcactgaaacttagtagcctgctttttttttttttttttttagagctattgcgtatcttccctgtttgggatccttgtacctggtttgggttttcccttccttgtgacaattataatccagatgcctcttctttctgtttgaattacggtagtgcattgccttagtggcttgcctgtgcctctgggtggattacatatgatagtaaagcccacctgtttggatgggagtagaggaagttggtgtagaccagctgtggagctgaaggcacagtctgccccacccccacctccccactgtggttagtcagaggcatcctgctccaagctctgcttttccttcctctgaaacaatgccattcttgcttctattgctacacatctccttctggctcaggtgaaatccatgcccttctgcttatagacctaaagttcaggtacttattattggccattgatcttgaatttgccctctcctagtgctgcagtcccacttcaaagccattttctgaggaggatggtttaggtctggcaattgtccttgaaaaatcccacccatgttgtaccaccttggtgagtcatatgccactcatcagcttgggaatgatggctgccaactcccaatctcccaggaaggcagggggcagaatctttttttcacttggcctgctacctccattaaaaaaccattctcttacagtttaaaaaaaaaaaaaaaaaaaaagccttcccctacccaacctccgcccattgttctcttccaaagggcaatttagtaggatctactttgtacatctcaagtaagagttaagtccctgatacagggaccagtttcttagtgtaagacatacacatcctgcttgtccagctgttcctccaaaatctactttggcttcagctccgggtcctgtaccagatggaaaatgtttttggtgatctggctgctgcttaaagccagttttccctaagaactccaaaggctaaagtctactaggggcagagtgtgaggatagatttctaatcagagaaaagtggcctccaggagctttcatttatgtcttctccagaccaggttttcctgttatcttcctttaatcccctttcaaccaacaggtgaagttcttccagcccacagaggtagtaatatcatcttttctatctcctcctctcctttggccatgtaatgaagcaaaatattatttatttagcccaggcttgagagccactgtttgtggacagtcttcatctagattccataccctggcctaggcgaggtaaggctctctggttattgccaggatggagcccctctaccccagtctgctgtagggaataccctaattagttgaggcatgcttttggaatcctggcatgttggcatatggctggtctatcctttttaagatctctggttgggggtatctggatatggattaggagggacaaggagcctttttcttggctaatgttttccaatacttttttgaatggtgccagcccctccaggcatcccacccccaaatcatcatctttagtactaacagggtgtctggtcttagaagcctcccttcagatcccagctgaccctggtgactgcctggccttgatgttggctgcagccttctgatagaaccacatggattccacccacagctggccaggcttgttacatgggtcagggaatacaaatggcccccccccagggagcaggtgttggcctcagttttcagggacccttggtgttgctccttacctagagcccattaatctaccccatcaactctctgccatgaaagccatcttccaggagccctgttttttggagctgaactgcacagattatagctgctattgtacttaaataagggagaggaaaagaaggttctcaggcacagactttctatttttctcaagccaaaccagtttaaaatgtctagcagaatgaactgtatttccatttcttcatgtctacctgccttccccccacaccctaaagttgtacttgtttctagcaaactagaaggaaaagataggaaagcctggcactactaacctcacctctcatacacctctttgaaggccccagctcttttgttcaggcctctcttctcccctagactcactcagcttggtatccatcatcttgagcattcttcagtagattcatctagggttcagattccagactctcagctgaagacagggagccaatttcccccaggtccctgcaggtaatccagggaccccatagggagaacaggctgactggggcattaggaatgtttgtacctctctgcttccctggcagcctggggaagggtgcagggctcagtgcgctaaaccatggtaaacatcttcaatagaactaccctagaatttagtgagtgtgagactgagatattgctcagaataaatttattccatagccatttaggattgcatgttctggaccaaccttgtccagtatgttttctgtttgagctttttcattcttttgttaagccaacaagttgagaatttggccctgctgggatccatgtagtgggcactagctgctctttggccaaggccttcataaatgattcagtctctcattatctgtcctctagccccacaccctgatttagaccgtggcaaaggaagaacttgaggtcaagaccaaccaaatctgtgaattaaagctgttatttttttctctgcaagggcgctttgcttcaggtctgggctatgtgcagaacctaagcaggctgtgagagttagaagaggcagtattacatgttaggcccagaacaccatgggaaaaggtttatgtagtgtatcttagtggcctgcctagctgcctctgggccaggctgacttctgatgtccacattagctcgtacctgaaccctgttgctgaatgccagccctgttctcctgtaactattatatacgccatggcctggggggcattgaaggaagtaagctctcagagatcctaacactggctgggaacctctgactcagagcatgtctttaaagagtccacatctggccaggcgcggtggcacatgcctgtaatcccagcactttgggaggccgaggcgggtggatcacgaggtcaggagtttgagaccagcctggcaacatagtgaaaccccatctctaataaaaatacaaaaaattagctgggcgtggtggcaggcgcctgtaatcccagctacttgggaggctgagacaggagaatcacttgaacccaggaggcggaggttgcagtgagccaagatcatgccactgcactccagcttgggtgacagtgcgagactccatctcaaaaaaaaaaaaaaaaaaaaaatccacatcttcagctgggcgcggtggctcatgcctgtaatcctagcactttgggaggctgaggcgggcagatcacttgaggttaggggttcaaaaccagcctgaccaacatagtaaaaccccgtccctacaaaaataaaaaaataaaaaaaataagccaggtgtggtggtgggcacctgtgatctcagctacgtgggaggctgaggcaggagaatctcttgaacctaggaggcagaggttgcagtgagccaagattgtgccagcctgggcgacagggtgaggctcttgtctcaaaaaaaaaagtccacatcttcatgaaccctcagactctggagttgggtgtcggcttttttagccagcttttgtgggaattgcctttgacctattaaagaaggaaagtgggtaatggagtcccagccactcaagagactggatatcccccgagaatggcttgggttaccagctatggacccttggaagatgaatctaatccttctcactggtttttctttgcaaattcatttgcttttatttttctaataacaataaactctattttccatgttctcagggcccctgggtagacagacacagcttgatttcagagcagacataggcgaagaaaacatggcattgagtgtgctgagtccagacaaatgttatttatatacacatccaaatttgaagagaaaatgtatttctttaggtttcaaacactgtaatagatataaagcaaaaataaaaacctgttgcaaagttctaaa

SEQ ID NO: 879 - DNA, 98 bp, Homo sapiens
cctatagtcccagcactttgggaggccaaggcaggtggatcacctgaggtcaggagtttgagaccagcctggccaacatggtgagaccccgtctctac

SEQ ID NO: 880 - DNA, 110 bp, Homo sapiens
ccgccaccacgcccagctaatttttgtatttttagtagagacggggtttcacgttggccaggctggtcttgaactcttgacctcaggtgatccgcctgcctccgcctccc

SEQ ID NO: 881 - DNA, 17127 bp, Homo sapiens
acacggaggcgcgcacgatggcggcggaggtgctgagccgccgctgcgtgctcatgcggctactggacttctcctacgagcagtaccagaaggccctgcggcagtcggcgggcgccgtggtcatcatcctgcccagggccatggccgccgtgccccaggacgtcgtccgggtgagcgtctgccctgccccgcccggctcaggtccagagctgcggcgggagttggaggcaactgtgtgaccctaggcgggtcacttcgcctctctgagccctttggaaagtaggatggactgttcccctgctccattgatctccaaggggtgattctgtcttcagaggacgctgggtgatgaccggaggtgttcagggagggccgctccgggcgtggagtggatggaggccagggatactgctcagcaccctgcagtgcccaggacggccccgccccagacagtgatctggccccagggtccacagggctgcgcaggagaacctgcctagagtgaacaagacctggtagaatccagcagacgccctgggtgaagatacttttgcagatgagaaggggtgggtgggttgggggaagccctggttttctgtgagtgcctcatggttcatgccgccctctgagggcctgcctgccctccagggacagtcactgggccccctgctaccccctccagggacagtcactgggccccctgctacccccaccagggacagtcactgggccccctgctaccttgccacccccaccaggccagcagccccctaagtgtgtgtctgctccacagcaattcatggagatcgagccggagatgctggccatggagaccgccgtccccgtgtactttgccgtggaggacgaggccctgctgtctatctacaagcagacccaggctgcctccgcctcccagggctccgcctctgctgctgaaggtgtgctctgggctgcagggacggggcccgtgggcgtgggtgtggggaggcgtccccatcccaagggctgcggtcaccctgggctgtttctgctctcagcgtgtggcatcccttcgccggggttaacagtgggggttcctgggccccgtgtggacctgctacatcaccacctccgggctgggacctgggactctgcatttttgcagccgcctgtcccccctcccagctgctggctctgtgcacacgaaagaccagaaccacggactcaggaggagcctttccgatcctcaggggctcggggtttatgaaacacacgggcatctgttcagttctctacctgccaaggacattctcagcatcacatctcgagtgggcggcgtgggtgcgtcggcggtgtccttacggagaaggggcacacgcctttcctccagccccgtgaacgggggccctggcagcgaactcagagcaggaacccggagctctgtggtgggacctgtggtggggaaagatgggagttgccgctgtggagagtgaggagaaagaggaactggagaagccagctgaggggcttgcccggggctgtcatcagctactgggggagcagggctgagaagggaggccagagcccagggccgcagagaacaggcaggtgtgtcctggcccagccccaacaaaaacagtttggtgctgtggtttcaagctatagtaaaggaggctgaggcgggtgggtcccctgaggtcaggagttcgagaccagcctggccaacctggcgaaagcctgtctttactaaaaaaatagaaaaagttagccgggcgcggtggcaggtgcctgtaattccagcaacttgggaggctgaggcaggagaatcacttgaacccggaaggcggaggttgtggtgagctgaggtcacaccattgcactccagcctgggcaacaagagcaaatgtccatctcaaaaaaaaaaagtttcatcctacacagccagatcagtggaattccagatgcagagttggctaacactggccaggggccacctgtttttgttgataaagttttattggcactgggccacattcatttatgcacagtccacggtggctttcccagcagcagaactgaattgccgtggctgcggcagagaccatccagcctgcaaagccgaaagtgttatctgatcctttgcagaaaacgttcccaacccctggtttagattaaaagtcttgacagtggccatttttgttgtggtaatagaagagtatagttctgcagatacctaagtatcctgttagagaagaaggaaagaggagtcgtcttctttttttttttttttttcttttatgagacagagtctcactctgttgcccaggctggagtgcagtggcacaatcttagctcactgcaacctgaaggaggaatcttctacttggtggagtattatgcagctggtaaaaatgatgttgagggccaggcaaggtggctcacgcctgttgtcccagcacttacggaggctgaggcaggaggatcgattgagggcctggagtccaagattagcctgggcaatatagcaagacccttgtctctacagaaaatttaaaaaagccaggtgtggtggtgcatgcctgtagtcccagctgctcaggaggctgaggtgggaagatcacttgaacccttgaacctgggaggcagaggttgcagtgagctgagatcttgccattgcactccagcccgggtgacagtacgatactccgacttgaaaaaaaaaaaaattacagagagttcccaggagcatgcttcccccagtgatcatatctttttgttttgttttgttttgtttttttgagacggagtctcgttctgtcacccagactggagtgcagtggcacaatctcggctcactgcaagctccacctcccgggttcgcgccattctcctgcctcagcctccagagtagctgggactacaggtgcccaccaccacgcccagctaattttttgtatttttagtagagacggggtttcaccgtgttagccaggagggtctcgatctcctgacgtcgtgattcgcccgcctcggcctcccaaagtgctggtattccaggtgtgagccaccgcgcccggccgatcatatcttacatacctatgatgattgtgttttcatttttattttattctttcttattatcttttattttatttcaaaagattgtatttttaggccaggcacagtggctcattgcctgtaatcttagcactttgggagggtgagacaggaggatcgcttgatcctgggaggtagaggctgcagtgagccatgtttgcgtcactgtactccagcctgggtgacagcatgagaccctgtctcaaattaaaaaaaaagttgtgtttttaaaatgctttaaagcacagaagtgcggactcaaagttgtgtgaactcacaggcattttcgggcaggtcctggccctaagtccctaagtgaacagctgttattgagggcccgggaggaaaggatcagaatggcatggaggagaaattccccagcagaacgttccagaaaggagatgtgaataatttcgagagaaggttgtcctagggggagcacgggcatcctgtggtatcgaaatctgctggtcacgtccccacacccggctggttggctctgcccgagcccccaacctggggtgtcagtgctggggatgccccctggctggggccctggctgggccaaggctgatgcgccctctccctctccctagtactgctgcgcacggccactgccaacggcttccagatggtcaccagcggggtacagagcaaggccgtgagtgactggctgattgccagcgtggaggtgagtgccgcctgccccggagccagccccacgtccccaggggttcctgccatccgcctggctccccggctcggccgtactagaggggagccgctgatgggaaactggagtcggatcgcccccctgcctggctgaaaacctcctgtggctccgctggcagctgcaggaacccaaactcctcacatggccggggagtcgctctgtggagtgcccaggcccctgccagcccccggcccatctccttccttccatcatggacccccacacaccaagccgctgcctcccaccccagggcctttgcaccggctgcccctcccaggaagccccctccaggctgcagtgtcgccagccccctctcatcacataacctcacccgtcagcccagacgctgcgtcctcacagacccttccgagcaccccgggatatcagcagagtcaagagagggtggggagctgccggtgcggaagtagcctctcggatcatcagggcagatccagagggtgaagcctgtgtcgctgctgctgcagcactggcaggggccttaaaacccgaggaagcacccaccgactcctctagcatttccctgcgggacggcgccggtgaggggtgcagatgagtccacacagatgaggggttgcctcactgtcgggggagccctgaacaagacgtgcttgctgttttggggacccaggccttgttggggggtgcccgagtggaaaagcagcggcttaggccggggtggggaaagtgtcctggaggccccggctccccatagacaggccttggcggaggagccctggggtttgtcgatggcggctgttctgtttgttcctgttggattgtactgtgggcccgggaggcgcgtcctattcccagcgccagttagtgtgcagtgagacccggtagcctggcctgcgtcactccacagtggcacaggcgctgggctccgcatcccatggggccatgtcgattccctttcccctggctgtgccctttctcctgtgagcagagccctcttggcagctgggctttgagttcagccgttgaaggatctccaagtggaaaagcatgttgcaaaaacagcaagtagactcccacagccagacggggagtccccaggccacagccggccctctacctgcttttgtaaataaagtttttgcttgtttgtttttgttttttgagacagagtctctctctgtcacccaggctggagtgcagtggcgcgatctctgctaactgcaacctccgcctcccaggttcaggcgattgtcttgcctcggcctcccgagtagctgggattactgtcatgtgccaccacgcccagctaatcttttgtaattcttttttttttttttttgagatggagtttcgctcctgttgcctaggctggagtgcaatggtgcgatctcagctcactgcaacctccgcctcctaggttcaagcgattctcctgcctcagcctcctaagtagctgggattacaggtgcccgccaccacggccagctaatttttgtatttttggtagagacggggtttcaccatgctggccaggctggtctggaactcctgacctcaggtgatctacccgccttggcctcccaaagtgctgggattacaggcgtgagccaccgtgccgggctgtgtaaataaagttttatggcacacagccatgctgatgcatgtgcaagccgtccatggcagtttcttagttgtaacagacaccatctggtccccaaggctgaaaatatcccctctggccctttatgaaagtctgctggcccccgggctagagcagaatccgactttggtggggtaagaggcagggaggggtgcacacagaccctgaaggaacccgaatgcctggctgaggggctcagccccgttcccacaaacagttatcctcctgaggggctcagccccgttcctataaaaacttaacctcctggccgggcgcggtggctcacacctgtaatcccagcactttgggaggccgaggtgggcggatcatgagatcaggagatcaagaccatcctggctaacatgatgaaaccccgtctctactaaaaagtacaaaaaattagccggatgtggtggcgggtgcctgtagtcccaactactctggaggccgaggcaggagaatggcgtgaacccgggaggtggagcttgcagtgagccgagatcgtaccactgcactccagcctgggcgacagagtgagattccgtctcaaaaaaaaaaaaaaaaacacaaacaaaaaaaaaaaacttattctcctgctctccccgatttttaaagatttcgacctgagggccagagcaggagtgggtccctgttcccggctctacctcctccctggaggagctccctggggctcccagagtcagaggctggcacctcctgtggtcctcagtgctgaggccgatgctggcacccagcggacgggccccacgtggcccagaggggaggggtctccaagccccacacacgggtcacctgccccaggaacagccaggccattcccctgctctctatccacaggggcggctgacggggctgggcggagaggaccttcccaccatcgtcatcgtggcccactacgacgcctttggagtggcccccgtacgtatgtgtgtccccattccccccaccccacagggcttggattctggctccagtccagtgccgaggcaaagcgcctgtaggggatggcggccagggtcagcggctctccctgtgacggcctttgcccgtcatcctggtccccgcgagggcctcagggtgggtgtcgtggggctgaaacaggcccggctcttgccccggggtcgcaggttccagggcacggcggtgtctgtgtcagaggctgagcccagggagtctgagtcagggttccccgggccagcgctgggtgccgtggctccacacgaggcctcctcgaggctgtggtttgtcccagcgagcggtcatggagcacgtagcagagtccgcgaagggaaaggcgcgtgcggtgagttggggaggccagtcctggcttccaggccctctccctgtgtgtcacgtggaacacgcctcattgtcagcagtgagctgggacgacagcccaaagcactgtcaccagcgagacttccagagacccagcgcccggttcctatgggagctggttctacagcccctgctgcctggcccatgccgggattccagactccggagggaagcagggcccgtgtgtaaaccatggtgtttgcaggaacagctttggacccagagcctgtcctgtcagcgagggtcgggggccctgctgcaggttcctggtctcaggcctgcggcacaagcttggttctgctcagcgtgggttgagcgggagtggggtgggggggcatgtaccacggtgtcaaccagcaccctgcctcctcctttttttttttttttttttttttttttaattgagacagtcttgctctgtcccccaggctggagtgcagtggcacaatctcggctcactgcaacctctgcctcctgggtttaagcgattctcctgcctcagtctcccgagtagctgggaccacaggcacccgccaccacacctggctaattttttttatttttagtagagacggggtttcaccacgttagccaggatggtctcgatctcctgacctcatgatttgccctcctcagcctcccaaagtgctcggattacaggcctgagccaccgcacccagtcctgcctcctttgaacacaaatcagctgaaccaggcagagtgcggagggtctgggcagatctgctgcctggctgagtgcccgaccccttggagggccaggcccccagccttgagaatgcctggtcccgctgggcccacacaaactcaagctgctcagagcaatgcctcttgaactcctgacctcaggcaatccacccgcctcggcctcctaacctgctgggattacaggcatgagccaccgcgcccactgcctttctctgtcctcattgtcccctatgaagctttttttgttttaaatttattttatttatgtatttttttttttttttttgagacggagtctcgctctgtcaccaggctggagtgtagtggcgagatctgggctcactgcaaccttcgcctcccgggttcaagcgattttcctgcctcaacctccggagtagctgggactacaggcgcgtgccaccacacctggctcattttttgtatttttagtagagatagggtttcaccatgttggccaggatggtcttgaactccagaccttgtaatctgcccatcttggcctcccaaagtgctgggattacaggcgtgagccaccgagcccaggcaaatttattttttgagataatgatagaacataaagttcaccattttagagcgtacgagtgggttttagtacatccaaagttgtacggtctccacctctaattccagaacattccatcaccccaaaaagcagcccctccccatcagcagtcactcctggtcccctccccagccccagaaccccagcatgtgcgcatccgtcccagtgcctgtggactggcctgttggacgggtcctatgaacagatcctacactgtggacaaagtcttttggatctggcttctctcactgaggagggtgtttattgtccccctgaattcagtgccaccgaggtcccctttatatgctgtggccttgggacggtcccaagccattgcaatgtccaagaaacagtgtggccttattgagaatgctgctttagatcacaaaggtgcatccaagggcgggaagggcatgtggtcgggctgtgcaggtctctccacagccggggctcgagggtggaagggtgggtcccacagaggggaccccgcacagagaccagggctggacagatgctgccctctgtgagcgaatctggcctggccctgggctccaaattctgcatgtagcttctcccgggcgcgggccgagccgaggtggatgaggagagtcctgggcttggcggggccccgcagaccccaggccatcagtcggggattgaatacaggaggggagcgaccacagctgcccactggacgtggcagaggggctgggggacagcacagagatgaccgtggctgctgtgggcagaggtcatggggctacgggagtagggtgggggtgacggagagatgactgtggctgctgtgggcggaggtcatggggtgcgggagccgggcgggggtgactgtggccttgcctctcccgtccctgtagtggctgtcgctgggcgcggactccaacgggagcggcgtctctgtgctgctggagctggcacgcctcttctcccggctctacacctacaagcgcacgcacgccgcgtgagtgccggggtgggcagggggatgggggtgcgggggccacactgccggacagcgctgcccaccaggcacctctgcagatgtttctctggagcctcctggccccaaagtgggcctgagcccaggaattggggcgccttatttatcgagggctaagctgagccctcgcaggctctgtctcttggagtcccacagggcccagctgctgctcaccccaggaacctgctgggaatgctgtcagctgcaagtgttagagacgcccggttaagggccctggaactaggggatcccctcagccctgtgtggtcggggccggatttttcgctgggggtgggggccgtcctgggcactgcagggcgctgagcagcatccctgccccactcactccatgccaggaacacgccatagtcatgatagccacaggtgccctccgacatcacccactgtccgctgggggcagaagcacccctggttgagacccccctgggttagggaattccacgggcccccgagagactatgtcccgtgatcatctgccccgctgaggtcccaggaggctgcacacattgaaatccacaccctgagtaggaagggagagaggaggtgaatcccaggagctggggtccccctggtttatcccgtctaccccgttgggagtttatcctggtgtctggtgtgagcagggggcagacttgatttttccccagataatgaatgcaggcttcgtccccgtggccctgtggatgtcttctgtgcatgactctctcctgggtgccacccactccatcccaggagcacccccagacgtagcaaccacagatgtctccagacatgactgtgtctcctgtgcggggtggggtagaatcacctccgggtgagaccccggcccagtcacctgctcccgagatggtactgctgcagtcattgtgtcagcagctcagagaggccagggccactgtggctgagacgtttctcagccttctcacagtcacaaggcgccgggagtcatgtcctggttcaggcaggaacttggactcgaactcctggcctcaagcgatcctcctgcctcagcctcctaaagcactaggattacaggtgtgagccaccatgtccagccaaaacttgtttttttttttttaagctgcagaacctcttcccccagccccccactgatgccttttgagaagctcatgctgtcaaaaacgtgtgaacggggctggtttctgccaggcctgggggcttcttggcagctggggagaggttgggtttctggggcagagggaaactgggttggagagagtccggggcagatgtgggaagatgggggtagggggcgtgctgagcagtttccttctctgactctggtgacccttctaatagccaaggctgtgttccattagaatttttggcctgcctgggtggcttatgcctataatcccagcactttggaagcctgcggcaggtggatcacctgtcaggagttcgagacctgcctaacgtgttgaaaccctgtctctactaaaaatacaaaattagccaggtgtggtgctgcatgcctgtaatcccagctacttgggaggctcaggcaggataattgcttgaacccgggaggcagaggttgcagtgagccgagactgcaccattgcactccagcctgggcagaaagagcgaaactccgtcccaaaagaaaaaaaaaaaagaattcttcttctttaagtgaatagactttatttttttgatctcctcgtgtctgttgcctggtcggtcaccccggttcctcctgggctcagagaagcctctagagctggggtctaacgtggggtggccctgctgcctggagacactgagtgatttgcagttgtcattgggggaagctcccggtatggggtgggtgaggccagggatgccactcagcaccctgaagtgcccaggacagcctcacctcagagaaccatccagccccagtgtccacagggccgaggggtcatgccccgccctaaggggctggtcaggatttcctgctttggggagaccttcatacccttcctgggggacctgtgacctggcctggtccctcctccaccccaggcgcttgcccgtcaaagctaacactgggtcttccctcccagctacaacctcctgttctttgcgtctggaggaggcaagtttaactaccagggaaccaagcgctggctggaagacaacctggaccacacaggtgagcggccccgggtgggggtgggggtgccgcggtggtggtgccgtggggaggcacggaggcccaggggttgccatgggggcagccaggaggcacagagggagggccgggggccacttcctggtccccacccaccccgccagctctcggtgtcctgcagactccagcctgcttcaggacaatgtggccttcgtgctgtgcctggacaccgtgggccggggcagcagcctgcacctgcacgtgtccaagccgcctcgggagggcaccctgcagcacgccttcctgcgggagctggagacggtgggtgcccctttcatggatgggtccggagctctgcggagcacacacatcggggccgggttggggcatcctgtcccagggtgtccttgctgtccgcccctcaggctctgagggccacactgtgtcggggtcgggctggggtgttctgtcctggggtgtccttgctgtccaaccccggggctctgaggggcacactgcgtcagggccgggctggggtgtcctgtcccagagtgtccccttgtccctccttacccactgctcattgcccgccggggctccagcaggccttagggggaccccgggggcaggtggatttctcctcattttgcaccctcgggggttctgggaggcccctggagcatttggggaatgggctggggtggccgccatccccgcctgccctctgctaatggcgcctccggctgcaggtggccgcgcaccagttccctgaggtacggttctccatggtgcacaagcggatcaacctggcggaggacgtgctggcctgggagcacgagcgcttcgccatccgccgactgcccgccttcacgctgtcccacctggagagccaccgtgacggccagcgcagcagcatcatggacgtgcggtgagcgcggcagcacctgcccggcccctcctagggctttcctgggggctgagccactggtcgcaactgcagaggccatgagagcctggagggagcggcccccacacacaggctgcgaggaaggggccggtgcgtggccaaggccggctgcacggtcaggccgttcgcaagctcttccttactggggctagggagggcgaggccagcagcctgaggtcgtggccccatataggacccccagaccccgtcacctgttgagttaggagcaagcagctcctgcctctgggcctcttcagggccctgccacagcccgaaagtcctgcctggccccggccaccgtcttggggagcctggcccgccaccacaccccggcccttcctcgccccgcctccctctgggcactgtgtctctggcttcttatgtcctctgaccctgtgtcctgcccgtctctctgccatcatgtgagcccctgggcaggcttttgtggagcctggaactgtctggccaccccaggcacactcctggccagtcctggcaccagcaggtgggcgccgtctcctcccccagcgcccgcagtcccggcatagatccttcccgttcatccactctgctctgcggtcactgggccctcaggagtggtttgagctcagccatcggaggcctgcagaagccagtggcgggagggaggggcacatccctgggtaatcgcagtcctggaaaggatggaggtggcggtcgcccaccagccaggaaagattgccaggaaatgagggtgggtgcacggctgtcccagctgtgctgagctctctcaagaccaccaggggtcagcccaggagggccacctgggatttgcagagggtcccagaatggattcttccaccaggacggaatagtccagtttaaattctggaagagcagaaaaccgagtcagaaggaaccaaggcctcagggcgtgagccttacctgcgcacagggacgggtcagggcaaggggcctggaggtgtggggcccccagtgaatctgcatctacatgttagccaagtagttaaagctaagcttaatttttttttttttttaaagacagagtctcacggtctcctaggctggagtgctgggattacaagtgtgagagctaccttgcctggcccaaagtccacattttaaaacattgtttttgaatcgtgaaggtcccgggtggattctaagaccctgacccgtaacacgaggatcattgcagaggccctgactcgagtcatctacaacctgacagagaaggtgagccctgagccctctgtgccgccagacccagccccagccctgcccccggccccggccccacccctggccccagccccactgcaggggcctggactcagggccatcccctcctctctccgcaggggacacccccagacatgccggtgttcacagagcagatggtaagggggccaggccagtgggtgggtgggtgggcggggccaggccatgactaccaccaccgtccctacagcagatccagcaggagcagctggactcggtgatggactggctcaccaaccagccgcgggccgcgcagctggtggacaaggacagcaccttcctcagcacgctggagcaccacctgagccgctacctgaaggacgtgaagcagcaccacgtcaaggctgacaagcggtgaggctggggctccgcgctggccccgttcagcctggggccgagggggacctccccctactgcatctcccaccccctcacccctgggggatgccaggtggagcaaatacaaagagagggtgggatgagggccggacacggcggctgtgcctgcaatcccagtactttgggaatccgaggcaggtggatcacttgaggtcaggagttcaagaccagactggccaacatagtgaaacctcatccctactaaaaatacaaaaattaggcggatgtggcagtgggcacctgtaatcccagctacttaggaggccgggacggaagaatcgcttgaacccaggagttggagaccaacctgggcaacatagcaagaccccatctctacaaactttttaaagtttttatttatttgtctttgagatggagtcttcctctgtcacccaggctggagtgcagtggcgtgatcttgtctcactacagcctccatctcccggcttcaagtgattctcggacctcggtctcctgagtagctgggattacaggcacccgccaccatgcccggctaattttttttaatttttagtagagatggggtttcaccgtgttggccaggttggtcttgaactcttgacttcaagtgatccgcctgcctcaacctcccaaagtgctgggattgcaggtgtgagccatcgtgcccagtctccatctctacaaacccttttttaagaattagctgggcgcagtggtgccccctgagaaagtgctctctccccagggacccagagtttgtcttctacgaccagctgaagcaagtgatgaatgcgtacaggtgagtggtggccagcgggacctggagcccttcaccccctacgggttacagccgaggggactgcggcccacgggggtctaggggttcatgttactgccgcgcaccatcctcgacctcagggaccctgctttctccacagagtcaagccggccgtctttgacctgctcctggctgttggcattgctgcctacctcggcatggcctacgtggctgtccaggtgagcagtgcccaggctcaggtggggcaggggccgcccgccgggaggagctgggctgggcgtctccaagtgcatcctggcccctggctcagcctagagtcacatgacctggggctctggccccgcccacatcctcactccctcctgctgtgtccccagcacttcagcctcctctacaagaccgtccagaggctgctcgtgaaggccaagacacagtgacacagccacccccacagccggagcccccgccgctccacagtccctggggccgagcacgagtgagtggacactgccccgccgcgggcggccctgcagggacaggggccctctccctccccggcggtggttggaacactgaattacagagcttttttctgttgctctccgagactggggggggattgtttcttcttttccttgtctttgaacttccttggaggagagcttgggagacgtcccggggccaggctacggacttgcggacgagccccccagtcctgggagccggccgccctcggtctggtgtaagcacacatgcacgattaaagaggagacgccgggaccccctgcccgatcgcgcgcggcctccgcccaccgcctcctgccgcaaggggcctggactgcaggcctgacctgctccctgctccgtgtctgtcctaggacgtcccctcccgctccccgatggtggcgtggacatggttatttatctctgctccttcttgcctggaggagggcagtgccagccctggggttctgggattccagccctcctggagccttttgttccccatgtggtctcagtgacccgtccccctgacagtgggctcggggagctgcatcacccagccttccccttctccgactgcagggtctgatgtcatcattgacagcctttgcttcgtgggggcctggcagggcccctgcctccccgacccccgacccactgcaaatccccgttcccctgcactcctcttctcccagcccatccctccggcccctgtgcctctgcggccccagcccagctcccagggccgtcacctgcttggccctggcccagctccctgccctgagtcctgagccagtgcctggtgtttcctgggctcggtactgggcccccaggccatccaggctttgccacggccagttggtcctccctggggaactgggtgcgggtggagtactgggaggcaggaggtggcccggggaggccttgtggctcctcccctcgctcctcgccctgggcctcagcttcctcatcaatagaaaggatgtgttcggggtgggggcgtcaggtgagaacgtttgctgggaaggagaggacttggggcatggcctctggggccacccttcctggaactcagagaggaaggtccgggccctcgggaagccttggacagaaccctccaccccgcagaccaggcgtcgtgtgtgtgtgggagagaaggaggcccgtgttgagctcagggagaccccggtgtgtccgttctttagcaatataacctacccagtgcgtgccgagcaggcttggtggggaagggacttgagctgggcaagtcctggcctggcacccgcagccgtctcccttccgtggcccagggaggtgtttgctgtccgaaggacctgggccggcccatgggagcctggggttctgtccagataggaccagggggtctcactttggccaccagttcttcggccagcacctctgccctccagaacctgcagcctggaggggtgaggggacaaccacccctctttcctccaggttggcaggggaccctcttctcccgtctgccctgcgggttgcccgcctcctccagagacttgcccaagggcccatcaccactggcctctgggcacttgtgctgagactctgggacccaggcagctgccaccttgtcaccatgagagaatttggggagtgcttgcatgctagccagcaggctcctgtctgggtgccacggggccagcattttggagggagcttccttccttccttcctggacaggtcgtcatgatggatgcactgactgaccgtctggggctcaggctggtgtgggatgcagccggccgatgagaaaataaagccatattgaatgatcgccaccagtgtttggtctgggggctgtgagaattggattgtgacaa

SEQ ID NO: 882 - DNA, 2454 bp, Homo sapiens
agtggtgccccctgagaaagtgctctctccccagggacccagagtttgtcttctacgaccagctgaagcaagtgatgaatgcgtacaggtgagtggtggccagcgggacctggagcccttcaccccctacgggttacagccgaggggactgcggcccacgggggtctaggggttcatgttactgccgcgcaccatcctcgacctcagggaccctgctttctccacagagtcaagccggccgtctttgacctgctcctggctgttggcattgctgcctacctcggcatggcctacgtggctgtccaggtgagcagtgcccaggctcaggtggggcaggggccgcccgccgggaggagctgggctgggcgtctccaagtgcatcctggcccctggctcagcctagagtcacatgacctggggctctggccccgcccacatcctcactccctcctgctgtgtccccagcacttcagcctcctctacaagaccgtccagaggctgctcgtgaaggccaagacacagtgacacagccacccccacagccggagcccccgccgctccacagtccctggggccgagcacgagtgagtggacactgccccgccgcgggcggccctgcagggacaggggccctctccctccccggcggtggttggaacactgaattacagagcttttttctgttgctctccgagactggggggggattgtttcttcttttccttgtctttgaacttccttggaggagagcttgggagacgtcccggggccaggctacggacttgcggacgagccccccagtcctgggagccggccgccctcggtctggtgtaagcacacatgcacgattaaagaggagacgccgggaccccctgcccgatcgcgcgcggcctccgcccaccgcctcctgccgcaaggggcctggactgcaggcctgacctgctccctgctccgtgtctgtcctaggacgtcccctcccgctccccgatggtggcgtggacatggttatttatctctgctccttcttgcctggaggagggcagtgccagccctggggttctgggattccagccctcctggagccttttgttccccatgtggtctcagtgacccgtccccctgacagtgggctcggggagctgcatcacccagccttccccttctccgactgcagggtctgatgtcatcattgacagcctttgcttcgtgggggcctggcagggcccctgcctccccgacccccgacccactgcaaatccccgttcccctgcactcctcttctcccagcccatccctccggcccctgtgcctctgcggccccagcccagctcccagggccgtcacctgcttggccctggcccagctccctgccctgagtcctgagccagtgcctggtgtttcctgggctcggtactgggcccccaggccatccaggctttgccacggccagttggtcctccctggggaactgggtgcgggtggagtactgggaggcaggaggtggcccggggaggccttgtggctcctcccctcgctcctcgccctgggcctcagcttcctcatcaatagaaaggatgtgttcggggtgggggcgtcaggtgagaacgtttgctgggaaggagaggacttggggcatggcctctggggccacccttcctggaactcagagaggaaggtccgggccctcgggaagccttggacagaaccctccaccccgcagaccaggcgtcgtgtgtgtgtgggagagaaggaggcccgtgttgagctcagggagaccccggtgtgtccgttctttagcaatataacctacccagtgcgtgccgagcaggcttggtggggaagggacttgagctgggcaagtcctggcctggcacccgcagccgtctcccttccgtggcccagggaggtgtttgctgtccgaaggacctgggccggcccatgggagcctggggttctgtccagataggaccagggggtctcactttggccaccagttcttcggccagcacctctgccctccagaacctgcagcctggaggggtgaggggacaaccacccctctttcctccaggttggcaggggaccctcttctcccgtctgccctgcgggttgcccgcctcctccagagacttgcccaagggcccatcaccactggcctctgggcacttgtgctgagactctgggacccaggcagctgccaccttgtcaccatgagagaatttggggagtgcttgcatgctagccagcaggctcctgtctgggtgccacggggccagcattttggagggagcttccttccttccttcctggacaggtcgtcatgatggatgcactgactgaccgtctggggctcaggctggtgtgggatgcagccggccgatgagaaaataaagccatattgaatgatcgccaccagtgtttggtctgggggctgtgagaattggattgtgacaa

SEQ ID NO: 883 - DNA, 3658 bp, Homo sapiens
tggattctaagaccctgacccgtaacacgaggatcattgcagaggccctgactcgagtcatctacaacctgacagagaaggtgagccctgagccctctgtgccgccagacccagccccagccctgcccccggccccggccccacccctggccccagccccactgcagggcctggactcagggccatcccctcctctctccgcagggacacccccagacatgccggtgttcacagagcagatggtaagggggccaggccagtgggtgggtgggtgggcggggccaggccgtgactaccaccaccgtccctacagcagatccagcaggagcagctggactcggtgatggactggctcaccaaccagccgcgggccggcagctggtggacaaggacagcaccttcctcagcacgctggagcaccacctgagccgctacctgaaggacgtgaagcagcaccacgtcaaggctgacaagcggtgaggctggggctccgcgctgccccgttcagcctggggccgagggggactccccctactgcatctcccaccccctcacccctgggggatgccaggtggagcaaatacaaagagagggtgggatgagggccggacacgtgcgctgtgcctgcaatcccagtactttgggaatccgaggcaggtggatcacttgaggtcaggagttcaagaccagactggccaacatagtgaaacctcatccctactaaaaatacaaaaattaggcggatgtggcagtgggcacctgtaatcccagctacttaggaggccgggacggaagaatcgcttgaacccaggagttggagaccaacctgggcaacatagcaagaccccatctctacaaactttttaaagtttttatttatttgtctttgagatggagtcttcctctgtcacccaggctggagtgcagtggcgtgatcttgtctcactacagcctccatctcccggcttcaagtgattctcggacctcggtctcctgagtagctgggattacaggcacccgccaccatgcccggctaattttttttaatttttagtagagatggggtttcaccgtgttggccaggttggtcttgaactcttgacttcaagtgatccgcctgcctcaacctcccaaagtgctgggattgcaggtgtgagccatcgtgcccagtctccatctctacaaacccttttttaagaattagctgggcgcagtggtgccccctgagaaagtgctctctccccagggacccagagtttgtcttctacgaccagctgaagcaagtgatgaatgcgtacaggtgagtggtggccagcgggacctggagcccttcaccccctacgggttacagccgaggggactgcggcccacgggggtctaggggttcacgttactgccccgcaccatcctcgacctcagggaccctgctttctccacagagtcaagccggccgtctttgacctgctcctggctgttggcattgctgcctacctcggcatggcctacgtggctgtccaggtgagcagtgcccaggctcaggtggggcaggggccgcccgccgggaggagctgggctgggcgtctccaagtgcatcctggcccctgctcagcctagagtcacatgacctggggctctggccccgcccacatcctcactccctcctgctgtgtccccagcacttcagcctcctctacaagaccgtccagaggctgctcgtgaaggccaagacacagtgacacagccacccccacagccggagcccccgccgctccacagtccctggggccgagcacgagtgagtggacactgccccgcgggcggcggcctgcagggacaggggccctctccctccccggcggtggttggaacactgaattacagagcttttttctgttgctctccgagactggggggggattgtttcttcttttccttgtctttgaacttccttggaggagagcttgggagacgtcccggggccaggctacggacttgcggacgagccccccagtcctgggagccggccgccctcggtctggtgtaagcacacatgcacgattaaagaggagacgccgggaccccctgcccgatcgcgcgcggcctccgcccaccgcctcctgccgcaaggggcctggactgcaggcctgacctgctccctgctccgtgtctgtcctaggacgtcccctcccgctccccgatggtggcgtggacatggttatttatctctgctccttcttgcctggaggagggcagtgccagccctggggttctgggattccagccctcctggagccttttgttccccatgtggtctcagtgacccgtccccctgacagtgggctcggggagctgcatcacccagccttccccttctccgactgcagggtctgatgtcatcgttgacagcctttgcttcgtgggggcctgaggcccctgcctccccgacccccgacccactgcaaacccccgttcccccgcactcctcttctcccagcccatccctccggcccctgtgcctctgcggccccagcccagctcccagggccgtcacctgcttggccctggcccagctccctgccctgagtcctgagccagtgcctggtgtttcctgggctcggtactgggcccccaggccatccaggctttgccacggccagttggtcctccctggggaactgggtgcgggtggagtactgggaggcaggaggtggcccggggaggcttgtggctcctcccctcgctcctcgccctgggcctcagcttcctcatcaatagaaaggatgtgttcggggtgggggcgtcaggtgagaacgtttgctgggaaggagaggacttggggcatggcctctggggcacccttcctggaactcggagaggaaggtccgggccctcgggaagccttggacagaaccctccaccccgcagaccaggcgccgtgtgtgtgtgggagagaaggaggcccgtgttgagctcagggagaccccggtgtgtccgttctttagcaatataacctacccagtgcgtgccgagcaggcttggtggggaagggacttgagctgggcaagtcctggcctggcacccgcagccgtctcccttccgtggcccagggaggtgtttgctgtccgaaggacctgggccggcccatgggagcctggggttctgtccagataggaccagggggtctcactttggccaccagttcttcggccagcacctctgccctccagaacctgcagcctggaggggtgaggggacaaccacccctctttcctccaggttggcaggggaccctcttctcccgtctgccctgcgggttgcccgcctcctccagagacttcgcaagggcccatcaccactggcctctgggcacttgtgctgagactctgggacccaggcagctgccaccttgtcaccatgagagaatttggggagtgcttgcatgctagccagcaggctcctgtctgggtgccacggggccagcattttggagggagcttccttccttccttcctggacaggtcgtcaggatggatgcactgactgaccgtctggggctcaggctggtgtgggatgcagccggccgatgagaaaataaagccatattgaatgatcgccaccagtgtttggtctgggggctgtgagaattggattgtgacaa

SEQ ID NO: 884 - DNA, 607 bp, Homo sapiens
gagcagagggagtgagggtggggaagggacagggcaggttgtgcagggcctggtgggccacggggaggacttgggctttgaccccagggcagctgggagccatggagggctgtgggtagaagagcgacaggccctgactcaggtgctcccaggcgccctctgacggctaccgcagggaggacagacgggagtggcgagggtttagcctaggaccgggtagaggtgactgggctggcacaagtggaggcagagaaggatgggctcatcctgttccccctccaccgctgtgttcctggagtgcagaggaggggctacagagatgcttccagaaccagtgtgtggcctggaccaagacctggactgctgggggcttcctgagcaagacccacatccctgcagtcaaagctgcctcttctcagaccagggaacttcagaaacaggcagggaacccacccccccaccagggtcccctaggaatcggcaacagagcctcaaacccagcacggggtctctgcctccccaaaacatgtggcaggagaagcttgttcaggagggagaggagggaggggatggacccagagcgaaaggcaggcagggcagggttgca

SEQ ID NO: 885 - DNA, 606 bp, Homo sapiens
gagcagagggagtgagggtggggaagggacagggcaggttgtgcagggcctggtgggcacggggaggacttgggctttgaccccagggcagctgggagccatggagggctgtgggtagaagagcgacaggccctgactcaggtgctcccaggcgccctctgacggctactgcagggaggacagacgggagtggcgagggtttagcctaggaccgggtagaggtgactgggctggcacaagtggaggcagagaaggatgggctcatcctgttccccctccaccgctgtgttcctggagtgcagaggaggggctacagagatgcttccagaaccagtgtgtggcctggaccaagacctggactgctgggggcttcctgagcaagacccacatccctgcagtcaaagctgcctcttctcagaccagggaacttcagaaacaggcagggaacccacccccccaccagggtcccctaggaatcggcaacagagcctcaaacccagcacagggtctctgcctccccaaaacatgtggcaggagaagcttgttcaggagggagaggagggaggggatggacccagagcgaaaggcaggcagggcagggttgca

SEQ ID NO: 886 - DNA, 2357 bp, Homo sapiens
agtccacacagcaatctcctttcctcttcagtgagaacacctctcctttgatcaacattatttattcggcttagtttaaaattcctcttgaggagaagtttctgggactaaacatttgaaaatatttgaaataaaaaaattacctgtttttaagtgacaaaaattattaatttataagttacttaggaatgttctcaggtgcaagtaacagatgacacaaacacagcagattgaatcggcgatggtacaattttctcatgtaacataaatgcagcagctgcatttgttgggtggctcagtggccttttgggcttttccttcatggttgcaagatggcactactccaactcaagcatcatgtttgtattcaagacagaaggaaagggagacggtttgtatcagtcactctgacccttttatcagaattgcataagtgctcttagaagcagtctgcttctccctaagatctttgctcagatgttattgggcagagcttttttgtgtgtgtagtgtctaatggttgcaagggaggttgggaaaaatgattcttttttttctggcttttatagtggaagcaggcaaaagattagttgggtgtagttgttgggttagccggtcatcatgctctgcccctaagtgctcagaatactgaagactaaagatgcaatgacaaacaagatagtccttattgtttttgtttgtttgtttgttttttgtttttagatacagctataattttattacaaaactgttcttttggcattagttagttacagtgatagcaagataatgtgagtgtgcagactggctctgatggaaccactgtattccctgcttactgaaccaaacttcagctacctcatatccattacatacaagtgacctgcagttattactgctacaaatcttgacgcgtgtaccgctgagggaggagctgatgctaagggatttgattacatgttgataagactacaaaagttcgtttatgggactttttcttcctcttcccatgcaatgactttgctttagaacaatcacatggcttagagctagtctgagtagcagcagcacccaaggagcgtcagttcttgttaaaaagcaatacctgtgtgatgcatttttacgccacaggcaaagggaaggatcaccctcattttaaactcctgcagagtcccttaataaaatatcaaagcattccatcaagttcttctgggtggtgttattgctgtacatttgttggtgagtcattttctgtgctgtgtttgctttgaaaggatcttccaatttatctccaatattcctttcttatcatgtccttttctttagctaggatttcacataaccctaatgcattattaagaatgtcttccttattgacacactggttttctagcatgtcttcatagatacccacaagaaaggcaattaggtagggggaactatgacttggttgtaaatcaagtaattgatttaacagattaggatatttggaaagaccacgatcctgcaaaattcctttcaaatagttccatgaactattatgtggtactagttgaatcatttccagagtgtattggacttctctctccaatacagcacaatcattgtagccagtggtgttggaaataacaaaatatcttcggttccagacagagttatttctcacatcctctttgagaagttggtccacatactgcagctcattatcccaaagtttaaattcctgaataacccattgtcgatgctgccaggcatgataattctttgcatcctgattaagaatattatcaataaattcaggctcctgagatggatctcttagccattccactattactcgcctattgtgacaaactagatagtttttgggctgcccctcaattatttcagtgatgtagttcatttcctcatgtagatccttctgaagtgactttaagagaactctccggaaatgtcacactgtataattggctgcatttaactcaacagcatcccgggttagcttaaaacctcgttcgcttctttcttcatgctgcaggacagctcggaagtaatcaaacatctctaaatttgtcactataaatgatctggaccacgggattggggccatcattctgcggcactggatctgtatcagcccattctgttctgtccctgtacgggacataggagggcgaatccaggctcagaaacccgtcgtccatgggggacgccacggcttccccagcctctgctgccatctcttcctcgtgctgctcctggggcagcggtgggtgcggctggggcgggggctgctccagctgccggggctcaccgccttgcgcagcctccccgaccccctcggtggccgccatctc

SEQ ID NO: 887 - DNA, 2357 bp, Homo sapiens; identical to SEQ ID NO: 886

SEQ ID NO: 888 - DNA, 3207 bp, Homo sapiens
aaaaaaactacactcagcccagcacattgatcaagtatctatctctgagcagttggccttgccagggagagcagagatgtggcaggctccttcagctggagacagggagcttctcagagaagtgagcagagactccacagacaccctaaaaaggcttctactcaagaagtaaagccactactcctgcctttttgcttagtggacaggaaggcacaggagtttgtctgggacatcatagaaattcttaggtttaacttaattctggtcattgtcttctttatttcctgtttttcttccctttgtcagtcttcgcatccaagatttcttccctccctcttgtgggccagcctgtcctgttccagagctagcctgttcctgggtagccttccttagcctccattcagcctcaggtcttttgccttcttccgtgtttatttagagagcagaatctaataacgggttccactgtagccactatccatggacttctgggtcctcttcaggtttgagtgcttgaaaatgttcattctctgggcttgtggcctgtctcctccactctcctcctcaccctctcgctccttcctgtgtgagggccgctctgcagtaatgttctcaggcaagccttcctaggcacctcagaaactactttgccagagccagtaagaatatataatattggagcagttgccaggatagaaattaaatatagattccagtttaggatagagtttttaccgagagctcttcagacagtatacctgtgtcttctctggcaattgctttcattttagtcctatataaaagctttccttttctgtttttttttaaaactatgcttttgcttgcctaaatcttttgatcttatatttctctcatctcagagcctgtcctgagttgtaaggtatttcatactgccttacttaaaagttttttaaactactagagtcatttgatacacacagaagttacctaataatccaaagatgtccatcaagggaggaagggtgggtcatcagactttgcctttgatgttgtagactaggctcctgagttaagcagcagagggacagcagtgccatgtgccttcactgtgtcccaggaaatctgggttggttccagtgggaaataccagtatttcttggttctggaaagtagcaaaagagtaggagatggggaaatagggatggggagagcaagccccgcatgtccatggcgagtcaggtggggagcacgggtggaagggccggctgttgacagacagactaagctgtgtggtgctcttgccgccccttcctgggtacagagcttgagaaaaatgcagccgaccactccctgtgtttgtacagagcaaagcccaaaagccaacctcagatctcctgatttggcagctgaagaaatcagcagagtcctgattgcctgattcagtcccaaaaatgaatgtcaggccccgccccctccccaccaacattgcctctcctacattctccttctgcccctaaatcagacaggaggccagagaggagtattgctcaatgcgtgctatgtgcaactcctcaggccttgtgccacctccatgctgagcccctgaagcagggtgtcctgggtgcctgtgtgtcagctccctcctctctacctacctctgaccttcttgtgggtgagggtggccatgcttatggccatcttaaaactggagaggcagagaactacttatgagtctgtagaccacgtgttgtcttccatggcctgtttctcctgctgtctgggtgagtgagcctgcaacgcaatgcccatgagagtaaatgcctcctgacctaccctgctcagcactgttctagtgtcttggccttgaaagaaaagcctgacttcctgctgacacatgtggtaggggcatggcagctatgaggcacctcctacgtctgttttctggctgtggtgacttgggatttttaaccttatatatctttttcctttactcaaaacaaaacaatttttagcacactgaaaaaaaaaaaaagccaaatgttttgtgcctttctaaggcagcactgtatcccaggctgcattttaggacttaatatggaaataccagagtctgagctcctctaccttgagtttcattagtccttagtgtctaggagacaggaaagaatgctctctgtgactggagaggtgacatgcaggtgcagtgtgtctggagtccctttcccctgctgtgagacttcagtggaggagagaagcattgtaccctgggatcatttggttggttccaatcacaagcttagttatcaggttgcatgccttgtctcctgcaaaagacagaatgtttcacaattcccaggtaaactctggaccattccaagtgtcctagccttctgatgacattaattacctagttgtgtggaggagtataggatggactcctgagaaggggaggttggtggctttgtcttttctttttgctggatcctgaactggtctagacctcctgcccccaccccccagcccccatcagatgtggctggcctttcatttgaaggcttcagacttaaagcattaagcagctagtgccctctgcagggcctggtttccccagggaagggcagcaaggaacatgggaccagaagcctgtcctcagtaatgtgactatagtgagctttagcaaaagtttttctatataatgacatcttacttatcttttaccctttcctcagttttcccctgcctttaactaataaagaattgggagacagaaattttaaagtcctccttattcaagattttgaaattcttagcctgggagtgctggagagaacctggtgctttctccagaatgaagagtcccaatttgtatatcagtgttaagaagaaaacaaaacaaacacataggtgagattttcgtggactattttaaaaatgtgtcattaatataaaaaatttatattagcagtatttaatcattctcacctgtaaagaataagaaaaacagaaggtaaatattcttacagagaatagcagagctttaagattcattttcattttaagtccattttattttgccagtgtattaatgtttagaagtctgttttactaatgttatttattaattttttttcatttccatacacagttagttaactaaagagctttttcaagcacccatgtctgtaaaaaaatatttttaaataaagtttcttttgttgtagcaga

SEQ ID NO: 889 - DNA, 3206 bp, Homo sapiens
aaaaaaactacactcagcccagcacattgatcaagtatctatctctgagcagttggccttgccagggagagcagagatgtggcaggctccttcagctggagacagggagcttctcagagaagtgagcagagactccacagacaccctaaaaaggcttctactcaagaagtaaagccactactcctgcctttttgcttagtggacaggaaggcacaggagtttgtctgggacatcatagaaattcttaggtttaacttaattctggtcattgtcttctttatttcctgtttttcttccctttgtcagtcttcgcatccaagatttcttccctccctcttgtgggccagcctgtcctgttccagagctagcctgttcctgggtagccttccttagcctccattcagcctcaggtcttttgccttcttccgtgtttatttagagagcagaatctaataacgggttccactgtagccactatccatggacttctgggtcctcttcaggtttgagtgcttgaaaatgttcattctctgggcttgtggcctgtctcctccactctcctcctcaccctctcgctccttcctgtgtgagggccgctctgcagtaatgttctcaggcaagccttcctaggcacctcagaaactactttgccagagccagtaagaatatataatattggagcagttgccaggatagaaattaaatatagattccagtttaggatagagtttttaccgagagctcttcagacagtatacctgtgtcttctctggcaattgctttcattttagtcctatataaaagctttccttttctgtttttttttaaaactatgcttttgcttgcctaaatcttttgatcttatatttctctcatctcagagcctgtcctgagttgtaaggtatttcatactgccttacttaaaagttttttaaactactagagtcatttgatacacacagaagttacctaataatccaaagatgtccatcaagggaggaagggtgggtcatcagactttgcctttgatgttgtagactaggctcctgagttaagcagcagagggacagcagtgccatgtgccttcactgtgtcccaggaaatctgggttggttccagtgggaaataccagtatttcttggttctggaaagtagcaaaagagtaggagatggggaaatagggatggggagagcaagccccgcatgtccatggcgagtcaggtggggagcacgggtggaagggccggctgttgacagacagactaagctgtgtggtgctcttgccgccccttcctgggtacagagcttgagaaaaatgcagccgaccactccctgtgtttgtacagagcaaagcccaaaagccaacctcagatctcctgatttggcagctgaagaaatcagcagagtcctgattgcctgattcagtcccaaaaatgaatgtcaggccccgccccctccccaccaacattgcctctcctacattctccttctgcccctaaatcagacaggaggccagagaggagtattgctcaatgcgtgctatgtgcaactcctcaggccttgtgccacctccatgctgagccctgaagcagggtgtcctgggtgcctgtgtgtcagctccctcctctctacctacctctgaccttcttgtgggtgagggtggccatgcttatggccatcttaaaactggagaggcagagaactacttatgagtctgtagaccacgtgttgtcttccatggcctgtttctcctgctgtctgggtgagtgagcctgcaacgcaatgcccatgagagtaaatgcctcctgacctaccctgctcagcactgttctagtgtcttggccttgaaagaaaagcctgacttcctgctgacacatgtggtaggggcatggcagctatgaggcacctcctacgtctgttttctggctgtggtgacttgggatttttaaccttatatatctttttcctttactcaaaacaaaacaatttttagcacactgaaaaaaaaaaaaagccaaatgttttgtgcctttctaaggcagcactgtatcccaggctgcattttaggacttaatatggaaataccagagtctgagctcctctaccttgagtttcattagtccttagtgtctaggagacaggaaagaatgctctctgtgactggagaggtgacatgcaggtgcagtgtgtctggagtccctttcccctgctgtgagacttcagtggaggagagaagcattgtaccctgggatcatttggttggttccaatcacaagcttagttatcaggttgcatgccttgtctcctgcaaaagacagaatgtttcacaattcccaggtaaactctggaccattccaagtgtcctagccttctgatgacattaattacctagttgtgtggaggagtataggatggactcctgagaaggggaggttggtggctttgtcttttctttttgctggatcctgaactggtctagacctcctgcccccaccccccagcccccatcagatgtggctggcctttcatttgaaggcttcagacttaaagcattaagcagctagtgccctctgcagggcctggtttccccagggaagggcagcaaggaacatgggaccagaagcctgtcctcagtaatgtgactatagtgagctttagcaaaagtttttctatataatgacatcttacttatcttttaccctttcctcagttttcccctgcctttaactaataaagaattgggagacagaaattttaaagtcctccttattcaagattttgaaattcttagcctgggagtgctggagagaacctggtgctttctccagaatgaagagtcccaatttgtatatcagtgttaagaagaaaacaaaacaaacacataggtgagattttcgtggactattttaaaaatgtgtcattaatataaaaaatttatattagcagtatttaatcattctcacctgtaaagaataagaaaaacagaaggtaaatattcttacagagaatagcagagctttaagattcattttcattttaagtccattttattttgccagtgtattaatgtttagaagtctgttttactaatgttatttattaattttttttcatttccatacacagttagttaactaaagagctttttcaagcacccatgtctgtaaaaaaatatttttaaataaagtttcttttgttgtagcaga

SEQ ID NO: 890 - DNA, 3207 bp, Homo sapiens
aaaaaaactacactcagcccagcacattgatcaagtatctatctctgagcagttggccttgccagggagagcagagatgtggcaggctccttcagctggagacagggagcttctcagagaagtgagcagagactccacagacaccctaaaaaggcttctactcaagaagtaaagccactactcctgcctttttgcttagtggacaggaaggcacaggagtttgtctgggacatcatagaaattcttaggtttaacttaattctggtcattgtcttctttatttcctgtttttcttccctttgtcagtcttcgcatccaagatttcttccctccctcttgtgggccagcctgtcctgttccagagctagcctgttcctgggtagccttccttagcctccattcagcctcaggtcttttgccttcttccgtgtttatttagagagcagaatctaataacgggttccactgtagccactatccatggacttctgggtcctcttcaggtttgagtgcttgaaaatgttcattctctgggcttgtggcctgtctcctccactctcctcctcaccctctcgctccttcctgtgtgagggccgctctgcagtaatgttctcaggcaagccttcctaggcacctcagaaactactttgccagagccagtaagaatatataatattggagcagttgccaggatagaaattaaatatagattccagtttaggatagagtttttaccgagagctcttcagacagtatacctgtgtcttctctggcaattgctttcattttagtcctatataaaagctttccttttctgtttttttttaaaactatgcttttgcttgcctaaatcttttgatcttatatttctctcatctcagagcctgtcctgagttgtaaggtatttcatactgccttacttaaaagttttttaaactactagagtcatttgatacacacagaagttacctaataatccaaagatgtccatcaagggaggaagggtgggtcatcagactttgcctttgatgttgtagactaggctcctgagttaagcagcagagggacagcagtgccatgtgccttcactgtgtcccaggaaatctgggttggttccagtgggaaataccagtatttcttggttctggaaagtagcaaaagagtaggagatggggaaatagggatggggagagcaagccccgcatgtccatggcgagtcaggtggggagcacgggtggaagggccggctgttgacagacagactaagctgtgtggtgctcttgccgccccttcctgggtacagagcttgagaaaaatgcagccgaccactccctgtgtttgtacagagcaaagcccaaaagccaacctcagatctcctgatttggcagctgaagaaatcagcagagtcctgattgcctgattcagtcccaaaaatgaatgtcaggccccgccccctccccaccaacattgcctctcctacattctccttctgcccctaaatcagacaggaggccagagaggagtattgctcaatgcgtgctatgtgcaactcctcaggccttgtgccacctccatgctgagccctgaagcagggtgtcctgggtgcctgtgtgtcagctccctcctctctacctacctctgaccttcttgtgggtgagggtggccctcgcttatggccatcttaaaactggagaggcagagaactacttatgagtctgtagaacacgtgttgtcttccatggcctgtttctcctgctgtctgggtgagtgagcctgcaacgcaatgcccatgagagtaaatgcctcctgacctaccctggtcagcactgttctagtgtcttggccttgaaagaaaagcctgacttcctgctgacacatgtggtaggggcatggcagctatgaggcacctcctacgtctgttttctggctgtggtgacttgggatttttaaccttatatatctttttcctttactcaaaacaaaacaatttttagcacactgaaaaaaaaaaaaagccaaatgttttgtgcctttctaaggcagcactgtatcccaggctgcattttaggacttaatatggaaataccagagtctgagctcctctaccttgagtttcattagtccttagtgtctaggagacaggaaagaatgctctctgtgactggagaggtgacatgcaggtgcagtgtgtctggagtccctttcccctgctgtgagacttcagtggaggagagaagcattgtaccctgggatcatttggttggttccaatcacaagcttagttatcaggttgcatgccttgtctcctgcaaaagacagaatgtttcacaattcccaggtaaactctggaccattccaagtgtcctagccttctgatgacattaattacctagttgtgtggaggagtataggatggactcctgagaaggggaggttggtggctttgtcttttctttttgctggatcctgaactggtctagacctcctgcccccaccccccagcccccatcagatgtggctggcctttcatttgaaggcttcagacttaaagcattaagcagctagtgccctctgcagggcctggtttccccagggaagggcagcaaggaacatgggaccagaagcctgtcctcagtaatgtgactatagtgagctttagcaaaagtttttctatataatgacatcttacttatcttttaccctttcctcagttttcccctgcctttaactaataaagaattgggagacagaaattttaaagtcctccttattcaagattttgaaattcttagcctgggagtgctggagagaacctggtgctttctccagaatgaagagtcccaatttgtatatcagtgttaagaagaaaacaaaacaaacacataggtgagattttcgtggactattttaaaaatgtgtcattaatataaaaaatttatattagcagtatttaatcattctcacctgtaaagaataagaaaaacagaaggtaaatattcttacagagaatagcagagctttaagattcattttcattttaagtccattttattttgccagtgtattaatgtttagaagtctgttttactaatgttatttattaattttttttcatttccatacacagttagttaactaaagagctttttcaagcacccatgtctgtaaaaaaatatttttaaataaagtttcttttgttgtagcaga

SEQ ID NO: 891 - DNA, 863 bp, Homo sapiens
aactccatcagtcccctaattgtcagcctttacctccctcccagagcaaggagtttagggattctaaagcttagtgtccacacatcattctaccagaccttagagctttagaagctcaatctaaaatactgtaactcagcataaactattactatcactcctttgaactcagtctccatgagcagtgttttgttggaaatacatagaacggcttaatgcctagagggtggtggatagtgaaggacggtcaaggttatatttttgactgcttagggattctttggatacaagaaacagaaatgttcaagcggaataaaggagggagtggagttgtggtaaggatgcagggtatttcgcagaacccaggacgggaagtgcctttggttcttgggtggagctggaactgcagagctttgcacctagtcctttctcccgcttcacagtctgcttatggtatatgtggcccccaaataggcactctagtcctcaagtctacaccaccttccaactctggggatcaccatgaacaaattctcaatttcccatacttaattttttttttttttgagatggagtctcgctgtgtcgcccaggctggagtgcagtggtgcagtctcaactcaccacaacctccgcctcccaggttcaagcagttctctgcctcaacctcccgagtagctgggattacaggcgcctgccaccatgcccagctaatgttcatatttttagtagagacagggtttcaccgtcttggctaggctggtcttgaactcctgaccctcatgatccacccacctcggcctcccaaagtgctaagattacaggcgtgagccaccgcgcccggcccatacttcgtattctta

SEQ ID NO: 892 - DNA, 4428 bp, Homo sapiens
caatgtatgatttctgggacaattaagctttatttttcatatatatatatattttcatatatatatatacatacatatataaaggaaacaatttgcaaatttacacacctgacaaaaccatatatacacacatatgtatgcatacacacagacagacacacacacccgaagctctagccaggcccgttttccatccctaagtaccattctctcatttgggcccttctagggttggggccctgagcttggtttgtagaagtttggtgctaatataaccatagctttaatccccatgaaggacagtgtagacctcatctttgtctgctccccgctgcctttcagttttacgtgatccatcaagagggctatgggagccaagtgaacacggcggattgaggctaattcacctgaactcaaaaacagtgcccagcttcctcaccgcaggcacgcatcttttctttttttttcctcgagacggagtctcgctgtgttgcccaggctggagtgcagtggcacggtctcggctcactgcaagctccacctcctggattcataccattctcctgcttcagccttccgagtagctagggactataggtgccaaccactacgcctagctaattatatattgtatattagtagagacagggtttcaccgtgttagccaggatggtctcgtcctgactattgtgatccgcccgcctcggcctcccaaagtgctgggataacaggcgtagagccaccacacctggccccggcacgtatctttcaaggaatagacaccagttcctggcttctgaccaaagaaaaaatgtcacaggagactttgaagaggcagacaggagggtggtggcagcaacactgcagctgcttctggatgctgctggggtgctctccggagcgggtgtgaacagcgcacttcaacatgagcaggcgcctggctccggtgtgtcctcacttcagtggtgcacctggatggtggaagccagcctttggggcaggaaaccagctcagagaggctacccagctcagctgctggcaggagccaggtatttacagccataatgtgtgtaagaaaaaacacgttcttacaagaaactctcctacccgctcgggagactggggctccttgcttgggatgagcttcactcaacgtggagatggtggtggactggtccctgaaaagcgggccttgcaggccaaagtgaggtcctcaggtcctaacccagtggccctctgaaagggggtgtgcaggcgaggggagcaggaggcttctctctagtccctttggaggctttggctgagagaagagtgagcagggagctgggaatggtccaggcagggaagggagctgaagtgattcggggctaatgcctcagatcgatgtatttctctccctaaaagtgggtagaggagaagaggggaacacggagacggtgctgagttgaaggtgtgagcaccgagaggaaggagagatggaagcagaagccgatgaatttggtgggcagcgttggggaggaagctaggatgggcatggcaggccagggaaggagggcggcccccgtctgactgcactggtgaaatggccacacccagagccacgggcattggtcaggaaaaggtgatgggacagggtctttctcagtcttcctccaagctccctcagccacttgcttggccctgccatctgtgagtagtgttaagaaggcaagatggggcctgctccctatctctgacaaagagggatgaaggatagagagaaccgttagtccctactgcccccggtccctgaggatgtggcaggctctggccacaggaaccgcctcctacctggtctcccggagccctcttgtcaccgctgctgccctgcaggaggcccatctcttctgggagcttatctgacttaacttcaactacaagttcgctcttacgagacgggggcagcgtgctgggaggagggagggaggtgagaggttggtatctcagggccacaggaagagaagggcccgctgtgaaggatgtggaatggatgagggctccttgctccagggccagcccagggcagggaagcaggtcatgagaccatgtggctgatggaagctgggcagtgggtagtggagcaggcagcaccctgacccagggccccactcctgctgtcaaggggcaggcgggcgctgggcaggcagcaggctgggtggcaaaacgggcgggggcggaggggccggtgttgggcttacatctcctgcttccctgagcgcctgcacggcagcttgcccttcttatagaggaaatagaggacagcgcccagcaccgccaggaccaggatgcacacaatcacagccacgatgaccacgcccccggctctccggctccggcagctttctctctgcgccacaaagacactcctcgtcactccctgccccaggccacttcgtcaccatcgttgccccagccagtccagggccgacaagatggggctgctactcacctttctggacagggctctctggggagggacagggcagaaaggatgccctggcacagccctgttctcttgccaggcctggcttacctgtggaggtgctgttggctctggtatgaggactggcagtggaagtgctgaggccagtggttgtgttggagtctggtgtgagggtggttaaattgactaggaggcagagggaggggtgttaggagaagcgcaagttactgcccgtgcctgggcctgcccctgccatcccctgcagggatgcagccctcacccagctccaggaagaggatgctggtgtttttgcccaggtcgttggaggccgtgcattcaacacctgtctccaacagctccggggtcacgaggacattcagggtgctcaggactcgctgtggatcttggtcttgttcacttgcctgcgaggaaaggaaggaggcagctcaggggatggggaggatctctggtcctggccacaaagcgcaggcagggattaggagagtgtggcagatgagacacccgctcaccgtgccgttgacgttccaggagatggtgggccgggggtgccctgacgcttcacaagacagattcaacaccatattctctttcacccacaccttcctctccttgaatgccatccaaggggggccttggggaggtagggagaggtgaggtggcaagcccagctagcctgcctccccctccgcaccagagctccccagggcagcaggtggctttttgtcaaagagcttaaaaaccaccccacttggggtgacctggtctctaccccagagggagggcctcaccaaaaatggccacgttgaccagctgtgtgcggttcaggccgggtatgctgggcacagacgccacgcagcgatagccgcctcctgcctcccgtttcaggtcatgcaactgaagcacaggccccctttccagcacctggcctgtctgggatgagagatgggtcagagggtctgggaaagagcacattcttgtcacccgccagccccacccaccccatcagccccttgccccagacccgcctgggtacctcttctctcagcctctggaactcgagctcctggctactctctgctcacaggtcaggtgaggctgctgccttcctgtctctcaggggctgcgggactcactcggacgtcagacacatctgggggtacagcaatcatgtcacccagggcagggtggggccagttccctattgccccagcctggtccccctgtcctgggtccccagcccctcacagttcaccagtagttcctgtggttcactcagcagcgatatcatggtgtccaagtccaggccctgacattcatagcgcccactgtgttccttccgggcaggctccagcaccaggaccccgttgtcgttggttgtctcttcctctgcctccctggtgctggggttctagggaggattggggaggtgagcagagtgcacctcccgccactccacctgggtctctgcttgcatccccacctgcacccagcacaaagcccccacacctgcttgctgatgctgaagtgtggtggagggttgccatcagccaaacacctgatttccacgcggtccccttccttcagcattcccacgggctccacttccagccacactttttctgtcgggtctgcataggcaaagggggtagctcttggcccatgagtcaacctgggctgataagggggagccagcaggagtttccagcagccccagccccagtaagcagagagtcaggttagtactcacagaaaacagggacggtgacttccctggactccttcatgtggttcccactgggcagccggtagttgagctcacagtaaaactgggcatctttgtcttctttaaccagctgtgccttcagaatactctgcaaggtgtacaaaccactcgactccacagtctgggacgactgaatgtggac

SEQ ID NO: 893 - DNA, 863 bp, Homo sapiens; identical to SEQ ID NO: 891

SEQ ID NO: 894 - DNA, 3439 bp, Homo sapiens
caatgtatgatttctgggacaattaagctttatttttcatatatatatatattttcatatatatatatacatacatatataaaggaaacaatttgcaaatttacacacctgacaaaaccatatatacacacatatgtatgcatacacacagacagacacacacacccgaagctctagccaggcccgttttccatccctaagtaccattctctcatttgggcccttctagggttggggccctgagcttggtttgtagaagtttggtgctaatataaccatagctttaatccccatgaaggacagtgtagacctcatctttgtctgctccccgctgcctttcagttttacgtgatccatcaagagggctatgggagccaagtgaacacggcggattgaggctaattcacctgaactcaaaaacagtgcccagcttcctcaccgcaggcacgcatcttttctttttttttcctcgagacggagtctcgctgtgttgcccaggctggagtgcagtggcacggtctcggctcactgcaagctccacctcctggattcataccattctcctgcttcagccttccgagtagctgggactataggtgccaaccactacgcctagctaatttttttttgtatttttagtagagacagggtttcaccgtgttagccaggatggtctcgtcctgactttgtgatccgcccgcctcggcctcccaaagtgctgggattacaggcgtgagccaccacacctggccccggcacgtatcttttaaggaatgacaccagttcctggcttctgaccaaagaaaaaatgtcacaggagactttgaagaggcagacaggagggtggtggcagcaacactgcagctgcttctggatgctgctggggtgctctccggagcgggtgtgaacagcgcacttcaacatgagcaggcgcctggctccggtgtgtcctcacttcagtggtgcacctggatggtggaagccagcctttggggcaggaaaccagctcagagaggctacccagctcagctgctggcaggagccaggtatttacagccataatgtgtgtaaagaaaaaacacgttctacaagaaactctcctacccgctcgggagactggggctccttgcttgggatgagcttcactcaacgtggagatggtggtggactggtacctgaaaagcgggccttgcagggccaagtgaggtcctcaggtcctaacccagtggccctctgaaagggggtgtgcaggcgaggggagcaggaggcttctctctagtccctttggaggctttggctgagagaagagtgagcagggagctgggaatggtccaggcaggaagggagctgaagtgattcggggctaatgcctcagatcgatgtatttctctccctaaaagtgggtagaggagaagaggggaacacggagacggtgctgagttgaaggtgtgagcaccgagaggaaggagagatggaagcagaagccgatgaatttggtgggcagcgttggggaggaagctaggatgggcatggcaggccagggaaggagggcggcccccgtctgactgcactggtgaaatggccacacccagagccacgggcattggtcaggaaaaggtgatgggacagggtctttctcagtcttcctccaagctccctcagccacttgcttggccctgccatctgtgagtagtgttaagaaggcaagatggggcctgctccctatctctgacaaagagggatgaaggatagagagaaccgttagtccctactgcccccggtccctgaggatgtggcaggctctggccacaggaaccgcctcctacctggtctcccggagccctcttgtcaccgctgctgccctgcaggaggcccatctcttctgggagcttatctgacttaacttcaactacaagttcgctcttacgagacgggggcagcgtgctgggaggagggagggaggtgagaggttggtatctcagggccacaggaagagaagggcccgctgtgaaggatgtggaatggatgagggctccttgctccagggccagcccagggcagggaagcaggtcatgagaccatgtggctgatggaagctgggcagtgggtagtggagcaggcagcaccctgacccagggccccactcctgctgtcaaggggcaggcgggcgctgggcaggcagcaggctgggtggcaaaacgggcgggggcggaggggccggtgttgggcttacatctcctgcttccctgagcgcctgcacggcagcttgcccttcttatagaggaaatagaggacagcgcccagcaccgccaggaccaggatgcacacaatcacagccacgatgaccacgccccggctctccggctccggcagctttctctctgcgccacaaagacactcctcgtcactccctgccccaggccacttcgtcaccatcgttgccccagccagtccagggccgacaagatggggctgctactcacctttctggacagggctctctggggagggacagggcagaaaggatgccctggcacagccctgttctcttgccaggcctggcttacctgtggaggtgctgttggctctggtatgaggactggcagtggaagtgctgaggccagtggttgtgttggagtctggtgtgagggtggttaaattgactaggaggcagagggaggggtgttaggagaagcgcaagttactgcccgtgcctgggcctgcccctgccatcccctgcagggatgcagccctcacccagctccaggaagaggatgctggtgtttttgcccaggtcgttggaggccgtgcattcaacacctgtctccaacagctccggggtcacgaggacattcagggtgctcaggactcgctgtggatcttggtcttgttcacttgcctgcgaggaaaggaaggaggcagctcaggggatggggaggatctctggtcctggccacaaagcgcaggcagggattaggagagtgtggcagatgagacacccgctcaccgtgccgttgacgttccaggagatggtgggccgggggtgccctgacgcttcacaagacagattcaacaccatattctctttcacccacaccttcctctccttgaatgccatccaaggggggccttggggaggtagggagaggtgaggtggcaagcccagctagcctgcctccccctccgcaccagagctccccagggcagcaggtggctttttgtcaaagagcttaaaaaccaccccacttggggtgacctggtctctacccagagggagggcctcaccaaaaatggccacgttgaccagctgtgtgcggttcaggccgggtatgctgggcacagacgccacgcagcgatagccgcctcctgcctcccgtttcaggtcatgcaactgaagcacaggccccctttccagcacctggcctgtctgggatgagag

SEQ ID NO: 895 - DNA, 2668 bp, Homo sapiens
caatgtatgatttctgggacaattaagctttatttttcatatatatatatattttcatatatatatatacatacatatataaaggaaacaatttgcaaatttacacacctgacaaaaccatatatacacacatatgtatgcatacacacagacagacacacacacccgaagctctagccaggcccgttttccatccctaagtaccattctctcatttgggcccttctagggttggggccctgagcttggtttgtagaagtttggtgctaatataaccatagctttaatccccatgaaggacagtgtagacctcatctttgtctgctccccgctgcctttcagttttacgtgatccatcaagagggctatgggagccaagtgaacacggcggattgaggctaattcacctgaactcaaaaacagtgcccagcttcctcaccgcaggcacgcatcttttctttttttttcctcgagacggagtctcgctgtgttgcccaggctggagtgcagtggcacggtctcggctcactgcaagctccacctcctggattcataccattctcctgcttcagccttccgagtagctgggactataggtgccaaccactacgcctagctaatttttttttgtatttttagtagagacagggtttcaccgtgttagccaggatggtctcgtcctgactttgtgatccgcccgcctcggcctcccaaagtgctgggattacaggcgtgagccaccacacctggccccggcacgtatcttttaaggaatgacaccagttcctggcttctgaccaaagaaaaaatgtcacaggagactttgaagaggcagacaggagggtggtggcagcaacactgcagctgcttctggatgctgctggggtgctctccggagcgggtgtgaacagcgcacttcaacatgagcaggcgcctggctccggtgtgtcctcacttcagtggtgcacctggatggtggaagccagcctttggggcaggaaaccagctcagagaggctacccagctcagctgctggcaggagccaggtatttacagccataatgtgtgtaaagaaaaaacacgttctacaagaaactctcctacccgctcgggagactggggctccttgcttgggatgagcttcactcaacgtggagatggtggtggactggtccctgaaaagcgggccttgcagggccaagtgaggtcctcaggtcctaacccagtggccctctgaaagggggtgtgcaggcgaggggagcaggaggcttctctctagtccctttggaggctttggctgagagaagagtgagcagggagctgggaatggtccaggcagggaagggagctgaagtgattcggggctaatgcctcagatcgatgtatttctctccctaaaagtgggtagaggagaagaggggaacacggagacggtgctgagttgaaggtgtgagcaccgagaggaaggagagatggaagcagaagccgatgaatttggtgggcagcgttggggaggaagctaggatgggcatggcaggccagggaaggagggcggcccccgtctgactgcactggtgaaatggccacacccagagccacgggcattggtcaggaaaaggtgatgggacagggtctttctcagtcttcctccaagctccctcagccacttgcttggccctgccatctgtgagtagtgttaagaaggcaagatggggcctgctccctatctctgacaaagagggatgaaggatagagagaaccgttagtccctactgcccccggtccctgaggatgtggcaggctctggccacaggaaccgcctcctacctggtctcccggagccctcttgtcaccgctgctgccctgcaggaggcccatctcttctgggagcttatctgacttaacttcaactacaagttcgctcttacgagacgggggcagcgtgctgggaggagggagggaggtgagaggttggtatctcagggccacaggaagagaagggcccgctgtgaaggatgtggaatggatgagggctccttgctccagggccagcccagggcagggaagcaggtcatgagaccatgtggctgatggaagctgggcagtgggtagtggagcaggcagcaccctgacccagggccccactcctgctgtcaaggggcaggcgggcgctgggcaggcagcaggctgggtggcaaaacgggcgggggcggaggggccggtgttgggcttacatctcctgcttccctgagcgcctgcacggcagcttgcccttcttatagaggaaatagaggacagcgcccagcaccgccaggaccaggatgcacacaatcacagccacgatgaccacgccccggctctccggctccggcagctttctctctgcgccacaaagacactcctcgtcactccctgccccaggccacttcgtcaccatcgttgccccagccagtccagggccgacaagatggggctgctactcacctttctggacagggctctctggggagggacagggcagaaaggatgccctggcacagccctgttctcttgccaggcctggcttacctgtggaggtgctgttggctctggtatgaggactggcagtggaagtgctgaggccagtggttgtgttggagtctggtgtgagggtggttaaattgactag

SEQ ID NO: 896 - DNA, 863 bp, Homo sapiens; identical to SEQ ID NO: 891

SEQ ID NO: 897 - DNA, 1292 bp, Homo sapiens
tgcagctggaggccaattatcgtaaacgaattagtgcaggaaccagaataccaaataccatgtgttctcacttaccttacccctaaaagttagatgcccttcctccatactcccacagtaccctctatatttttacgagtcattatattcctctttactttgtgagccccttaaaagcagagaccgggtctgttttactcactggtatgtcactacagtgccaggctcattgtttgcattcaggtggttgttgaatgaacaaactcaaatgtaactgcctatttacttgtctgtctttcctcaacaggctgtatgttccttggtggatggatctgtggtttattaagctttgtttcttttagcatttagcactcagcatgaagacctagcacacagaagtttattgaataaattaaatttgtcaggattaataattaatctttaaaatacagtatatagcattgaagaatatatagaaagtattctcaagatacagagagacatgggttgctcaggattattcctttgtgtttcacttataggaaagatctcatactacagactacaaatgccaaatgacctactgtgctcataccacccttaacctagaaataaaatagaaacaattcctaaagaaacagtcttaaaaataaccagctaaaattttatcaacaacaacaaaaaagtagttggggtttctgctcattaaattagtttgtatgggtaagcaccacctaagtttcttgattcatggcatgtgttcttaaaccaatttactatccactaaaaataaatggtgatcattatataaaaagcagttgtatttcttgacactagcaatgaaccatctgaaaatgaaattaagaacacaattccacttacagtagcatcaaaaagaataaaatatttagaaataaattaaaccaaagaagtgtaagacatgtacactgaaaactaaaaaacacagttaaaagaatggaaagatagcctatgttcatggattggaagactgaatattgctcagatggcagtactccccaaattgatctacagattcaatgcaattcctatcaaaattccatcttcctctttgtagaaatggacaactggtcctaaaattcatatggaaacttaagggaccccaaataatgaacaaatgttggaaaagaagaacaaagttcatgggttcacactttgacttcaaaatttactacataatcaagacagtgtggtatggtctgtcataggacagacatatagaccagtggaataaaattgagtccagaaataaa

SEQ ID NO: 898 - DNA, 1292 bp, Homo sapiens
tgcagctggaggccaattatcgtaaacgaattagtgcaggaaccagaataccaaataccatgtgttctcacttaccttacccctaaaagttagatgcccttcctccatactcccacagtaccctctatatttttacgagtcattatattcctctttactttgtgagccccttaaaagcagagaccgggtctgttttactcactggtatgtcactacagtgccaggctcattgtttgcattcaggtggttgttgaatgaacaaactcaaatgtaactgcctatttacttgtctgtctttcctcaacaggctgtatgttccttggtggatggatctgtggtttattaagctttgtttcttttagcatttagcactcagcatgaagacctagcacacagaagtttattgaataaattaaatttgtcaggattaataattaatctttaaaatacagtatatagcattgaagaatatatagaaagtattctcaagatacagagagacatgggttgctcaggattattcctttgtgtttcacttataggaaagatctcatactacagactacaaatgccaaatgacctactgtgctcataccacccttaacctagaaataaaatagaaacaattcctaaagaaacagtcttaaaaataaccagctaaaattttatcaacaacaacaaaaaagtagttggggtttctgctcattaaattagtttgtatgggtaagcaccacctaagtttcttgattcatggcatgtgttcttaaaccaatttactatccactaaaaataaatggtgatcaatatataaaaagcagttgtatttcttgacactagcaatgaaccatctgaaaatgaaattaagaacacaattccacttacagtagcatcaaaaagaataaaatatttagaaataaattaaaccaaagaagtgtaagacatgtacactgaaaactaaaaaacacagttaaaagaatggaaagatagcctatgttcatggattggaagactgaatattgctcagatggcagtactccccaaattgatctacagattcaatgcaattcctatcaaaattccatcttcctctttgtagaaatggacaactggtcctaaaattcatatggaaacttaagggaccccaaataatgaacaaatgttggaaaagaagaacaaagttcatgggttcacactttgacttcaaaatttactacataatcaagacagtgtggtatggtctgtcataggacagacatatagaccagtggaataaaattgagtccagaaataaa

SEQ ID NO: 899 - DNA, 184 bp, Homo sapiens
gctcatgcctgtaatcccagcactttgggaggccgaggcaggcagagcacgaggtcgggagatcaagaccatcctggctaacacggtgaaacctgtctctactaaaaatacaaaaaattagccaggtgtggtggtgggcacctgtagtcccagctactcgggaggctgaggcaggagaatcgct

(The sequence listing continues in the following parts.)

1-32. (canceled)

33. An isolated nucleic acid molecule comprising a first polynucleotide sequence at least 95% identical to a second polynucleotide sequence selected from the group consisting of:
(a) a polynucleotide fragment of SEQ ID NO:X as referenced in Table 1A;
(b) a polynucleotide encoding a full length polypeptide of SEQ ID NO:Y or a full length polypeptide encoded by the cDNA Clone ID in ATCC Deposit No:Z corresponding to SEQ ID NO:Y as referenced in Table 1A;
(c) a polynucleotide encoding a polypeptide fragment of SEQ ID NO:Y or a polypeptide fragment encoded by the cDNA Clone ID in ATCC Deposit No:Z corresponding to SEQ ID NO:Y as referenced in Table 1A;
(d) a polynucleotide encoding a polypeptide fragment of SEQ ID NO:Y or a polypeptide fragment encoded by the cDNA Clone ID in ATCC Deposit No:Z corresponding to SEQ ID NO:Y as referenced in Table 1A, wherein said fragment has biological activity;
(e) a polynucleotide encoding a polypeptide domain of SEQ ID NO:Y as referenced in Table 1B;
(f) a polynucleotide encoding a polypeptide domain of SEQ ID NO:Y as referenced in Table 2;
(g) a polynucleotide encoding a predicted epitope of SEQ ID NO:Y as referenced in Table 1B; and
(h) a polynucleotide capable of hybridizing under stringent conditions to any one of the polynucleotides specified in (a)-(g), wherein said polynucleotide does not hybridize under stringent conditions to a nucleic acid molecule having a nucleotide sequence of only A residues or of only T residues.

34. The isolated nucleic acid molecule of claim 33, wherein the polynucleotide fragment comprises a nucleotide sequence encoding a secreted form of SEQ ID NO:Y or a secreted form of the polypeptide encoded by the cDNA Clone ID in ATCC Deposit No:Z corresponding to SEQ ID NO:Y, as referenced in Table 1A.

35. The isolated nucleic acid molecule of claim 33, wherein the polynucleotide fragment comprises a nucleotide sequence encoding the sequence identified as SEQ ID NO:Y or the polypeptide encoded by the cDNA sequence included in ATCC Deposit No:Z, which is hybridizable to SEQ ID NO:X, as referenced in Table 1A.

36. The isolated nucleic acid molecule of claim 33, wherein the polynucleotide fragment comprises the entire nucleotide sequence of SEQ ID NO:X or the cDNA sequence included in ATCC Deposit No:Z, which is hybridizable to SEQ ID NO:X, as referenced in Table 1A.

37. The isolated nucleic acid molecule of claim 34, wherein the nucleotide sequence comprises sequential nucleotide deletions from either the C-terminus or the N-terminus.

38. The isolated nucleic acid molecule of claim 35, wherein the nucleotide sequence comprises sequential nucleotide deletions from either the C-terminus or the N-terminus.

39. A recombinant vector comprising the isolated nucleic acid molecule of claim 33.

40. A method of making a recombinant host cell comprising the isolated nucleic acid molecule of claim 33.

41. A recombinant host cell produced by the method of claim 40.

42. The recombinant host cell of claim 41 comprising vector sequences.

43. A polypeptide comprising a first amino acid sequence at least 95% identical to a second amino acid sequence selected from the group consisting of:
(a) a full length polypeptide of SEQ ID NO:Y or a full length polypeptide encoded by the cDNA Clone ID in ATCC Deposit No:Z corresponding to SEQ ID NO:Y as referenced in Table 1A;
(b) a secreted form of SEQ ID NO:Y or a secreted form of the polypeptide encoded by the cDNA Clone ID in ATCC Deposit No:Z corresponding to SEQ ID NO:Y as referenced in Table 1A;
(c) a polypeptide fragment of SEQ ID NO:Y or a polypeptide fragment encoded by the cDNA Clone ID in ATCC Deposit No:Z corresponding to SEQ ID NO:Y as referenced in Table 1A;
(d) a polypeptide fragment of SEQ ID NO:Y or a polypeptide fragment encoded by the cDNA Clone ID in ATCC Deposit No:Z corresponding to SEQ ID NO:Y as referenced in Table 1A, wherein said fragment has biological activity;
(e) a polypeptide domain of SEQ ID NO:Y as referenced in Table 1B;
(f) a polypeptide domain of SEQ ID NO:Y as referenced in Table 2; and
(g) a predicted epitope of SEQ ID NO:Y as referenced in Table 1B.

44. The polypeptide of claim 43, wherein said polypeptide comprises a heterologous amino acid sequence.

45. The isolated polypeptide of claim 43, wherein the secreted form or the full length protein comprises sequential amino acid deletions from either the C-terminus or the N-terminus.

46. An isolated antibody that binds specifically to the isolated polypeptide of claim 43.

47. A recombinant host cell that expresses the isolated polypeptide of claim 43.

48. A method of making an isolated polypeptide comprising:
(a) culturing the recombinant host cell of claim 47 under conditions such that said polypeptide is expressed; and
(b) recovering said polypeptide.

49. The polypeptide produced by claim 48.

50. A method for preventing, treating, or ameliorating a hematopoietic or hematologic disorder, comprising administering to a mammalian subject a therapeutically effective amount of the polypeptide of claim 43.

51. A method of diagnosing a hematopoietic or hematologic disorder in a subject comprising:
(a) determining the presence or absence of a mutation in the polynucleotide of claim 33; and
(b) diagnosing the hematopoietic or hematologic disorder based on the presence or absence of said mutation.

52. A method of diagnosing a hematopoietic or hematologic disorder in a subject comprising:
(a) determining the presence or amount of expression of the polypeptide of claim 43 in a biological sample; and
(b) diagnosing the hematopoietic or hematologic disorder based on the presence or amount of expression of the polypeptide.

53. A method for identifying a binding partner to the polypeptide of claim 43 comprising:
(a) contacting the polypeptide of claim 43 with a binding partner; and
(b) determining whether the binding partner effects an activity of the polypeptide.

54. The gene corresponding to the cDNA sequence of SEQ ID NO:X.

55. A method of identifying an activity in a biological assay, wherein the method comprises:
(a) expressing SEQ ID NO:X in a cell;
(b) isolating the supernatant;
(c) detecting an activity in a biological assay; and
(d) identifying the protein in the supernatant having the activity.

56. The product produced by the method of claim 53.
